United States Patent Application Publication US 2020/0377945 A1 - sequence listing, part 56

SEQ ID NO: 12412 - DNA, 45211 bp, Unknown
  gut microbiota DNA sequence
gggatcatcctcgtgcaggacacccttccgggtttcccgcacacacccttccgccccgttgacgaaagtgtcccccttgggggggcgggcatggccccctctctttgcaaaacagcttggttttttcgggcgttcatggtataatgccatacatcataccatgaaacatccccccaaaaggagtgactcccatgcccgataccattgccgccatcgccacaccgcagctgccctccgccatcggcatcctgcggctgtccggcccggacacccggcgtatcctggacgtcgtattctcccccgcccacggcggccccgtcagcggacaggccccccggcggatggtactgggagacctacacgaccggcagggacgcatcatagacagcgctctggcggtgctgttccccggcccccacagctacaccggcgaggactgcgccgagatccactgccacggctctccggtggtgctgaatgagggactggacgccctgttcgcccaaggcgcccggcaggccaagggcggcgagttcacccagcgggccttcctcaacgggcggatggacctcattcaggcggaggccgtggcggacctcatcgacgccgaatcccccgccgccgcccgcaacgctgtggggcagctggagggccgtctcagccggggcgtagaggagatctacgacgggctcatggaggtggtgtcccggttctatgccgtggtggactaccccgacgaggacatcgatcccctgacccaaggtcagctgtcccagaccctcgcccgcagcgagacggcactggagacgctgctggccaccttccgccggggacagctgctgcggcagggcgtcccggcggtgattttaggtaagcccaacgccggaaagtcctctctgctcaacgccctgctgggctatgaccgggccatcgtcaccgacgtggccggcaccacacgggacaccgtggaggagaaggtgcaggtgggccatgtgctgctgcgtctgtgcgacaccgccggcctgcgggacaccggggacaccgtggagcagctgggggtgcagcgcacccgtgatgccgcccgacaggcagcgctggccctgctggtgctggacggctcccggcccctgacggcggaggacgaggacgccatcgccaccgctgccgccgttccccggcagctggtcatcgtcaacaagacggacctccccgccgggatggagctgtcggcgctggtgcagcgcttcgggcagctctatcctctgtccgccgctacgggagagggcgtagatgccctgtgccgggccgtggaggccctgtatcccgccgggagacaggcccaaggggagcttctcaccaacgcccggcaggccgacgccgtggcccgcagtctggaggctgtccgctccgcccgcagggcgctggaggacggcatgacccccgacgccgttctcaacgacgccgaggcggcactggaggcgctgggagagctgaacggtaagcgcatccgagaagatctggtgcagaccatcttctcccgcttctgtgtgggaaagtgaatttatgaacaaattgtaaattctatcccggtgcttttttcagctatcctgatatgatatattagattcatcccatcatcccatccggggcgctgccccgtttcaccaaccactcaaaggaggagctacccatgcaggattacatcatcatgaccgacagctgctgcgacctcaccgaccagatggcccgtgagctggagctggaggtgctgcccctgaccatgaccatggacggggaggaataccccaacacgctggacggccgctacattaccaacgaggagttttataagcgcctgcgggccggcaagacctctaccactgccgccgccaacgtgggtcagttcgaggacgccatgcgggccgtgctgggccggggacaggatattctgtgcctgtgcttctcgtcggcgctgtccaccacctatcagtccgccgtgattgctgcggagaacgtggctccggacttcccggagcgcaccatccgggtcatcgacaccctcagcgcctcccgtgggcaggggctgctggtgtatctggccgctcagaagaagaaggagggcctgaccctcagccaactgggggattgggtggaggacaacaagctccacgtctgccactggttcaccgtggacgacctgaacttcctgaagcgtggcggccgggtctccgccgccacggcgctggtgggtaccatgctctccatcaagccggtgatgcatacggataacgagggccgcctgaccatggtgggcaaggcccgtggccgcaaggccagtctcaaggccctgctggacgccatcgagcggctggccatcgagccagagaagcagaccatgttcatctgccacgccgactgcgaggaggaggccaagcaggtggcggcggagatccagcgccgcttcggcaccacggatatccgcatccactacatcgggccggtcatcggcagccacaccggccccaacaccatgggcctgttcttcgtgggaacggagcggtaaggcatgaagtggctggaattgaaactagacacctccccggcggggctggacccggtgtcgcagctgctggaggagcagggcatcacggggctggtcattgatgacgagggggatttccgggattttctggagcacaatcaccagtactgggattatgtggacgaggagctgatgcaggagaagcagggcctttgccgcatcaccttctatctctccgatgacccggagggttatcaccggctggcgcaggtgcggatggccttgtcacagctgaaggcagcgcacccggagtacgcccctctgctgctgaccatgaacaatctggaggacgccgactgggagaacaactggaagcagttttataagcccatggagatcggggaacgtctcatcgtggtgccggagtgggagcaggccaatacgcaaggccgcatccctctgatcctgaatccgggactcaccttcggcaccggcagccacgccaccacccggctgtgtctgacggcgctggaggaaaccatccacggcggtgagcgggtactggatctgggctgcggcagcggcatcctctccatcgccgccctgcggctgggggcggagcacgccttcgcctgcgacatcgacgagaagtgcgtggaggtggcctatgaaaacgccgccctcaacggcatcgaccgctcccgatacaccgtccggtggggcgatgtgctatcggatcagcagctgaaggcggagatcggcgggggctatgacatggtggtggccaacatcgtggcggacgtcatcatcggcctgtccggtcaggtgcgtcccttcctgaagaaggacggcctgttcctgtgctccggcatcatcgacgaccgggcagaggaggtggcccggcacctgcgggaagcgggatgggacattctccgcacccgccagagcgagggctggttctcctatctgtgccggtaatgcggggttccagcgaaacgaccgcaccccctatgctttccataagaaaagagccgcacctgtgggttcggctcttttgctgcttttgaggcagtatgtatggctctcagggcttggccttgccgatgcggatgatctgatcccggctctcgtagttgctggtggcctcgaaggtgctggagaggaggctcccgtccccggcatagacattgcgccacgtctgcaccacatagccagtatagggggtctggatctcctgcttctcccccggcgccagctcatccgtctcctcatagacggtttcccacgggatgacgtccaccgtctcgctgaccatctccacatagctgtcatccaccttggtgcctaagatctccaccgtcacgttgttgtcgttccaataggtgacgatcttgatggggtagtcggtgttgttggcgaagataaaatccgggaagccgtcgtataccgtggcgtcgcacccccacttgatgtagccgggggcgtactggtggcagtagcgcatgacgatctccagatcagccttcagggtggcgtagtacagggtcgaggacacctgacacacaccgccgccgtagacatccaccgtcttgccccccacgtagccgggagcggcgtagaagccgtagtccgctgtggtaggacctatggcgtcgttatagctgaactggtcgccgcagttgagcaccgtgccggagatattctgggccgccttgcggacgttctggatgcggccccatgcgccgctgacgtaggtggtgcagctggccagcacgtcccggaacagcaccttctccagcgccgccttgctgaccttgggctgctggatctgggcgggaacggtgatttcctgtcccggctgagcctgagccaccagcttttgggcggcgtcggcgtcaaaggtcacctgcaccgtcccctcctccacctgatcggcggcggcgttataggaggcgtttttcgccgtggcgtaggtctcggcaaaggcatcgaagtccacaggcttggcctccaccacctcataggtgcaggtcaccggctccaacgtcccggtggccagcgccgcccgcagggcatcggttaaccgacggaggtctatcttgcggccgttctttggcaccgtcaccaaaaagccgtcctcttttccctgctccagccgacaggccccgtcaacagccgccatatccagctgctctgccagctccgccgctttttcctgcaaggcggcgtcatccgccgtccacggcggggtcagggacgtctcccggaaccagctgcggagaaggctccagccgttttccaggaaatggccgctgtgtccggcgtcataggccagctgggccgccgtctccggggtcacggagactcccagctcccacagggacacctgtcccgccgtctcaccgtccaacgtcaggggcagctgagccgcctgacatacggcctgtcccttctgctgccaacgctcctgcgcctgcgggacggtcaatccgctcatatccacgcccatcacgtcggtgcggccgaggatggtgccgtggctggcggagacgatgcacaaaaccagatagaatatgcccagcaccgccacgatgccgccgccgatgagggccgccagcttcccagcggtttttttggccggggactccggcggtgcgggcatctcctccgggatggggttcgtctccgggcttgcggtcgaggcggtctccggttgcggaatggtagccgtgggggcctcctgcggggtggtctcctgcgtttcctgctccaagggcttctgtgcttccatacagcccctcctttactatacagtgcagcgcacactgcgctatcatgcagtatactacggaaaggggcaaaataggttacaatttcattacagacgccggtttttatacacttcgtcgcattatgtccgcacccgcttgggaatacggatggtcagaaggatctcctcgtcggtatcctgacggccccagtcggcgttgactcccgcctggcgcatcaggtgcaggccccggtccacgctgttgaggaacagccggacatccttgatgatgtaggtggtgcggcccttgggaggcgtcacctgctggcggtgcagcagatcctctatgtaggcctcggcggcggccacattcatcctgcgccggcagaatacctgcgccgccgatagctgctgctcctccgtccccagccgcagcagcgcccgtgcatggcgctccgtcaagccgttttcctgcaaaaactgccgcacggagtccggcagccgcagcagccgcagcttgttggccaccgccggttgcgagcggcccagacgacgggcggcctcctcctggctgagcccgtagcgggcaatgagccgggacagggcctccgcctcctcccagcaatccagatcccggcgctggaggttctccatcagcgccagcagcgccgagtcctcctcccctacctgcgccaccagacacggcacctcccgcagtcccgccatggcggcggcccgcaggcgccgttctccggccaccagctcatagcctgtcccctgacggcgcaccgtcaggggctggaggatgccgtagctgcggatgctttccgccagctccgacagggagtcctcgtcgaagctgcggcggggctgctggggattggggcggatctggttcagggaaatatagcggacacggctggaaaaaaattcgcctttgcggggatgcatcatggcggttccctccttttgccctctattttagccggggagggatgaaaaatcccccgcaacgtgtcgggaaatcaactttttcacttagatgggatttttcggcagcagatcgctgtgaaggcttgtttttttctccggtgggtgactttttccggtagctttttttgtctccggcggcatactttttgtcaacagcgacaaaaagtatgcaaaaccgccgaagcaccgccggtggcggatgcagcaaggcggtttcgaggaagcgtcccggttttcacgccgtgcaaacggctggaaaccggctgacacgacggtggatctttctttcgctatggaaagaaaggcacccgccggaggcataaaaagctgctgggagcagtgcgccggaaaaatgaaaaacatccctcaccatagccaaagggcaggcatcatgtgatgcctgccctttgcagtctgtcctattctgatgcacgacggcaaatccaaagcttatccccgttcacgcttcaggcggcggatatccgtccccacaaagggcagcagctggtactccccctccagacgggacagcagcggcgctccatagcggcggcccagctcctccgggtccagattggtgctgataacagtacttctccccgtcagcaggcggccgttgaggagctgatagagggcgctctgaacgaagctggtggtcatctccgttcccagatcgtccagaatcagcaggtcgcagttcatgcaccgctccacgtcctccccggcggtatcgccgtcgtcgtcccggcggaacttggcgctttcaaactggctgaacacatgacccgccgtatcgtataccacagagaagccatcctcgctgaccacccgtgcgatgcaggccgagaggaaggtcttgcccagccccggcgcgccgaacagcagcagattctcccgccccggacggaagcgggcagcaaagtcccggcacaggttcaggttccgctgggcgttctcccgtggggagcggggcaggctgccacgatccggggaataccagtccagctcgaaggtatcgaagctctggctgccgatgtccagcatccggctcagctcccggatctgctcctgtgcatagtattttttcaggcagctgcacaggccgtcgccccggtagccggtatccccgcacagggtacagcggggcttttccgacagataatcctccggatagcccagctgggccagcagctccgcccgacgcttttgcagggagagattcttatcccggatcacccggatggcgggcagagggtccgtaccccgccgcagggcggaggcgatgatctcgcccatggtaccccggatctcccgctggatgctctccagctccggacactgctgatagacctgctgctgccgctggcgctgctgctcctgacggcgctgcttgtcctcgtcaaagcgcagggtggcctgacgcagcactcttccgtcgtatgccatggagttttcctccttaccacttcatgtatttctccatacgggagtcgtccttcttctcctcccgccgggagggcttgcggctgtcgctctggcggacctcctcctccgtgtgccagccgttttcgtgccagcggcgcaggatcccgttgagatatcgccagttcagctccttcttataaaacaccgtcttgtcgtaggccagtgccaccgtctccggggggaagcccttgtccatccagtcggcgatgtagcgctcctcgctctccaccgggcggcggtcgcccagccccagcacctgcatataccggctcatggcggagcggcggacgttccagtcccgcagatactgggaagcgctctcctgatcgaagaggccccgctgcgcccagtgatagccctccttctcgatctggcggagggtgggccgccgtccggggccgtagcgctcctcggaacgggtgacacagtggcacaccagcagatagatcacatccgccggaaggcccagatcgtcatacagtcccgccaggatttgcaggtccgccgttttcaggcgcttgcccagcttctcctccgtctgcggcaccagcatccgaaagccggcatcgccggtgaggaggtccgtcaggtcatccgccgtgtacaccgggcgctcctgtgccggctccgggggcttctgctccgggggccggtcgatgagtcccagctcctgcagagccgtctccgccgcatgaaggcgcagttggctccacttcagtcgacgctgcagctcctgcgccgtgacaccacggtccgcccgcagcaggcacagatacagcagcgccgcatccccgtcgccccggccgatgaggcggtccgcctgctgggccgggagcacgatattcggttgatcctcccggaggatatatcccgccacggcgctgcgccccctctctttttgtccctctattctacacgaaaaccccgtctgcgtaaagcgtcccgccgggattttttgaaaaatccccgtttggggaagaaaagtcttttcccggtgggattttgtgctataatagattctgtatagctatccagaaatactcagtttacatagaaagcaggaggtcactatggcgaatcgtatcacaatgagcatctgcggcgaggattacaccctggtcgctgatgagagcgccgcctacatggagaaggtaggtgctctggtggatgagaagatgacgcagctgcaggagggcgcccatgtgagccgcattgacgccgccgtgctgacggcggtgaatctggcggacgagctgctgaaggctcaggaggcggcggagaatctgcgtcgtcagctgaaaacatatctggacgaggcgtctcaggccaaggcggaggcctcggagctgaagcggcagctgttcaaggcgcagcagggtcacaagtaatggcggagctgctctctcccgccggagggtgggattctctggtggccgccgtgcagaacggtgccgacgccgtgtatatgggcttcggggcctacaacgcccggcgcagcgccaagaacttcacggaggaggagttttcacaggcggtgcggtactgccatctccggggggtgaaggtctatctgaccctgaacaccctgctcaccgaccgtgagcttccgggggcggcggagctgctgcacaaggcctcccggctgggggcagatgcggtgctgatccaggattggggggtgtggcagctggcccgtcaggcggcgccggagctgcccttccacgccagcacccagatgagcctgcatacgctggggggcgcacgccgggcggcagagctgggccttacccgtgtggtgctggcccgtgagctgtcccgccgggacattgccgccatctgccgggactgtccggcggaggtggaggtctttgcccacggcgctctttgtatgtgctactccggtcagtgcgccctcagcgccgttatcggaggacgcagcggcaaccggggtacctgcgctcagccctgccgcctgccctatggggtcaatgccccggcggcgggaggccatcctctgagcctgaaggacgccaacctctccccctacctacaggagctggaggacatgggggtggcgtgcctgaagctggaggggcgcatgaagcggccggagtacgtggcggtcatcacctccatttaccggcggctgctggacgaaaagcgccgccccactcgtgaggagcagcggcagctggagctggccttcagccgcagcggcttcaccgacggatactatctgggccggaaggggccgcagatgttcggcacccggccggagaacctcccggagcccaaggaactgtttgcccaagcccggacactgtacgaaaaagaggatcgccggacggtggcggtggacatggactgcgtctgccgggccggtgagccggtgcgcctgacggtgcgggccggggatcagcgggcggaggtgacaggccctgtgccggagaccgcccgaaaccgggcgctgacggcggaggagctgcaggcccgtctgaaaaagaccggcggcaccgccttccgctgccgggaggtacgcatagcactggaggaggggctgatgctctccgccggggcggtcaacgccctgcggcgggagggactggcggcgctggaggataccctgtgtgccgtgccggaacgccggatcgcccagccggagccgctgccggatgccccggtggagccggcgcagccgctgctgacctgctctctccagaagccggcgcagctgacgcaggcgctggtggactgccgcccggagatgatctatctgccggtggagtggctggatacgctggatgtgaccccgtatctggaccggacgtccttctgcgccgtgctgccccgtattttccggacggaggacgaggccgtgctgcgggagatgctggtgcggcaccggcaggtgctggccgccgtggccgttggcaatctgggccatctgcccattgccgaggggctggaactgccgctgcggggcgatctggggatgaacgtattcaactcccgtgcgctgctgtttttgcgggagctggggctctccaccgccgccgtatccttcgagctgcggcaccaacagatccgggatctgaaaaagtatctgccctgcgaggcggtggtctatggccgcctgccgctgatgctgatggagaactgcgtcattgccaacagcttgggctgctgcgatgtgggcagcgattaccggaagcgctcctccgcctgccgctgcaccggggagaacgtcctcaccgaccgaaccggggcccgcttcccgctgatgcccgcatggggccaccgcaacgaactggagaacagccgcaccctctttctggcggacaagccggagtggcggcggctggggctcacctatgcccggctgcgcttcaccacggaatccccggcggagtgcgtggcggcgctgcagcggtatcaggggcagggggactatatcccggccgatctgacacggggtctgttctaccggggagtagagtgaatacattccgttatttttaaccgtaaaattcctataagttatcaatacattgtcccaaaacaggaggttccggtggaaaatgcgttgaccggcgtggccgggaagaaatttatcctgtcgtacagctgcggcaaggacagcaccctgtgcctgcacaagatgctggaggcgggagcagagcctatggcgctgctggtgatgtttaaccccgaagcggggcgctcctactttcatggggtggacccggcgctgctgaaggagtacggcgaggcgctggagctgccgctgctggcggtgcctaccggcggcgaggagtaccatctgtccatggaggcggcgctgcgccgggccaaggagcagggggtggagctggtgtgcttcggggatattgacattgagaacaaccgggcctggggcgaggagcgctgccgaaacgtggggctggaggcggtataccccctatggcaccacgaccggcaggagaacgtccgggaggtgctggatctggggtatcggtgtctcatcaagacgctggaccgccgggtactgccccggcagctgctgggccgggtcatggaccgggccatggtggaggagatgaccgcctgcggcgtggatatctgcggcgagaacggagaattccacaccatcgccgtggacgggccggtgttccaccggcctatcccctactgcgtccggcagctgctggatctgggggattactccgtggcggatatcacggtgccggaaaaggaataacgggaaagtttatggacgaaaatcgattttaacaattcgtttttatattttaggagtaaatttgctatgatagagttgaaggtcaaggcggtatcgccgctgatggggacgaaattccccctgcccgcctacgccaccgccggtgcggcggccatggatctgtgcgcctgtatggaggagccggtgacgctggctcccggcgggcggcagggcatccccacaggcatcgccatcgccctgccggggccggagtatgtggcgctggtgtgcagccgcagcggcatgggcacccgccacggcatcaccctctccaacagcgtgggggtcattgacagcgactaccggggccagctgacggtggggctggtgaaccacggggacgtcccctacaccatccagcccggcgaccgtatcgcccagctgatggtgctgcccattctgcggcccaccctgacggtggtagaggagctggacgagacggagcggggcgccggcggcttcggctccaccgggaggtaagcgctatggcgaggatcatactggcttccggctccccccggcggcaggagctgctacggcgcataggactccgtgaatttgaaatttccgtgccggacgtggaggagtggtatcccccggagctggcgccggaggatatcgtggcctacatcagccgggagaagtctcaggcggtacaggcggcggcggatgccattgtcatcaccgccgacaccatggtctttctggatgatcagcggctggggaagccccatgacgaggcggaggccctctccatgctgacggcgctgtccggacgaaagcacaaggtctgcaccggcgtgacggtgcggcagggggaaaaggccctcacccgcgcccagtccaccgacgtctatttccgggaggtctcccggcaggagctgctggcctacatccggggcggcgagcccatggataaggccggggcctacggcgtacaggggcagggagcgctgctggtggagcgcatcgacggggactttttcaacgtcatgggtctgccggtggtgctgctgagccgaatgctggcggagttcggtgtgacgctgctggcgtaatgggcagcggcttactttgcaataaggaatcagaactatgaagaattttttccagaaaaacggcatcatgatgctggcggcggtgacggtggtggcggtgctgctgtgtgtggcctccgctctcagctcccagaccggctttctccagaacgccgggggcgtcattgcctcccccttccgggcggtaggctccgctgtcagcgggtggttcagctccataagccagcgcttcgaggacgtagaggcgctgcagcaggagaatgcggagctgaaaaaggagaacgccgagctgcagcgtcagctggatcaggccaagatcgacagcgaggagaaccagcggctgcggaacctgctgaatctgcggcagcagcggcgggatttcacctttgaatctgccgttatcgtggaccgcagcacctccaactggtcccgtgtgatgacactcaacaagggtacctccagcggcattgccgtgggcaactgcgtggtggacgatcagggcaatctggtgggggtcatccgggaggccggactcaactggtccaccatcaccaccattctggacacggactcctccctgggcgcacgggtattccgcaccggcgaggtgacggtggccatgggcgatctggccctgatggagacggggcggctgaagctgtcgtatctggagggggaatccagtctcatcaacggcgacctcatcgtcacctccgggctggggggctactacccctcccagctggtcatcggctctgtggaggagatccgcaccgatgacaacggcctgacccgctatgcggtgctggcccccaagacggatctggattccctgtcggaggtgtttgtcatcacctccttcgacaccgtggactgagggagacactatgagccgacgtgataccatctggaaatgggtgttttacaccgcaggtgtttttctgctgcttttattgcaggggctggtgctggatcacatctccctgctgcacgtgcatccctatctgcccccggtgatggtggcggtcttagctatgttcgagggagcctacggcggcatgggcgtggcgctggccatgggtctgctgtttgatctgacccagccggggctgatcccctgcttccatattctggcatttttgctggcggcgctggccgccgctgccgtggccaactacctcattacgccggggcttctgtgcgccgtgctcatggggttggcggcgctggtcatcacaaatgggctgcaaattctgctgatgacgtatcagcagggagtggccttctccgccgcctcgtcactggcggggcgggaaattctggtgacactgccgctgacggtgctggtctatcttcccttccgctgggtgcgccggcggatctactccgagtgagtcccctgaaaggagtgtgctatgaaatcctatctggccaaatcccggctggtgccgctggtattgatcttcgggatgatcctgctgatcttctgcggcgtgctgtacaatactcagatcctcaacggatcggactataaggctcgctcgctggccagcaatgctaccgctcagacggtggaggcctcccgcggcatcatcaccgaccgcaacggcaaggtgctgatctccaaccggctgacctatacgctggtgttctccgacgaggaatttgaaagcgacacggactgcaacgacgccatcttccggctgttggagctgtgccgcagcaacaacgtcaagtggacggacaccctgccggtgagcaaggagccgccctttacctacaccacccccaccgacgagggtgccttccgggaatatctggagtcggaggatctgcccgccatcacggtgggtaccctgcggcccacgcaggaggccccgctgttcatggcccagctgagaaagctctacggcgtggcggacagttactccgacaccgacgcacgggctatcatcggtgtgcgctaccaactggccctgcgggacatcgcggggggtacctacaccttcgccagcgatgtgtcggtggagctcatcaatcaggtggtggacggccgctatgccggtgtcaccaccggcacggcctcggcccgtgtgtatgacactacctacgccgcccatgtgctggggcggctgagtcccatctatcaggaggactgggtgggcgatccggacaacggcatcgtgggataccgggacaaggggtattccatggacgctctggtgggcgagagcggcgtggagaaggccttcgaggagtatctccacggcgagaacggcaccaaactcattaccaccacctccgatggccagatcaccggtgagttctacaccaaggaacccaagcccggcaacaccgtggctctgacgctggacatcgacctgcaggaggacgtggaaaaagccctcagcaagaccatcggtgacatgaccgagaaggacggcatccgccgtggcggtgccgccgtggtggtgggcgtgggcagcggtgaggtgctggcgctggcctcctaccccacctatgacatcagcaagtgggatgaaatttatgacacgctggcctccgacgacaagggagctcccctgttcaaccgggccattggcggcacctacgcccccggctccaccttcaagccctgcacggcggtggcggcgctggaatccggtgtcatcaccccctctaccaccattctggaccggggcatctacgactactactcctccccccagccccggtgctggatctacagctcctacggctccacccacgggcgggtggacgtgtcggaggccatcaccgtgtcctgcaactacttcttctatgaggtgggccgtctgacgggcattaagacgctggacgactatgccacccagttcggtctggggcagtacaccggcatcgagatcggcggccccaacagcgccgaggccaagggcgctctggcctccccggagtacgccgaggccaacgatctggagtggtccgacggtcagaccctgaccgccgccatcggccagagctataacctgtttacgccgctgcagctggccaactacatcgccacgctggtaggcaacggtgagcactatgcggcccacctgctgaaaaacgtcaagacctataacaactccgccgtggtctatgcctacgacaaggaccccgtcaacgtggtggagatgcaggacagcacggtggaggccatcaagaccggtatgcacgatctgaccaccgggagcctgtccacctacttttccaagtgcgtggtgtccgccggtgccaagaccggtacggcggagaccggcgtcaccgatgccaacaacggtaccttcgtgtgctttgccccctatgacgatccccagatcgccgtggcggtggtcatcgaaaagggcggcgccggtgcggctctggcggagacggcggtggatatcctcaacgcctacttcagtcgggaggagatcggcaccgccatcatcggcgaaaatactctgttaaactgagaggtccctgttcatgtctgtttggttcgattctcgtgatgttcgatataaggatcccttcggcgccgtgtcctgcggcgccgaggtgcgttttgctctgggggccgatgagccgctggaggcgtgctgcctgctggtacggcaggaatttgccgggctggagcaggaggttcccctctccccctccggcgatggctggagcggtgtgctgacggcaccggtggagccggagctgatctggtacgccttccgggtgcggcggcccgacggctccctcctctggctgggacgcaatggctgcggcggtgaggcggaccgtcagcgatggcagctgacggtgtatgagcccacccatacccccgactggttcggccggggggtgacgtatcagatctttcccgaccggttctgccggttggcggtgccggacggccacggcatggtggggcagcgactggtgcatcagcgttgggacgacaccccccaatggcagcccgataaagcgggcgaaattcgcaacaacgactacttcggcggaagcctgctgggaattatttccaagctggactatttgcagagtctctccgtctccacgctgtatctgtgtcccattttcgaggcggacagcaatcaccgctacaacaccgccgattaccgccgcatcgaccccatgctgggaacggaggaggacttccggcagctgtgccgggaggcccaccggcggggcatccgggtgctgctggacggcgtattcaaccacaccggcagcaacagccgctacttcaacgccgaaggcttctacccggagctgggggcggcccagagtcaagattccccctatttcgactggtacagcttccatccgtggcctacggactacgatgcgtggtggggcgtaaggactctgccggcggtgaacgaggaggcgccctcctatcgggacttcatcgtgcggagtcaggactccgtggtgcggcactggctgcggcaaggggccgacggctggcgactggatgtggcggacgagctgcccgatgacttcatcgctgaaattcgacaggccatggagtccgagaagccagacagcttcctgctgggcgaggtgtgggaggacggcagcaacaagatcgcctactcccatcggcggaggtatctgctgggccgggagacccacgggcttatgaactaccccttccgtacggcggcgctggcttggctgcggggcggtgatgcgtcagacttccgcctggacatggaggagatccgggagaactatccgcctgcggcctttcacagcggtctgaacatcttgggtacccatgacacgccccggctgctgaccatgctgggagcggcccggacaccggagactaaggacgaccgggcggcgtaccgcctcagcccggaggagctggacatgggactggcccggctgcggctgggcgctttgctgctgtacagcttccccggctcccccacggtgttttacggcgacgaggccgggatgcagggcttcgaggatcccctgaaccgtggcacctacccatgggggcaggaggatccggcgctgctggcgtacttccgtcagctgggtactctgcggaagcagcgggtatccctgcagtgcggagatatctgctatctctacgccgtgggcggtgggctggtgctgcggcggcagtccgaggacgaggtgacggtggcggccatgaacgccgggatgcagccgctggagctgtccattccttggtcgggagcgctggccaaggacgccctgacagggcagcagttctttgctcggaacgggatgctgcggctgacccttccccccgtgggcggggtgctgctggtgtaattgtttcacgtgaaacaattaccggagacaagtgcattagaaaaaagagatgtttcacgtgaaacatctctttttttgcaaagtacgctccttccctattgaaaaaaattgtgacagttgatataatattctcatattagagaactctaagagtgacgggggttgcgtatggcgaaaatcgttgcgatcgtaaatcagaagggcggcgtgggcaagaccacctcctgcgtgaatctggcggctgccctgaaggccgccggtcagcgcatcctgctgtgcgactttgacccgcaggccaacgccacctccggtatgggcgtggacaagaccgtatccaacggcatctatgacgtgctcatcaacagcgtggagacggaaaaggccatcgtccgcacctcctatggtgacgtgctgcccagcagcaaggcactggccggagccagtgtggagatgatcgacctgccggagcggcagtttcggctgcggatggcgctggagcaggtgcgggacaactacgactatgtgttcatcgactgccccccgtcgctggaactactgaccttgaacgccctgtgtgcggcggactccctgctggtacctttgcagggggaatactatgcgctggaggggctttccgacctgatgaacaccgtgcggctggtgcggcggagcctgaaccccaagctggagatcgagggtgtgctgctgactatgtttgacgggcgcaccaatctggccattcaggtggcccaagaggtgaagcgcttcttccccggcaaggtctacgccacggtgattccccggaatgtgcggctttcggaggcgcccagccacggaaagcccatcacctcctatgaccgcagctgccgtggggctgaggcctatgtgcagctggcgcaggagtttttgaagagaaacaacggatgaaaggagcgatcccatggcgaatccatccaagggcttaggtcggggactggccgccctgctgggggacgacgtgatgacccccgaagaggagaaaaccagtctgtacctgcccatttcccaagtagagagctgcgcttcccagccacggaagcaatttgacccggacgctctggccgatctggcggactccatccgggaacatggcatcattcagcccctgacggtgcgaaagctgcagtcagggtactatcaaatcatcgccggtgaacggcgctggcgggccgcccggatggcgggtctgtcggaggtgccggctatcgtcatcgaggccgacgaccgcaaggccatggagctggccatgatcgagaacctccagcgggaggatctgaaccccatggaggaggccgagggctatcagacgctgatgcagcagtacaacatgacccaggaggagacggcccagcgggtgggcaagtcccggtccaccgtagccaacgccatgcgcctgctgaagctgtgtccccccgtgcgggccatggtggaggacgggcggctctccagcggacacgccagagctattctccccctctcccctgccatgcaggagtcggcggccaacgccatcatcaaggacgagctgtcggtgcggcagacagagcagctggtgaagaagctgacggctccccccaagccggagcagccggaaccggatgggctctccgtcgattatgccaaggaggccgccaaggaactgggtagccgtctgggccggggctgccgcatcgttaccggccggaaaaagggccgcatcgaactggaatactacggggtggaggatctgaatcagctgctggacgccctccacgccctgaaagccaaataaatgtttcacgtgaaacacagaaagaggtcagactatgcttgatatcaaatttatccgggagaacccagatgccgtaaaggagaacatccgcaagaagttccagaatgccaagctgccgctggtggacgaggtcattgcgttggatgccgagaagcgagccgccgagaacgagggcaatgatctgcgggcccagcgcaacaagctctccaagcaggtggggatgctgatgggacaggccaagaaggatccctccaagctggaggaggccgaggcggtgaaggcgcaagtgaaggccgacgccgaccgtctggctcagctggaggagatggaggagaagctgagccagcagatccaccacatcctgctggtgatccctcagatgatcgacccctccgtgccaatcggcaaggacgacagctgcaacgtggaggtggagcgcttcggcgaggccacggtgccagccttcgatatcccctaccacacggacatcatggagcgattcgacggcatcgatctggacgctgccggccgggtgtccggcaacggcttttactatctcatgggcgacatcgcccggctccacgaggccgtgctggcctatggccgggactttatgatcaacaagggcttcacctactgcatcccccccttcatgatccacggcagcgtggtggagggcgtcatgagccagacggacatggacgccatgatgtataagatcgagggcgaggacctgtacctcatcggtaccagtgagcactccatgatcggcaagttcatcgaccagatcgtcccggtggagagcctgccccagaccctgacctcctactccccctgcttccgcaaggagaagggtgcccacggcatcgaggagcggggcatctaccgcatccaccagttcgagaagcaggagatgatcgtggtctgcaagccggaggactccaaggcgtggtacgagaagctgtggcgttacagcgtggagctgttccgctctctggatatccccgtgcggcagctggagtgctgctccggcgatctggcggatctgaagtgcaagtcctgcgacatcgaggcctggtctccccggcagcagaagtacttcgaggtgtgctcctgctccaatctgggggatgcacaggcccgccgcctgaagatccgctacaaggacgagagcggccggatgcagctgtgccacaccctgaacaacacctgcgtggcccctccccggatgctcatcgccttcctggagaacaacctccagcccgacggcaccgtgctgatccccaaggtgctccagccctacatgggcggctgcgagaagctggttcccaaacgctgattatgtaaactctcggaggatacccatgaagaaatttctgagcgagttcaaggagttcgccctgcggggcaacgtgctggacatggccatcggcgtggtcatcggcggcgccttcggtaagatcaccacctccctggtcaacgacgtcatcatgcctctggtggggatgctcatcggcggcatcgatctgggccagctggatatcgtactgaagcccgctgttatgaatggcgacgaggtggtcacggctgccgtgacgctgggcatcggcaccttcctcaccaccatcatcgacttcattctggtggcgctggtgatctttctcatgatcaaggccatcaaccgcttccacaagaagaaggaagaggcccccgccccggaggagcccaaggggcccaccagcgaggagctgctgacggagatccgtgacctgctgaaggagaagaaccagtgaccccggagcagctgctgcgggaggggctggcggtctacgggctgccggcggatgcagcggccatcgagggactggaggagttctcccggcggctgctggaacggaatcaggtgatgaacctgacggccatcaccgatccctgcgacgtggcggcgctgcacctgctggattgtgcgtacctactgactgctgcggacttccggggaaagtccgtggtggatgtgggtaccggcgccggatttccggggatgcccctgcggatcctggagccgaacttcgacctgacgctgctggacagtctgggcaagcgggtggatttcctccgggagaccgccgacgccatgggactgcggcgggtgcgctgcgtccacgcacgggcggaggagttcgtccggaagcaccgggagcagttcgacatcgccacgtcacgggcggtggcccagctgaatgtactgtgcgagctgacactgccgctggtgaaggtgggcggcgtgtttctggccatgaaatccgtggagagcgacccggagctgcaagaggcccgcagcgccatcgcccagctgggcggcgctgtggaggacgtgacggactacaccattccggggacggaggtgacccaccgggtcgtccgcatccggaaggagcgtcccacgccagcgggcttcccccgtgccttcgcccgcatcaagaaagcacccctgcgataaagccgggacacaaatgtccaaaaggcttggatttgagaaaatttttctgaaaattttcattttttccttttcaaatgacgcaaggaggtataaaattgggtaaaatcatagcagtcgtctccggcaagggcggcacaggcaagacctcctttacagccaatgtggggctggcgctggcggcgctggggtgccataccctgtgtctggactgtgacatcaccctgcggaatctggatctggcgctggggctcagcgaccgggctctgatggacttcaccgacgtcatcgccgggcgatgtacgctggaggatgccgtggtgcagcaccccaagtatcccaagctgcacctgctgacagcccccctgtcggcccggcccatgcccattgcaccggagcagatgaaagcgctgctggaccgcatccggcagacctacgactactgcctcatcgacgccccggcggggctggggatgggtttccatctggccagcgactacgccgaccgggcggtggtggtcaccaacaccgacgcctcctccctgcgggacgcccagcgcaccgtcatggagctggaccatctgggacggggcaaccttcatctggtggtgggccgggtggagaagaagctgctgcgaagccttcacaccaccatcgacgacgccatggacgcagcgggtctgccgctgctgggcgtggtaccggaggaccggaacgtcccctatgccctgaacaccggcatccccttgcgggagtgcagcaactacgccgcaagggcttacgagaatattgcacggcgcatcatggggcagcgtatccccctgatgcgtatctgaatccatagaagagaggagcgaataacatgaatatcgccttgatcgcccatgataacaaaaaggagctgatggctcagttctgcaccgcctactgcgggattctggcccagcataccctgtgcgccaccgccaccaccggccagatcatctccgacgccacggggctgaccatccaccggttcctgtccttctcccacggcggcggccagcaaatcgctgcccgcatcgcctacaacgagatcgatctggtgctgtgcttcgacgatccccgcaacaaggcccccaacgaggacatcgccaacatctatcgcctgtgcgaccagaacaacatcccctatgccagcaatctggcctcggcggagatgctggtgctgggtctggcccgtggtgacctcgactggcgcaacatcgtcaatcccaaaaccaagccctttaccgcttgacatttccctgcatatcccctacaatagattgcgttcaaaccgctatgacggagcatgagtagcctgtccctgccggtgaagagaggtgcgccacggctgcaagcgcactgcggcacacagcgtgaaggacggcttcaccagcggagatggagacatctgcggccgactccccgcaacaggagcctgaaagggccttacggccgaaattgggtggcaccacgaagcaatgcgctctcgtcccaatcacgggacgggagcgttttttcgcaattcccctcccctgccgtcggtgcggcatgtttttcacaaattcccacatttttccacaaaggagcatgactatggcaaagatcaccccccggacgctgtccggctttatggagctgctgcccgccccgcagcagcagctggagcggatgatggacatcctccgcaagacctacgctctctacggcttcacgccgctggatacccccgtcatcgaggccagcgaggtgctgctggccaagggcggcggcgagacggagaagcaaatttaccgcttccagaagggcgacgccgatctggcgctgcgtttcgacctgacggtgccgctggccaagtatgtggccctccacggcggcgacctgtccttccccttccgccggtatcagatcggtaaggtgtaccggggggagcgggcccagcggggccggttccgggagttctatcaggcggacatcgacatcatcggagacggcaagctggatatcgccaacgaggcggagatcccctccatcatctaccagaccttcacccggctggggctgaagcgattccagatccgggtcaacaaccggaagatcctcaacggcttttatgccatgctggggctgacggagcagtccggcgacatcatgcgcaccgtggacaagctggataagatcggccccgacaaggtccgggggcttctcgccggggagctgggtctcaccgaggaggccgccggggatatcctgcgtttcatcgccatcaccggctccaatcaggaggtgctgacggcgctggagggctatcggggccgcaatgaggtgttcgacgccggccttaccgagctggagacggtggtgaagtatctggcggccttcggcgtaccggaggagaacttcgccgtggacctgaccatcgcccgtgggctggattactacaccggcacggtgtacgagaccaccctgctggatcatccggagatcggctccgtctgctccggcggccggtacgacaatctggcggagtactacaccgaccggcagctgcccggcgtgggcatctccatcggcctgacgagactgttctacgtgctgggcgagcaagggatgctgaacccccagctgcccacggccccggcagatgtgctgatcctgcccatgacggcggagctgacccccgccatccagctggccacccggctgcgggcagccggagtgcggacccagctctacaccgagcagaagaagttcaaggccaagatgaactatgccgacaagatcggcgtcccctatgtggtgtttctgggagacgacgaggtcagcggcggggtggtggcctgcaaggatatggtttccggcgagcagaccacactgcccttcgacgagaccctccagcgcatccgggagggactggccctccgggagcagggcagcgtcatcgtggaataagggtgaaatccgataacaaatagcaatattcaatagaaatattacgatacattatcagaaacaggagtgaaagctatgatgcagatgcgtacccatacctgcggggagctgcggctggccgatgccgggaagtccgtgaagatcgtaggttggatggaaaatgtccgggaggtgggcagtaacttcgcctttgtggtgctgcgggatttctacggcaccacgcaggtggtcatcgagtccgaggagatgatggccatcatccgggacctgaacaaggagtccaccatcagcgtggagggcgttgtccgggagcgggccagcaaaaaccccaagctgcccaccggcgacattgaggtggtccccagcaaaatcgaggtgctgggccgctgccgctacaacagccttccctttgagatcaaccgcagccgggaggccgacgagacccagcgcctgaagtaccggtatctggacctgcggaaccccgctgtgaaaaataacatcgtcctgcgctgccaggtggtggccgctctgcgggccgccatgacggagcacggcttcctggagatcaccactcccatcctgacggcctcctccccggagggcgcacgggactatctggtgcctgcccggaagcatcccggcaagttttatgccctgcctcaggccccccagcagttcaagcagctgctgatgacctccggcttcgaccgctacttccagatcgccccctgcttccgggacgaggacgcccgtggcgaccgctctcccggcgagttctaccagctggatatggagatggccttcgccacgcaggaggacgtattcgccgtgctggaggacgtgctgccccctatcttcgccaagttcggcacctatgacatcgcctctgccgcccccttccgccgcatcccctacaacacggcgctggagacctacggctccgacaagccggatctgcgcatcgacctgacctgcaagaacgtcacccacctctttgaaaacagcgagtttgagcctctgcggggccagaccgtgaagatggtagatatctccgactgcgccctgacccgcaagcaggtagaaaagctcctgtccgactgcgaggtgcagtccggcagcaaggcctattggttcaaggtggatgagaagggcgagctggccggcggtatcgccaagttcgtcactggcctgcggccccagctggagcaggttctgacgttggcacccaatacgctggtggtggtggccgccggtgcatcggccaccaaatccgccggtgtgctcatcaagaccttcggcgccgcctgcgccggtcacatggatcaggagcgctacgagttctgctggatcgtggacttccccatgtacgagatcggtgatgagagcggtgagctggagttctgccacaaccccttctccatgcccagcggcgggctggaggtgctgctgaaggccgagcggggtgagatcgatcccctgaccatcaccgccgaccagtacgatctggtgtgcaacggcgtggagctcagcagcggcgccgtccggaaccacgatccggagatcatggtgaaggccttcgagctggtgcggctgggcgaggaggacgtgaagaagaagttccccgccatgtacaacgccttctgctatggcgcacctccccatgccggtatcgctccgggcgtggatcgcatggtgatgctgctggcgggcgaaagctccatccgggagatcatccccttccccatgaacaagaacgctcaggacgtcatgatgggcgctccctccaccgtggagcaaaagcagctggatgagctgcatattgctattacagcgcaggaggaggaataaaccccgatcgtctcccttcctctgctgcttttgctccacaccaagcgttttgcggagcaaaaccttgccgtaggcggaattcacttccgccgaggaaatttgatccgtgcgaggggcccccgtaaaatgctccgtcattttgcggggacggacaaaagcagctggatgagctgcatattgctattacagcgctggaggaggaataagttcatcaaagaggatggctgccagcggcagccatcctctttgatgggacgtacttccgtcaaacaggcttttccttgggcgggtagctttcttctgtgtctccgtcggcatccttcttgccaacagcagcaaaaaggatgccgacggaggcacccccaacacaccaagcaccggggaaattcccccttgacggacgggggaaaacatgatacccttgaagcgttacaggcgatgatgggtgtggcggcccggagctgcgggaggaaatgcccgccggaagccccgttagcggcacgagagtgtggagcgatccaaattcaggtggaaccacggactttttagttcgccctgagctgcgtcggcagttcagggcgttttttattttaactgagctgaaaaatcatcatacaaaggagaatcgtcatgaaaaacacggaaaaaaccatggacaagatcgtggccctgtgcaaaaatcggggcttcgtctttgccggctccgaaatttacgggggcctggccaacacctgggactacggccctctgggcgtggagctgaagaacaacatcaaaaaggcgtggtggaagaagttcgttcaggagaatccctacaacgtggggcaggacgccgccatcctcatgaacccccagacctgggtggccagcggccatctgtccggcttctccgatcctctgatggactgccgggagtgcaaggagaggttccgggcggacaagctcattgaggattggtgcggcgagaacagcgtggagctgcccaagcccatcgatgccttcacccagcaggagatgaaggacttcatcgaggagcacaacatcccctgcccctcctgcggcaagcacaatttcaccgacatccggcagttcaacctgatgttcaagaccttccaaggcgtcaccgaggacgccaagaacacggtgtatctgcggcctgagacggcgcagggcatcttcaccaacttcgtcaacacccagcgcaccacccggcgcaagctgcccttcggcgtgtgccagatcggcaagtccttccgcaacgagatcacccccggcaacttcatcttccgtgtccgggagtttgagcagatggagctggagttcttctgcaagcccggcactgatctggagtggttccagtactggcgcaccttctgccacaactggctgctgggcatcggcctgaaggacgagaatctgcggctgcgggatcatgacccggaggaactgtgcttctactccaaggccaccacggacttcgagttcctgttccccttcggctggggcgagctgtggggcgtggcggaccgcaccgactatgacctgacccagcaccagaacgtctccggcaaggatctgacctacttcgacccggagaccaaccagcgctacatcccctatgtggtggagccttctctgggcgtggagcgcagtgtgctggcggtactgtgcgacgcctacgacgaggaggtcgtgggacaggataaaaacggcaaggacgacgtgcgtgtggtgctgcggctgcacccggcactggccccctataaggcagccatcctgcctctgagtaagaagctcagcgagccggccatggagatctacagcgatctgtgcaaggatttcatgctggacttcgacgagaccggctccatcggcaagcgctatcgccgggaggatgagatcggcacgcccttctgcatcaccgtggacttcgacaccgtgggcgacggggagaatcccggcgaccagtgcgtcaccgtccgggagcgggacagcatggagcaggtgcgtgttcccatcagccagctgaaggcctatctgacggagaagctggcctattaagcgctcaagcatcagccgtcccgaaccttcggggcggctgatgccgcaccctgatcgatcttgcggacgtgccggtggattttttaccaccggtaaggtgcgttctttcaatggcagttttttgttttcccgccggaggcatactttttgtcaacagcagcgctttgcataaggaacgtgtctccgacggcccacttttcccagcagctggaaaagtgggcaaaagagccgtttgaaaccgaaggtttcaaaacttcctttccggtatgtaagagatacatcctgactcccgccgacacagggaattggcgtatttctactatcgctgccgctacatgggcagtcgaagaaaccttcagctctaccgtggggaaaggattgcccagcggcagacgcatcatccccttcaccggagcgggagcggcagcgggtctgttgcagagtcaattccctttacggcccataacaagcaaggctcttgcccaccaaaaggaaatccaaaaaccatcgggttttggcggaaaccgccgaagcgccacctgtggcggatgaagcgaggtggtttcgaggaagtgtcccgtttttcacgccacaacgtggctggaaatcggctgacacgacggtgaaaactttctgctgctattggcagaaagtcacccgtcggaaacatgagaggattgtccccattaggaaaaatatgccgccggagacaaaagagaaagctacccgccgggggtataaaagagaaaaccacacatcacacattttcaaggaggtatcatcccatgaaggttctaatgctcaacggcagctgcaaccccaagggctgcacctataccgccctgacggaggtgggcaaggccctaagcagtcagggcatcgactacgagatcgtgcagctggacggcggccccgtccgggactgcatcggctgcaaccagtgcagcaagaacggctgcgtattcaccgatgacggcgtcaacgacttcatcgccaaggcccggcaggccgacggctttgtattcggcacaccggtctattacgcccaccccagcgggcgggtgctgtccttcctggatcgggtattctacgccggaggcagcgcctttgccggaaagcccggcgctgcggtggcctccgcccggcgggcaggcaccaccgccagtctggacgctctgggcaagtacttcggtatctccgacatggtgacggtgggttccacctactggaacatggtccacggccactgtcccgaggatgtgatgcaggacggcgagggactccagaccatgcggaatctgggccgcagcatggcgtggctgctgcactgcattcaggcaggccgggaggccgggtacgacttccctgctccggagcgcggccaccggacgaacttcatccgctgaaggatgcggcaaaaaggagcggcaggcgcatagcgcctgccgctcctttttatggaagaattttactgctccgcctccagctcctccagtgagggagcgccgtccagcggcaccttggcaatgacggtacggtacacccgcaggaagaacagcatcgtcacgcccagcgaggcgatctccgcaatgggatagcaccaccacaccagatcgtcgtttccgatggactggccgtagcgggccagcacataggcgatgggtaccagaaacaccagctggcggatgatggaggtgatcatggagtacaccgacttccccagcgcctggaaggagctgcccagagcaatgcaggccccggccgtgcagaagctcagggagatgatccgcagggccggaacggccacctgcttcatagtctccgtggcattgaagatgctgaccagcgtccccggaatggcccagaagatggccatacccagcaccatgatgcaggaggcatagatggcgctgcgcttgatggtctccatcatgcggcggcgattctgagcgccgtagttataggccacgatgggaaccacaccgttgttcaggccgaacaccggcataaagacaaagctgttgagcttgaagtagatgccgaaggcggtagccgccgtctccttggcggagtggtaagtgatgaggatcttgttcatgcagaaggtcatcaccgagccgatggccaccatcaccacggagggcaggccgatggcatagatattgcccacgatcttccagtccggccggaagccccggaaccgaaggtgcagatcgtggttcttccgcaggttcatatacagagccagaccgcagccgcagaactggccgataacggtggccacagcggcgcccgccacgcccattttgaacacgaagatgaagatggggtccagcacgatgttgacaatggcgcccagcccttgggtatacatggagaggatggagcggccggtgccctgcaataggcgctcgaacatgatctggcagaacattcccagcgaggcacagcagcaaatgcgcagataggtgatgccgttatccacaatgtagtcgatgtccgtctgggtgcgaaagaaggtccccccaaagcacagggccagcacggcggagagtacaaagcccaccaccgccaggaaaatgccgttgatggccacctgatcggcccgcttgccgtccccggcgcccagcgcacggcccagcagggcattgacgcccacggcggtgccggtggccagaccgatcatcaggttctgggccgggaaggccagcgtcacggcggtaagggcctgctcgctgacctgcgagacgaacacgctgtccacgatattatatagggcctgcaccagcatcgacacgatgatggggagggacatattccaaatgagcttggagatgggcatgatacccagcttgttatccttcatagaattcctccttgggttcgttttttctgatctgttctatattctaccacgtcgtttgccaaaagaaaatgcgggaaaagccggaaatccgatccttttccgccggttttctatggaatacggaaaatccctccgcagcccccagcgggcggcagttgcattttgtggaaaatgggagtacaataagccatcaacggggacacctcccccatccatcaaccattcacaggagggatcacatgagcggattcaacgtacagctccagcttgccggggtgctggagtggatgagccagcagatggccggctgcggcggcaagaccgccgtcatcggcatctccggcggcaaggacagctccaccgtggcggccatggcggtggcggcctatggccgggaccacgtctatggcgtgctgatgcccgacggcattcagccggatatcgactactctcaagcgctggtggagcatctgcagatcccccactgcacctgcaacatccacgatgccgtggcgggggtactgtcccagctggagcaggcgggcctgacccccagccgccagacggtggtgaatctcccctcccgcatccgcatggccaccctctatgccgtggcccagtcggtggaaggaggcatcgtcctcaacacctccaacctgtcggaggactgggtgggctactgcaccatctatggcgacagcgccggtgccttctcccctctggggatgtacaccacggaggaggtcatcgctctgggccgggcgctgggcctgccggagcggttcctcatcaagcccccctccgacggtctgacgggcctcaccgacgaggacaatctgggcttttcctatcacgccgtcaacgagtatatccgccggggtgtctgcccggatgaggccgtccgggagaagatcgatcggatgcacagggccagtcgcttcaagttccagaccctgccggtgtaccacaacggcctgcccatggtcatcgaggacggcacggactactacaaataagccgcaaaacggcacttgaccaacaacagagcgtaatttttctttgaaaaattacgctctgttttgtcttttcccctgttggccgcactttccgacggccgggcaaaaaaaaggacacccggcaggtgtcctttggtttggatcagccaatctggttgagtttcagcgtcagcgcactcttcttgtgagcagcgttgttcttgtgcagcagacccttggcagcagccttgtcaatggacttcactgcgaccttgtaagcgccctcggcctcggtgcgattgccttccacggcagcagcctcgaacttcttgatagcggtcttcagtgcagagcgattggccttgttgcgggcattacgagcctcggacaccagcacacgcttcttagcagacttgatattcggcaaaccaaacacctccccgacgataaagtagctgcgttggaatgaaacatccacgcaggatgatattttaacatctttatctgaaaattgcaagcactttttgaatttttgccattcttttttgcatattccctattttttgcgggaaactacccgtaatctaccacattttgtggcacaataggagggggaaacacaagtatgacgcagatccggacggacttggcgctggaggcagcggaaaatttacaggcaggcggccccgaagcgggagggctctccggggtagtcacccggacggagcggcggcagggcgtctccgtgacggaggtgcggatcctggacgagacgggagccagagcgctgggaaagcccgtgggacgctatgtcaccatggagctggaggagcagcccttttcgcagcaggcggcgtgtcttgcctccctgctggcggagctcctgccccgtgggccggtgctgacggcgggcatcggcaaccgggacatgacctgcgacgccatcggccccacggcggtggatcatctgctggtgacccggcatctggtccgcagcgggcaggagccgttccggggaatgggggaactctccgccctgtgtacggaggtgctgggccggacggggatggagacctgtgagctgatccgggcggcagcgggagcggtgcgcccggcagccgtcatcgccgtggatgcgctggcggcccgcagtccccggcggctgtgccgtaccgtccagctgtcggatacggggctgatccccggctccggggtgggcagccaccgcaccgccgtggatcgggagacggtgggggtaccggtcatcgccgtgggagtgcctacggtcatcgacggggcggcgctggacagcggcaccgaagcggcaccgcaggggctgtatgtgacccccagagacatcgaccggcaggtccgacaactggggcggctgctgggctacggcatctcgctggcggtgcagccgggactgacggcggaggatctggcggcactggcggaataggcggcgttgcaatggggcggcgtttgtggcataatgggaaaaaacgcaaaggagacgcctatggaaaccacaaagctctattatgaggacgcctatctccgggagttcgacgctgcggtgctgtcgtgccggaaggagcagggtcggtatctggtggtgctggaccgcaccgccttctatccggagggaggcgggcagcccgccgaccacggcgtcctgggcggcgtggcggtcacagacgtgcaggagcgggacggggtcgtctgccacacctgcgccgggccgctggcggtgggcagcaccgtccacggcgccattgactggcagcggcgttttgaccatatgcagcagcactccggggaacacatcgtcagcgggatgctatgctccgccttccactgtgacaacgtgggcttccacatgggggccgacatcgtgaccatcgactataacgccgacatccgctgggagcaggttctggaggtggagcggcaggccaaccgatacatctgggaggatcacccctgccgggtgacgttcccctccccggcggagcgggaggccctcccctaccgcagcaaaaagaccctgacgggggcggtgcggctgacggagtttccgggggccgatctgtgcgcctgctgcggcacccatgtctccggaagcggacaggtggggctggtgaaatttctctcctgccagaaattccgggagggggtgcggctggagctggtgtgcggcggccgggccatggcccacctgtgccgcagctggcagcagaaccggtccatcggacagcagctgtcggtgaagcccggcgacaccgccgaagccgtggagcggcagggtcgggagattctctccctgaagacccggtgcgccggactggaggaggagctgttccggctgctggcagagcagtaccgggacgccggagaggtgctgctggtgcggcgcgatctggcaggagacggcgcccggcggctgtgcgacgccgtgagccgtacctgcggcgggcggtgcgccgtgttctccggagagggggagcggtatcagtacgccgtcatccatccgggagcagacctgcgggagttcgtgaagcatatgaacgacgtcctccacggccggggcggcggacgcagcgacttcgctcagggaagcgtcgccgccgacgaggcagccatccgggccttcttccgtggcgtgtgacgtcctgtctgtccgatccgtccaaaattgtgccgagcctgtccgcatggacaggctcgcctgccccttgaaagggaaaatccatccccacgatcaggcgaaaaaatgattccgacagggagacgaaaattcttctcggcaagcagagccaaacattttttcatcaggcagccgaaaaaatcacttggtcaggcaggccaaaatatccccctgaaaaacggacgcaaaaagttccccgacaagcagggaaaatctttccttaaacagaaaaacctctccttgaacagaaaagcctctccttgaacagaaaagcctctccttgaacagaaaaatattttcttgcaggagagacgcaaaaacgccagccccaagggctggcgtttttgctgtgtgtttgttaggagagagagaaaatcacataaggaatggttcctttgtacgagtaagataataccctgtaaagatggcagaatcatgaaatccacatgaactttctgtgaatttctcagaacctcttactctccgccacggccagctggtcgcagcggttgtttttttcgttgctggcgtggccctttacccagtggtagtgtacctgatgggtctggatcaggggcagcagctgctcccacagatccacgttcaaagcgggctttttgtcgcttttcacccagccccgcttcttccagccccagacccagcccttctccagtgcgtcaataacgtacttggagtcggagtacagctccacggtgcaaggctccttcagcagagccagcgaccggatcaccgccgtcagctccatgcggttgttggtggtctccggctcgccgccggagagctccttctcgataccgttccactccagaatggctccccagccgccgggaccggggttgccggaacaggccccgtcggtgtaaatggttacagttttcataggcgttcttgtgttgctcccagtggttttatcgggcggccctgacccgacggggcctaatccgccatgttctgctgctgcccagcaaggggccggcagaacggcatcaccggtaaaaccgcatagcggtttttatcccgtcggtgcagatggttacagccttcatcgttgttccttatgccgttctatattggcgttacttctccagcgggtcaatggaatgcacggtgagagtctccccgtccacggtgaatcgcacattctgccccgcaaagcccatgccgtatacccgctgggggtcctcctgataccggggacggggatcccccgccagcacgcccagcaggccctcccggctgtccgccgggatgcactccagaagccggggcggacactccacccgcagacagcggctctccagtccgtcggtgaagccccccacggcatcgggatggctgtcggtataggggaggtagggcttgatgtcaaaaatgggcgtgccgtccatcagatctgcgccgcagacatggagcaccggccccagcgcctcactctgctccacccgctccagccgcaccgaggacaggcccagatggttgggacggaagggagagcgggtggcaaagacccccatgcggcgattgccccccagacggggcggccgcaccgtaggggaccagtcctgccggacggcttcggagaactgccagatgagccagagatgggagaaatcctccagcccccggacggcgtccggattccggtaggccggttcaaagacgatgcggccccgcagctgtggcaccagcccgctctggcgtggcacgccgaacttctccggcagctccgtatggatgcgggcgatgacctgcagagcgtccatcacagctccctccgtccggtgtcggtgaggtgggacaggatgtccttgggcagacggctcagacgcagagcctgccccgccacgatcagcaggatgcccgccgccagcggcatggcgctgcggaaataggtagccagcacaaaggccagaaacatcaggcccaccagccccatctggagccgggaattgcggctctccaccgtctggagagcctcactcttgcggtacaccacaccgtcataggtgaactcccccgtggcggagggatcgtggtacagggtcttggtgaagtactgccaccgggtcagggggcagtactgctcctttttcttccccatggcttactcctctgtcggggcggcttccttctccgtctcccggtccgccagcgccatggagatgacgtggtcgccctcctccttaaagcgcatgacgataacgccctgcgtggcccggccggcgatgcggatgctgtctaccgccgtgcggatcaggatacccgcctgcgtcatcagcagcagatcctcctgcccgtccaccaccttgatgcccacaatggggccggtcttttccgtgaccatatagttgcggataccgagaccgccacggctggtgatgcggtactcctccaccggggtgcgcttgccgtagccacgctccgtgatggagagtaccgtcttgccggcctcggctctggcggcgcccaccacatagtcgccctcccgcaggcggatgccccggacgcccacggcggtgcggcccatggcacgcacgtccgtttcgtcgaagcacaccgcctgaccgtcgtgggtggcaatgaggatgcgctggctgccgtcggtctcctgcacgttgatgagctcgtcgccctcgtccagcgtcaaggcccggatgccgttgttgcggagattcttcagcgtctccaccggcagacgcttcaccgtaccgttgcgggtggtcatgaagaggtacagctggccctccccggcctcccggtagtggagcatggtctggatcctctccccctgctccacctgcaggatgttgacgatgttggtgcctctggcggtcttgccgctctccgggatctggtagcccttcttgcggtagaccttgccggtatcggtaaagaacaggagatagtcgtgggtggaggcggtgaacacatccaccacggtatcctcgtcacgggtggtgatgcccttcttgcccatgccgcccttgctctgggcggcgtattcactgacggcggtgcgcttgatgtagccgttctccgtcagggtaaagacgcactcctcctcctcaatgaggtcctcgatgtcgatctcgtcctccacgtcctgaatttccgtcttgcggtcgtctccgtacttctcggcaatggcggacagttcctccttcaggatggagcgcaccagagcatcgtcggacagcaccttcaggaagtaggcgatcttctcctccagctccttgtactctgcttgcagcttctcacgatccagcccctgcagcgccttcaggcgcatatccagaatggcctgtgcctgcacgtcgtccagaccgaagcgggacataaggttctccttggcgttgtcatagctggtgcggatgatgtggatgacctcgtcgatgttgtcctgtgcgatgagcagaccctccagcagatgagcacgggcctgtgcgtccttcaggtcatagcgggtgcggcggacgatgatctcctcctgaaaggccagatattcgtcgatgatgtggcgcagggagaggatcttcggctgggactggttattcaccagcgccagcatattgatggcgaaggtggtttgcagctgggtctgtgcaaacaggcggttgagtaccacctgcggattggcgtcccgcttcagctcgatgacgatccgcataccgttgcggtccgtctcgtcccggatgtcggagatgccctccagacgcttgtcctccacctgatcggccatgctcttgatgagcatccgcttattcacctgatacggcagctccgtgatgatgatgcgggtgcggtcgtggccgaactcctcgaactcgtggcgggcccgcatcaccacccggccacggccggtggcataggcggcccggatgccgctgcggcccatgatgaggccacgggtgggaaagtcgggacccttgatataggtcatcaggtccgccagcgtggcatcgggatcatccagcacgtggatgcaggctccgatgacctcccgcaggttgtggggcgggatgttggtggccatgcccacggcgatgccggaggagccgttgaccagcagattggggaagcggctgggcagcacacggggctccttgcggctctcgtcaaagttggggtcccagtccacggtgtccttccggatatcccgcagcatttcattggaaattttggaaagacgggcctccgtgtaacggtaggcagcggggggatcgccatccacggagccaaagttgccgtggccgtccaccagcatataacgcatggagaaatcctgtgccagacgcaccagagcgtcgtagacggaggcgtcgccgtgggggtgataccggcccagcacgtcgcccacgcaggtggcggacttcttaaaggggcggtcgctggtgaggttgtcctcgtacatggcgtagagaatacgccggtggacgggcttcagaccgtcccgcacgtcgggcagcgcccggcccacgataacggacatggcgtattcgatgtaggacttctccatctccggcaccagcgagcgctcgacgatgtgctggtccgggaagcggatctcctcgggatcatattggggtttcttactcatatattgttactccttgtcagaggattggggggacagatcgtgccacatggggttcatgcgttggatcagctcattcttctttcttcgattccaagacttgagctgtttttcccgttcaagggccgctcgaatatccgtcgtagtttcgtagtagacaagcttatccacatgatattttgctgtaaagctatatgggtctgtgtgatggcgatgctcccagagtctacgctccaaatcattggtcacgcccacatacacggtcacattcgtataattagagagaatataaatgtagtacacgagacatatcctcccttttattcaggagaaaacggattcccacgaccagtctgcggactggtctcggaatgacactctttatgatcgataaacgctctgccattgcgaagccagtgctcacactggctgtggcaatccgtactcctcttctgcaaaatttcatcaataatccagattcacagcgtacttggcgttcttctcgatgaactccttccggggctccaccttctcgcccatgaggacggtaaaggtctcgtccgccttgacggcatcgtccaaggtgatgcggcgcagagtgcgcttctccgggtccatggtggtctcccacagctcgtgggggttcatctcgccaaggcccttatagcggttgatgtcgatcttcacattggggttgccgtcccgcatctcggaggagatggcgtcccgctcctcgtcggtgtaggccacccgctgctgcttgcctcgggtcagcttatacagcggcggcacggcggaatagacgtagccctcctcgatgaggggccgcatgaaccggaagaaaaaggtcagcagcagcgtccggatatgggcgccgtccacgtcggcatcggccatgatgatgatcttgtgataccgcagcttgttcaggtcgaactcctccccgatgccggcgcccagcgccgtgatcaccggctggagcttgtcgttgccgtataccttgtcggctctggccttctccacgttcagcatcttgccccacagggggaggatggcctgaaaccgggagtcacggccctgggtggcggagccgcctgcggagtcgccctccacgatatagatttctgtcagctccgggttattctcgttgcagtcccgcagcttatccggcatggcggcgccgcccagcgccgtcttgcggcggatggactctctggccttgcgggcggcctctctggcccggttggccgtcagcgccttatccagaatggtgcgggccaccaccggatgctcctccagatacaccgacagctggtcggagacaaggccgtccaccagcgtgcggatataggcgttgcccagcttggccttggtctggccctcgaactgagcctccgtcagcttcacggagatcacggcggtgatgccctcccggacgtcctcgccggagaccttgtccccctccttgatcatgccgtacttgatgccgtaggcgttgagcacacgggtcagggccgccttgaagcccgtctcgtgcataccgccctccggggtgtggatgtcattggcaaaggaaaccatggtctcagcgtagctatcgttatactgcatggcgatctccgccgtggagtcccccttggcgccggccatgtaaatgacctcctcgtgcagcggagtcttgttgcggttgatccaggtaacgaactcccgtatgccgccctcgtagcacatggtgtcctcctgctcctgtccggggcggcggtcagcgatggaaattcgcagaccggcgttcaaaaacgcctgctcccgcatccgggtgtggagggtctcgtagtcgtactccagcgtgtcgaacatctcgccgtcgggcttgaagcggacgatggtgccggtgtggtcggtgtcaccgatgacggtcatctcctgggtgatggcgccacgggaaaacttcatctgatagattttcccgcccttgtggacctccacctccagccactcggagagggcgttgaccacgctggcgcccacgccgtggagaccgccggagaccttatagcctccgccgccgaacttgccgccggcgtgcagcacggtgtataccacctccagcgccgggcggccggtctgcttctggatatccacggggataccacgtccgttatcggtgacggtgatggtgttgccctcgttgatggtgacggtgatatccgtgcagtagcccgccagcgcttcatcgatggcgttgtccacgatctcgtagactaaatggtgcaatccggaggcggaggtggagccgatatacataccggggcgcttacgcaccgcctccagtccctccagcacctgaatttccgaagcgtcatactccgtggtgacggcggttactttttccagttcagacatgggttctttcctttccttgcccgccggtgacggcaggttgatcgttttccgtgcgcttttgaagcgtctgtgtgttcagctgggagatatagaccagctgcttatggtaagggtggtcgcacaccagaaatgacttggggatatcgtcgcaggcgtccagcaccacgccgtccctctccgcccggtccagaaactctctggttcggggggactgggaggtgatgtccaggtcgaatacaccgatgatgcggcggcggctgaccatgacgttcttgccgatgtgcagatagctcatgtcagcacctccccgccacggatatggaacaccttgccggagagcagggtgtccagccggtcgttttcgcagcaggtgatgaacacctgccccccggcgatgcggttgaggacatactcctgccgccgggggtccagctccgacagcacgtcatccagcagcatgatgggatattcccccatggtgtttttatgaatttcccgatccgccagcttcagggccagcgccgccgtgcggacctgtccctgtgagcaaaactgacgggcgctgcggccgttgaccagcacttccagatcgtccttatgggggccggagaggcacagccgggaggcgatctccgcctgctcatggctctgctgatgctccatcagggccgcaaacagctgctcctgcgggaggaaggggtcgtgaacggtgctgaccgtctgatatcgcagctccaactcctcccgctggccggagcactcgtagtgggcctgcgccgcatactccgccagcgcccggcagtaacgggcccggtagtggatcagcaccgctcccacctgacacagccgccggttgaagtccggcagggtggccagcagctggggatagtcgccgctgtcccggaggatacgggtcttgtgctcatagagccggtggtattccgccagtgcctccccgtaccggggccgcagctggcaaagagacagatccatgaaccgccggcgggcggcagccccctcccggatgagcatcagatcctccggggagaaaaacacggtgtgcagcacgtcggagagggcggcgttgttcttagcgggaacgccgttgacgctggccttgcggcggcggccacggaacagctccacctccgtgcggaactcccggtcccgtgtgaacatctgccccaggatgcgggccttgtcccggtcgaagccgatgagctcccgctccgctctggcccgtggtgacttgccgcaggagagatagaccatggcctccagcagattcgtcttgccctgagcattctctccatagatcacgttgcagctgtcgtgaaaggtcaggacctgccggtcgtagttgcggaagccctccagcgtcagggcgtcaatccgcatagcgcacgccgtagtgcaggccctcggcctccacatcgtcgccggggcggattttcttgccccgctgggtgcagacctcgccattgaccagtacctggccctcctgaatgaggagcttggcctcgccgccggtggcggtgacggccgccagcttcaacaggtcctgaagcttgatgtattctgtggtgatggtgatggtttccatagatatcctcctgtgaggtaatgaggtggggtttctttttttcctccgacggggtactttctgccaatagcggcagaaagttttcaccgtcgcaaccacctcgctttatccgccacaggcggcgcttcggtggtttccgccaaaaacctttgttttttggattttctttcccttcaagagccgtgttcaatatgggcctgtaaagggaattgactcagcaacagatccgctcccactctggtggaggaaatgttgcgtttaccgctggggcgatccgtttcccacggtagaactgaagatttcttcgactgcccacgtagcggcagcgtg

SEQ ID NO: 12413 - DNA, 14241 bp, Unknown
  gut microbiota DNA sequence
ccatgggtttctgctggcgttctttggtgactttctgccgctattggcagaaagttacccgccggaggcataaaaaaggagttactgctgggaaaagtaggccgtcggagacagcaaagaaaaactgcaaagggtattacggatcgccacgggtgcttcgcaccctcgcaatgacattactaaacgtaagtaagtgaaaacaagccctactcaacaactatccgtataatcctctctctatatttcagtttgttatcatgccttcagccgcaccggcaggaccatatagagaaaattctcctccccttccacgggggtcatgatgcagggagagatgccggtgttcagctccatcttcaccttctccgccggggcatagcgcagggcgtccatgaagaagcggttattaaagccgatctccagcccctgaccgtcgccctccacggggcagatgtccttagcctcgccgttgccggtcttggcggacaggtacacccggccggcatcaaagatgcagtggacggggcttttcagtttctcactgatgaccacgctgacacggtccagactgttgagcatggccttggtatccaccagaatggagatgggattgtttcgggggatggcgttgcggtaatccagaaattcgccctccagacggcggcagatcagctgggtggagccggtctcgaacatcaggtggcgcttgccctgaatgatggtcatgagatcgtcgctgtcctcgcagatcttctccacctcgttgagggcggagccgggggccacgaaccggaaggcgccgccgtcgatgcgctccagcggctcccgccgcagggccagacggaagccgtctacggacaccatggtcaggccctgctcgttgatctcgaagagggagccggtgtggatgggacgggtctcgttggtggagacggcgaagctggtctggttgatcatggccttcagggtcccctgttggatagccacagagtactcgtcgtccacctccggcagctccgggtagtcctcggcggacaggcccatgatctcgaagctggcgtcgccgcaggtcaggcgcaccatatatttctcatccgccgcaaacaccaccagatcgtccggcagcttccggatgatctcaccgaacaggcgggcgttgaggacgatgcggccctcctcgtgaacctcagcctcgaaggccgtgcggataccggtctgcatattgtagcccgacatggtcagccggtcgctgccctctaccaaaatgccctccagtgcggggatggagctttttgcggccacggcacgggacacggtattgacggcgctttgcagtagcgctttttcgcaggagaaacggagcatattcttcttcctttcttgtcgaacgatttttgtcatgcttctcagaaagagaacataaactaatcttttattcagtaacagccgcagtagagaattttcttgtggaaaaccggcgcaaacccttgctgcgacacggtttgttctccaccgctgtttgtggacgtaccctcccctttttccacagggaacgacggcattttcttatccccaccttgtccctgtggaatccacagagccttgtggaaaagtggggtcagcgcttggcgttgatgttggtggtgatctccttcaccacctcggcaaaggcggggtcggtacgcatctgcttctccaccttatccagcgagtgcagcaccgtggtgtggtcccggtcaccaaattccttgccgatgtcgttgagggagagattggtcatgcggcgaatgaggtacatggcgatctgccgggcgttgacctcgttgcggccccggcgctggccacggagcacatcctcctccacgctgaaatacttgcagatatagctgatgatcaccgacggcgaggggatgtactcgttgctcttttgcagcatatcccgcacggcacggcccacggactgctcgtccacctgatcccccagcaggtcccggtaggccagcagcttattcagggtcccctcgatctgccgcacgttggcggtgacgttctcggcgatgtagccgtagatctcgtcggggagctttacccccagcatggcggccttgtttttgatgatggccagtctcgtctcgaagtcgggaggggccacatccaccataaggcccgacacgaagcggctttgcagccggtcctccagctgggtcatttcacggggcggacggtcggaggtcagcacgatctgccgcccggattcgtacaaggtgttgaaggtgtgaaagaactcctcctgggtctgcttcttgccggcgatgaactggatatcgtccaccagcaggatgcccgcctgccggtacttctcccggaactcggcgttgctgccctcccggatggatgcgatcagctcgttggtgaagtcgtcacccttgatgtacacgatccgcaggtcctcccgcttgcgcttgacctgatgggcgatggcgtagagcagatgggtcttgcccagtccggagtcgccgtagatgaacagagggttgaagttttccgccggcttatccgccacggcccgtgccgccgcataggccagcttgttctgcggccccaccacatacgtctcgaaggtgaaggcgtcggaatccagcagggagccgggctgatccggggccacaccgtgataggcagccagctgctcgtcgttgaggatcttcacctccagatcggaggagaagatgtccttcagcgccgccttgatgtgcttcatgaaacgggtctcgatggtgctttttttgaaggagttgctgcaatgcagcacgaaggcggagtcctccatggtgaccacgtctacctcgtcgaaccatgtgcggatggtggtctcgctgagctgctcctgtaatcggcttagtacgctctgccatacgtcagaaatggaattcaatgaaagcgcccctttcccctgatggatctctatctctgtatttgaaaaaaatttatccgagaatagtatagcagaaacccccggaaaagtctacacttattctaatataagctgcaaaaaatgacgcaccggaaggcacaagatgtagggagaaaaaccggaggaaaaccaccagattttaggcttttgccgaaaaaacacaccgcttttcataagaacccgctcttttccccttcagatttttgttgacaggcggaaaaagctcatgtataatgacaaatgcgcttattttaagcgcctgacgaatgtcaactgcggccgtgggagaatgcttcccacccgccgtcgagtatgtgcggcagaagctttttctgccgcctgatcttacaaaagatggaggtgtcatgcaatgttccgtacctatcagcccaagaagcgtcagcgctccaaggagcacggcttccgcaagagaatggccacccgcaacggccgtaaggtgctggctcgccgccgtgccaagggccgtgctcgcctgacccattgaggtcacggaaagtgcatcggtcatagataatcaaacagggacggtggatgggaaaaaccgccgtccctattggtctatgtaattcagattggtaaaagaggacgctatgaaggcagccgtcacggtaaaagagaattatgagttccgccgtatctaccgcaaggggaagagtctggtgtcgccgcagatggtgctgtattggcagaaaaaccgtcaggggcagtcccgtctgggggtcaccgtcagcaccaagctgggccacgccgtggtccgcaatcgggtgcgccgccgcttccgggagctgtaccggctccacaagccggagatgcagccgggctacgacgtgattttagtggcccgtgggcgggccgtccgcagcacctatcagcagctggacgagacgtatctccacctgctgcggcaggcgggccttgtaccggaggagacggcatgaagcgggcgcttttgaagctgttccggttctaccagacctccgtctcccctctttttccgccccggtgccgctatatccccacctgctcggagtatgccgtggaggcggtggagaaatacggcgccgccaagggcggccttctggccctgcgccgtctgatgcgatgccatcctttccacaagggcgggtatgaccctgtcccctgacgcaacagcctcgtttttcccatcccattataaaacggaggtatctaccccatgtttgcacaaatcggctattacatctgcgtgccgtttgcgtggctgacccggctgttttacagtctcaccgggtcctacggtctggctctgatcctcttcactctggtggtgaagctggtgatcctgcccttccagctcaagagcaagaagagtatgctccggatgaaccggatgcagggcaaggtaaaggatatccagacccgcttcgccaacaatcgggagcgccagcagcaggagatggcggaactgtacgcccgtgagggcgtgaaccccatgtccggctgcctgtggtcctttatccccttccccatcctgatcgccctgtacgccatcatccgtacccctctgcggtacttcatgagcctgtccacctccgtcatcgaggagatcggcacgctggcaggtacgctgggctatgaggccagcaacaacacctatgaccagatctatctggccaagttcatccatgagcactgggagagcttcgccgggaagttcgatggtctggtggacctgaactacagctttcttgggatggatctggcgtctcagccctccacgctgctgagccagttccccggcggcggctggcccgtgtggggcatcctgctgctgcctgtgatctcggcggcggcccagctggtgatgagcatcatcaccatgcgcaccaacagcaccgagggcgcaggctccgccaagaccatgatgtacctgatgcccctgatgaccctgtggatgggctatatgctgcccgccgcactgtgcatctactggatcgccaacaccgtgttctccctgatccaggaggtgactctcaacaagtacttcaataagatcctggatcgtgaggagaccgagaaggaaaaggccgcccgtgaaaagcgctacgccaagtaccagaagcagaaggaactcatggcccagcagcagatgaacggcggtggccgcaatgaccgcaagccccagcccaagaagaaaaagcagggcggcgaggaaaagcgcagcggcaccaatgaaaacggacgtgtgggccagcggccttatgcacgtggccgtgcctatgatgaaaagcactacgaataaggagttttgtctatgagctatatcgaagtaacgggcaagaccgaggaggaggctgtccgtaaggcgctgacccagttgggtctggagcgggacgacgtgtctctggaaatcttggagcgtgccaagagcggctttctgggcatcggcggttcgcccgcccgtatccgtgtgacctacggcaccgacgagccggaggagaagaaggccgagcctgccaaaaaggtggaaaagaagccggaacccaaggcagaggtgaaaaagccggaggtaaagcccgaacccaagaagcaggagcctaaaaagccggagacgaagccggtggagaaggccccggagcagaagcccgtgacggtcgggacctgcgacgacgacaacgcccgccgtatccgggagttcctggagggtctgctgcagcacatgaacagccccgctcaggtgaatgtggtgctggaggagaagggccggtatcaggtgacgctggagggcgagaagctgggccagctcatcggccgccgcggcgagacgctggacgccatccagcagctgaccaactacgccgtcaattccggtgcggataagcgcatccgggtccacgtggacgccgagaattatcgggccaagcgggagcagagtctggagtctctggcccggaaggtggccggcaaggtcaccaagtatcgccgcagcgtgacgctggagcccatgaacgcctatgagcggcatgtgatccatgccgccctgcaggacgagccgggcatcaccacctactccatcggcagcgagcccaaccgccgtgtggtggtgagctacgaccgggagaagcgccagtaaggcagcgctgttccataggaaatatgcccccgcccctacataggggcgggggtgtttttgctttcgggagggggggatccgcacttcctaacggtagacgtatcattttctccatccggcagaaagaaatctgtcgaaggcatcaggtaaaaacgaaaaaagagttccccatgcactgcatggggaactctttatacacagaattggctgatccgtcccggagaattactggatcttctccccggcggcctccttggcccggatctccttcatggcatccttgtgagacaggttccagcggcccttctcgtcgatctccatgaacttgacccacatcatgtcgcccaccttgcaggcgtcctccaccttctcgatgcgcttgtcggccagcttggagatatgcaccagaccgtccttgccgggagcgatctccacgaaggcgccgaaggtcatcaggcgcacgacacggccgtagtacagcttgcccacctccggcacaaagacgatgtcatcgatgcacttcttggcgatggcgcagctctcggcgtcgggagaggcaatgtggatggtgccgtcgtcgtcgatgtcgatcttagcgccggactcggccacgatcttctgaatgacgctgccgcccttgccgatgacctcacggatgcggtcgggatcgatgtgcatggtgagcatcttgggggcgtacttgctgacctcaggccggggctcggcaatgcagggcagcatgatctgatccaagatctggcaccgggcatcgtaggtgatgtccagagcgttgcggatgatctccatggtcagtccgtcgttcttcaggtccatctgaatggcggtgatgcccttcttggtgccggccaccttgaagtccatctcaccgtggaagtcctccacgccctgaatgtcgatgaaagtggtgaaggagccgtcgtcgtcctgtatcagaccgcaggaaataccggccacaggggcggagatgggtacaccggcatccatcagagccagcgtagagccacagatggagccctgagaggtggagccgttggaggataccacctcagacaccacacggatggcataggggaactcctccaccggggggatcacaggcagcagggcccgctctgccagagcgccgtggccgatctcacgacggccggggctgcgggcgggcttggcctcgcccacggagtagccggggaagttgtagtggtgcatataccgcttctccgtctcctcccagatggtatccagcttctggcaggcggagagggtgtccagcgtcgccacggacagcacctgcgtctggccgcgggtgaacaggccggagccgtggacacggggcagcacgcccacctcggcggacaggggacgaatttcgttcttctggcggccatccacacggtggccctccagcagccatgctttgacgatcttcttctggaacttgtaggtgaactcctccagatactgatccatatccggatactcctccagatatttctcgtgccagtgctggatcatctcattccagcgggcctcacggacgttcttgtcgtcggtgtccatggcagctttggcctcgtccatgaagtcggccacgatcttgtcgaacagctcctgattgaagtcggcgtggggatagtcaaacttgggcttgccgatctcggagaccatctggttgatgagggccacctgcttctggttctcctgatgggccagctggatggcacggtacatggtgtcgttatccacctgattggcgccggcctcgatcatcaccaccttcttgccggtggagaccacggtgacatccagatcgctgaccttgcgctgctcactgttggggttgagcaccagctcaccatccaccagacccaccttcagagcgcccacagggccgttccagggaatatcggagatggccagagcggcggaggtgccgatgagggcggcgatctctgcggagcagtcgtggtccatgctcatgacggtacacatgacggacacgtcgttgcggaaatcggaggggaacaggggacggatgggccggtcgatgacacggctggtgaggatgcccttctcgccggggcggccctcacggcggttgaagctgccggggatgcggcccacggagtacagcttctcctcgaagtccacgctcagggggaagaagtcgatgccgtcacggggacgggcggcggcggtgacgcagcacagcacgctggtctcgccataggtgaccatgacggcggcgttggccagctcggccagcttcccgacctccagcgtcagaggacggcccgccagctccatggtgtacttgtggtagttggggaattggcgcttggtgataatggtagacatggtatagctccttttcattgaatttttccgtatgggagccaaaccatttagcacttgaaaccatgtcggaggagggattttccagcatcttccggcacattttcaactgctaaaggctgaaagcggctccgcatacgggcggggaaattgtgaaagaagggtggtgcgccctgcacaccaccctgttttcagcttacttacgcagacccagcttggcgatgagggcacgataacgctcgatgtccttcttggccagatagtccagcagacgacggcgcttaccgatcatcatctgcataccacgacggctgtggaagtcgtggggatggaccttcagatgggcggtgagctggttgatccgctcggtgaggatagccacctgaacctcgggagaaccggtgtcggtagcgtgggtgcggttggcctcaatgatagaggtcttctgatccttctgcatcatagttgtgtttccacctttcttttaattggcccgcagcctgagtgccgggacgggtgaagcgtccacgggactaagaacaggggcaagtccatacgcatcgcagcgtactctgataaaataccataaaatcctccggatgtaaagaataaattccgaaaaaccgtgggaaaatcaaaaaattttccgctgtggaggggacttttgcctccgacggcccacttttccagctgctgggaaaagtgggccgtcggagacataaagaaaaagctactgggaacagctacccgccggagacaagaaatcacttccggaaaggatcaaaccgccgtcacttcagttcgatagcccccacggggcagctatccgccgcctcctgcgccgccgccagatactcctgcggcaccggctctgtgatggcctgcgccgactcccccggcaggatgctgaacacctccgggcatacgccgggacacagcccgcactggatacaggtctcccgatggacatatgcgtgcatatttctccctcccttcgccaagcagatcgggaatattatgcccgcaaaccgtggatattagtaggatcttacgcagttccctattgacacgggggaggtttcatgctaacctaagtgtactaacatgaatagtacacgaggaaggagtgtgcatcattgatccgtctggattatcgggacgcccgtcccatttatgagcaggtgaaggacggcctgcggcggctgatggtcaccggcgtgctggcaccgggggaaaagctgccgtcggttcggagccttgccatggatctggccatcaaccccaacaccatccaacgggcctatgcccagctggagatggagggctacgtctactccgtggcaggccggggtaccttcgtggcggagggacaggagcagaatctggtccgccgccgggaggtggaggccaaggtgcagccactggtacaggagctgcgggagctgggcatgacggagggtgagtggatcgccctgtggagaggaggaaacgagaatgcttgaggcaaaagaggtggtcaagagctttgacggcttccgagcactggacagcgccaccctcaccgtacccaaggggacggtatatgggctggttggccccaacggcgccggaaagtccaccatcatccgccactttaccggcgtataccgccccgacagcggcaaacttctgctggagggcgctcccatttgggagaacaccgacgccaagcggcgcatggtggtgatccccgatgactggtactatttcccgcaggcgtccattgccgagatggcgaagctgtacgccggggcgtacccctccttctcctgggagcgatacgagaagatgaagcaggtgttccccctgaacgaccgccagatgctgcggcgcatgagcaaggggatgcagaagcaggcggccttctggctgaccatgtgttgtatgccggagtacctcattctggatgagccggtggacggtctggacccggtgatgcggcggcaggtgtggtccctgctgctgggggacgtggcggagcgtggtaccacggtgctggtgtccagccataacctgcgggagctggaggatgtctgcgaccatgtgggcatcatgaatcaggggaaggtgctgctggagcggagcctgtcggagctgcaggataccacggtgaagctgcaggtggtgtatcccggtgaggagccccgcctgccggcggagctgaatatcctgcaccactccgccgtgggccgggtgcatacctacatcctccggggcgaccgggagagtatcctgaaccggatgcagatcaccgctcccctgctgctggaggccattcccctgacgctggaggagatctttatctatgagctgggaggtgctgactatgcggtccgtgacatcgttctttaatccggcactggcccgcagcgatctgcgccgccactggcccattctgtttctgtataccgccatctggatggtggcgctgccggtgcagctgtatctgcggcacatagccgagggcgcaagctacggaacccggacggtttcggaggtgtgccagggtacctacagcatgggtgtcatcatggcctttgtgttcggcggtgtgctggccatggccctgtattcctacctgatgaacggccggtccgtgggattgatacacagcctgcccctgaagcggcagaccctgtttttcacccagctgctgacgggctttgccatgctcaccgccgggaatctgctggtggtactggtgagcctgctggtgtgcggcgagccgggtccgctgctggtatggctggcggtagtgacgctggcggagatcttctttctggctcttggcacgctgtgcgccatgctcaccggctggctgctggcggtgcctgtgctgtatgtggggataaactttctggtgatggcagtcatgcagctgatccactggctggcggagctgttcatttacgggtatcaggccaatgacttcggtagttttaccatgtggtgtacgccggtggtgcagctggctcgccggctgacggatcctcagggcgtcatcgctgagtatgtgggctatcccgtcgtcagcgctgatgtgagcccgctggaaaacggcggctggcaggcactggggatctatgtcgccgttgcggtggcgatcattgcactggcctgtatgctgtgtatccggcggcgcagcgagctctccggcgatgtggcggccttcccgtggatgcggccggtgctgcgctacggcgtgggctgcatgggcggtctggcgctgggcatgatcctgtacagcgtgaccttcggtctggctcgtaccaatgatatccgggcctacctgccgggaatgctgctgtgcgtggtgctgatgacgctggtgtgcagcttcggaatgtccatgctgctggggaaatccctgaaaattttccgccgcacatggaaaggcacggtgctgctgacggcactgctggcagcggtgtgcgtgtgtgtgcggatggatgtggccggtgtggagcgccgggtgccaaaaaccagcgagattgagagcatctccgtccagtgcagccgtgcgaattcctttacagccacctccgaggataccgagaccatcgaggccatccgggccatccaccgggccgtgctggatcagatgaaggacggcgatgtcgatctggacggtgctctcgtagaggacggccagtacatctggatccgcctgaagtataccctcaccgacggctccgctctggagcgggcctataacgtgccggtgcggcgggcttccgccctctacacggccatcaaccatatgatgtccacgccgcaggtgcgccagaccctcgtgttctccggggaggcggaggctggtgccgttccgcagggcggtacgatctactccttagaaaccggtgacttccgcaacctcaccgccgcagaggcacaaagcttgtatcaggcggcttggcaggatgtggaggagggcaatgtcatcagcgatattctgacagagaccggctatacgctcttgcaagtggacatcaacggcaggaattgggattgtgcgctggatacacgctacttcaccgatggcgcaaagacccttgcggtgctggatcggttcatgcggaacggctggagcaacgccgatggcctcacggaaaccacagaggattcataacacaaagcccctcctgttaggcaggaggggctttgtgataaatagaaattagatatgctaatgccatttattagaaaattgcactttactaataaggtgtttaggatataataaaaatgttgtgcaatggtacgaccgaacgaatccaatacaaaggagtttttcatatgagcagaacactgggtacggtggcacggggcgttcgcacccccattttccgtgagggcgacaatgtggtggagggcgtggtctcctctgtcctgacggcactgaaggagaacggcatccagccccatgacaaggatgtggcggctgtcaccgagtccgtggtggcccgctgccagggcaactatgccacggtggagcagatcgccgccgacgtgaaggccaagaccggcggcaagactgtgggcgtcaccttccccatcctcagccgcaaccgcttctccctgctgctcagcggcattgccgccggtgtggagaaggtggtgctgatgctcagctatccctctgacgaggtgggcaaccatctggtgtctctggatcagctggacgaggcgggcatcgacccgtggcacgacgtgctggatctggagcagttccgggccgccttcggcaaggtgatccatcccttcaccggtgtggattatgtggatttctataagggcatcatcgaggatgccggggctcaggcggagatcgtattcgccaaccgggtgcagacggtgctggactacaccgataccgtcatctgctgcgatatccacacccgccagcgcagcaagcgcctgctgaagaaggccggcgcccgtgtggtgctgggtctggacgacctgctgaccgctcccgtcaacggcagcggctataatccgcagtacggcctgctgggcagcaataaggccgacgacacccgtgtcaagctcttcccccgtgacgccgacgtggtggccaaggccatcggccagcggctcagcgaggctaccggcaagcgcatcgaggccatggtctacggcgacggcgccttcaaggatcccgtcggcaagatttgggagctggcggaccccgtggtctcccccggttataccgccggtctggagggtacacccaatgagctgaagctgaagtatctggcggaccacgatttcggtgacctgtccggcgaggcgctgcagcaggcggtggcacagaagatccgggaaaaggatgcctccgtcagtctggtgggcaacatggtgtccgaggggacgaccccccggcacctgacggatcttatcggctccctgtgcgacctgaccagcggctccggcgacaagggtacccctgtcatctatattcagggctacttcgataactataccaacgaataagcgcaggatatcaaagcaggccacggaagaagctcttctgtggcctgcttttttcaacagcttcatgctgctgtttccggcggcccacttttccagctgctgagaaaagcgggccgtcggagacacgttctttatgcaatagggcctattggcagaaaatcacccgccggagggaaaaacccaaacacacccgccccaccaaacaaaagggagcgctgcggcattg

SEQ ID NO: 12414 - DNA, 5526 bp, Unknown
  gut microbiota DNA sequence
tccgtaccgagctgacggagggcggctaccttcggggccggggcaaaaagcagcccggcttccagcgggcctcccgtccacgggagttccgctccacggcgggcctgcggattctggtgggccgcagcaaccgtcagaacgacaggctgacgtgcaaggacgccgaccgccgggatatctggttccacacccaaaagatccacggctcccacgtgatcctctgcaccggcggcacggagccggaccgccggagcattgaggaggctgcttcgctggccgcctactattctcagggccgggagggcggcaaggtaccggtggattataccccggtgaaattcgtgaaaaagcccgccggggggaagcccggcatggtagtctataccacctatcagacgatctacgccgtaccggacgaggcgctggcccgccgcctgtcggtgaaataagacaagccccggaggcctctcctccggggcttgagcctgtcaaaaagaagaaacctttcgtcaacggggcggaagggtgtgtgcgggaaacccggaagggtgtcctgcacgatgatgatccccatttttcagagctttttgaagctctgaaaaatgctacagcgtggcgaaaagactttttcgacacgctgaagcccccggaggcccttcctccggggcttgtaaatttcttaacggccgatttttccccggatgacttaaaatatacggaatatcttgcataaatcagttgtaaattcggcggaagtatgataatatattgaatcactgaacagcggcgcagtatcctagtcagatctgccgtcttctaagaagggcctaaaaatccttttaagggcacaactgtgaaactcctggtgcctgctgcttacgcccagtttggggtgggtgctgggaggagatgcgggagcccccgcatctgcggtggtggggcgccctccaatggcatggaggacccgaccctgcctctgtggagacctgctgttgtgcacaggcgtactccctttgtggtcaagcgacttgtgtacgaggcagattatgaacctgcaatgcggtgctacccggccttgtgccgtgaacgctgtgtgcagagtagcctgccttgcgtgggtagggtagatagggaagtggaagcaccactgcccctggccaggggcagcgtgttgattctctcgaaaccctgcctgcaaaagaggctaagagacggtttgactgctgtggaaatcacctaggctgtcccacaggggcgcaggggggattgcagtgcggactaagtggcagtcgggtttcatgaccggtaacatcatggcgcagcaccgaacgggaaaccgcctgatcggcaacgagaggtgtgctgtggggaaatcctacccgtacctaagccgcaagattaaccctcggcgctgccctgttcagtattttcttatgaagcatctatatttttgcaaagcaaagagagggatattcctttgagcgaaagcgataaaaccgatagaaataagggaaagagcaagagtaagaacaagaagaaaagcggctgcagctgggcgctgcgggtctttctgctggcggtggcgctgtcggcgctactgagctttttctcctccactgcgctggaggggaccggctacgccgtggccatcatcgtgctggcggtgttcatcgccctcggcatcgtgtttgatatgatcggcgtggccgtcaccgccgccgaccccaagcccttccactccatggcggcccacagggaaaagggcgccaaggaggccatccgtctgctgaaaaacgccaatcaggtcagttccttctgcaacgacgtggtgggcgacatctgcggcatcgtcagcggctccacggcggctgtcatcgtggtggagctgcagagggacctgagcaccacctccatcctcatctccatcgccgtgacggcgctgatctccggtatcaccatcggcggcaaggcgctgggaaagacggtggccatcaacgagtgtaccggcgtggtgtaccgggtggcccggctcatgcataccctgcatctttaccgatgaaatggagcgatcaacttgctgttggaacagatacatgacccctccgatgtgaggaaactgaatgatgaacaggcccgcctgctgtgccgtgagctgcgcaccttcctgctggagcaggtgtcacggacaggcgggcatctggcgtccaatctgggcgtggtggagctgacggtggccatccaccgggtgttcgacacgtcgcaggaccgtctggtgttcgacgtgggccaccagtgctacgtccacaaggccctcaccgggcggcgggagctgtttggcaccctgcgccagctgggcggcctctccggcttccccaagccgtgggaaagcccccacgatgccttcatcgccggccacgcctccaactccgtgtccgtggctctgggcatggcacgggcccggacgctgctgcaccagcactatcaggtgctggcactgatcggtgacggagccttgggcggcggtctgagcttcgagggactgaatgacgccggggcctctcacgagcctatgatcgtgattttgaacgataacgggatgtccattgaccccaacgtgggcgggatgtcccggcatttgtcacgcctgcgcagcaagcccggctactacgccttcaaaaagcgctaccgtcaggtgttggagtcctcccagacggggcagaagctctattccgtcagccacgacgtgaaaacggcgctgaaaaagtccctgcttcccggcagcaccctgtttgaaaacatgggctttacgtatatggggccggtggacggccacgacgtggtccagctgacccggatgctgcgggaggctaaagatctccgctgtccggtgctgctccatgtccacacggtgaaggggcagggctacggccccgccgaggcggatcccggccggttccatggcatcgggcccttcgatgtccgtaccggcagcggcaagcccgccgcacccagtttttcctccgtcttcggtgagacactgactcgactggcgggggaggaccgccgcatctgcgccctgactgccgccatggtggacggtacggggctgacgaaattctccaagacctaccccagccgctttttcgatgtgggcattgccgagggccacgccgtggccacggcggcgggcatggccaagcagggccttgtgccggtgctggcggtgtactccagctttctgcagcgtggctatgatatgctgctgcatgatgtggccctcagcgggctccatgtggtgctgggggtggaccgggccggactggtgggggccgacggcgagacccaccacggctgcttcgacgtgatgtacctgtcgcaggtgccgggcatgaaggtgttctgtcccgccagctttgccgaactgcggaccatgctgcgccgtgcggtgcaggaggagaccggtcccgtggcggtgcgctatccccgtggcggggagggggcctatcaggaggatcgcagcgatgaggccatcgcctgcctgcgtccggggacggatatcaccctcctgacctacggcaccctcatcaacgaagccctgtccgccgccgatctgctggcacagcggggtatctccgctcaggtgctgaagctcagcaccatcgcccccctggacccggagaccgtccgcacggcgttgaccggcacgaagcgtctgctggtgctggaggactgcgtggagaccggctgcgtgggccagcgggtggcggccgtcatggcccagctgggcatggccccccggcgactggtgctgaaaaatacaggcgaccgctttatcccgcagggcagtgtagcggagctgcgtcatctctgcggactggacgctgagagcgtcgccgctgcggcagaggaggctgtgcatgagcaataaaacaaggctggacgtactcctgacggagcgtggcctggcggagagccgccagaaggcacaggccgtcatcatggcgggccacgtgttcgtggcgggccagcgggtggataagcccggcacggcggtgctgagcgacgcccccatcgaggttcgtggacacaccctgccctatgtgagccggggcggattgaagctggaaaaggccatgaaaacctttcccattactctgaccgataagatctgcgccgacatcggagcctccaccggtggcttcacggactgtatgctgcaaaacggcgcccggaaggtctattccgtggacgtgggctacggccagctggactggaagctccgcagcgatccccgtgtggtgtgtatggagcgcaccaacgcccggtatctgaccccggagcagatccccgatccactggattttgccagcatcgacgtgtccttcatctccctgaagctgatcttcccggcactgtacggcctgctgcggcaggggggtgagatcgcctgcctcatcaagccccagttcgaggccggtcgggaaaaggtaggcaaaaaaggtgtggtacgggaccctgctgtacatctcgaagtgctggagcacttcctgacccatgccaaggagagtcactttacagtgcttggaatcacttattctcccatccgtggaccggaggggaacatcgaatatcttggctatttgaaaaagtgcgatgagccggacggcagctttgacctaccgacactggtggcggagtcgcatagtcagctgaaggactgaggaggagtagatatgaaaaaagtgatcctctgccccaatccctatcgggatagcgagctgcgggtgtgcaaggaggccaaaaagctgctggatgccctgcattttcagacggtggtgtgcctgcccttccagcgggagggctatggtgcggagttgggcctgcgtatcaccccgctgcatcaggagatccgctcggcggatctgctcatcgccttcggcggcgacggcaccattctgcatctggcccggacggtggcgctgcacagcgtcccggtgctgggagtgaatctgggaagcctcggattcatgtcggagctggaggtggacgagctggaccgcctgcgggatctggcggactggagcttcgacgtggagtcccggatgatgctggacgtgtccgtcctccggggcggcaagtccgtgtataacaacatcgccctcaacgacgctgtcatctccaagggctccattgcaagggttgtaaggctgaatatctttacagaggagggccagctcaccaaggtcggcggcgacggcattatcgccagcacccccactggatccaccggctactccatggccgccggcggccccatcgtggagcccacggcccggaacctgttgctgacccccatctgcccccactccacccgctccagcagctacgtcctttcgccggagcacgtcatcaccgtggaggccccggacgccaaccgcaagttcgtctacctgtccgtggacggcggcaaggcgttctctctgaaaaacaacgatcaggtgcgtgtcagcacctccagatacacca

SEQ ID NO: 12415 - DNA, 869 bp, Unknown
  gut microbiota DNA sequence
cattttcctcagttatttccggccccaccgccggcttttcgcattggatatcatctgcgcttttatgatctctctggtggatctggcctttcccctgatctcccgtaccgccatgtaccagtggctgccccagcagcagtaccgcactttcttcatcgtcatgggtattgtggtgctggcctttgtgctgcgctcctttctgtgcttcgtggtgggctattggggccataccttcggcatccgggtggaggcggatatccgccgggatctgttccgccatatgcaggagctgggcttcgacttctacgaccgcaaccgcaccggccagctgatgagccgcctgacctccgacctgttcgaggtgacggaactggcccaccacggcccggaggatctgttcatctccgcagtgaccatcgtgggcgccctgatcgtcatgttctccatccagtggcgtctggcgctggtggtgagtctcatcatccccattttcatggtggtggtcatgtaccgccgccgccagatgagcgccgcctcccgcgcggccaagcagaaaaccggcgtcatcaacgccgagatcgagtccggtctctccggcgtccgcaccaccaaggccttcgccaatgaggagaagcagcagacccgatttgacggcgccaacgagatattcaagaccgccaagcgtggctttcataaagagatgggccttttcaacgccagcatggagttcttcatctgcatcctgtccgtggcggtcatcgccgtgggcggctggctcatcatgaaggggcagatggactatgtggggctcattaccttcagcctgtatatcaccaccttcatcagccccatccgcaagctggccaact

SEQ ID NO: 12416 - DNA, 3622 bp, Unknown
  gut microbiota DNA sequence
ccggttcattgaactgatggccacggagcccaccattcaggacgcccccgacgccgtggagctgtcgcaggtccggggcgaggtggagctggatcatgtcagcttcacctatccgggcagcagcgaggtccttcatgacatcagcctcactgtggccgccggggagacggtggccatcgtaggtccctccggcggcggcaagagtaccctgtgccagctggtaccccggttctatgacgtcacggagggcagcatccgggtggatgggctggacgtgcggcaggtgacccagcgctccctgcgccgggccatcggcatcgtgcagcaggacgtgttcctctttgccgataccattcgggagaacatccgctacggccgccccgacgccaccgacgaggaggtggagcaggcggcccaccgggcggagctgctggaggatatccggaccatgcctcagggcttcgacacctatgtgggggagcggggggccatgctctccggcggccagaagcagcgggtggccatcgcccgcatcttcctgaaggacccggccatcctcattttggacgaggccacctcggcactggacagcgtcaccgaggcgaagatccagggggcctttgaccagctgagtcagggccgcaccaccctcatcattgcccaccggctctccaccatccgctccgcccaccggattctggtggtgcaggacggccgcattgccgagcagggcagccatgcccagctgctggcggagaacggggcctacgcccggctgtaccacacgcagaatctgggggagaaccatggataaacgggatctgttggaccgactggcggcaaacggtgacgagcgcctgctgctgggaagggtctgggataaatacgagcagtgccgccgcaggaacatcccggtggtgacgggctttctctccccggcggagcaggagctggtgcgccgcctgatgggggcgctggatgtccgggagggctggcttctatggggcggctacgatactgctcagcggcggcaggcccacttcctgccggattggcagacgggaccggacttcgaggccgtggccgctctgcgggccaccttctatgaacccaacagcctgacccaccgggacgtgctgggcagccttatggggctgggcgtcaccagagaatccgtaggagatattctggtggcggagcagtcggtggatgtgctggtgacggagccggtgcgccgcttcctgctggatagctgggacagcgccggccgggtacggctgaaggtgcagcccatcggtcccacggagcttcaggtgccggaggagaaggtgaagctgctgcgggataccgtgtcctccctgcggctggacagtgttctgtcggtgggcttttccctgagccgcagcaaggcggcggaggccgtcacctccggcaaggtgcaggtgaactgggcggactggcagaagccggaccggcaggtggtgcagggcgacgtgctgactctccggggtcttggcaagtgcgtgctggaggaagtggggaatcagacgaaaaagggaagggtgtttatcaccgtcaagcgctacctctgacggcaccgtcccgactgcggatatcctgctgcggatcattttgctgcggatggcttgtttgggacattttgtggacattgcggatattttggacattttgtggacggtttacggacatttttcggtatatggattcgtccgatttgggcggaaaggcgggtaaatatcgtatggatcagaagaagatcgaccggatcaatgagctggcaaagaaggccaggactccggaggggctgactccggaggagacgcaggagcgggctgccctacgccgggagtatatcgacaccgtggtggggaatctggcacgggaactggataacacctgggtggtggatgagaacggcaacaagcgcaagctgagaaagcggggagaggagaacaaccatgactgacaaggacaacagccagaccggagaatatagctacacctattcttacagctactccaaggagggcggcgagaaaaacgtcgaggtccataccggcggctcctttgccgctacggccggtgaggctgcggccgacagtacgggaaagacaactgccggcgaaagcagcagcggtaaaagcgccaccgggaaaacaacgaccatcaaaagcaccaccggcaagactaccacacgctcccgcagcacgaccaccagctcccgaagcagcaccagctcccgcagtaagaacgacaactctgggccggatgtgggctactggatcatgacggctatttttttcgccaccggcttgtggccggtgggtttgatcatgctgatttccaagctgtcggaccccaagcggcgaaaggctgccgccaagaccgcatccaccacgaccaggaaggccagtgctgccatccagaaggtcacgcagacgccccagtattccgccaagagcgccaagaggatgaagatcgccggtatcctgctgaccatcgtgggcgccgtggcgttcttcaacggcgtggcggataacctgttctggctggaggacggcttccagctgcactatgtgaagtactttttagagggcctgttctatcccacgggcctgctggccggcggcatcggactgctgatcggcagcggctctatgacccgccgtcaccggcgctacgcctcctatctgcggatcgcaggcaagcgcagcagcatctcggtcgccagtctggcccgtgcggcggaggtatccgagcgccgggcggagcgggatctgcaggccatgctggaaaagggcctgtggggcgaggaggcctatctggatctgggccgggggatgctgttccgcagccatgaggcggcggaggatcaggaacggcaggagcggcagcgcgaggctccgcaggtgccgcaggaggcggaggagggctactccgggatgctccgcagcatccgccgctccaacgaccgcatcgcagacccggagctgagccggaagatggatcggctggaggagatcgccgggaagatcctgaagctggtggaggaggaccccgccaagaaaaatcaggcagccaccttcctgaactattacctgcccaccacggagaagctgctggactcctatgccgacttcgaagaggcaggggtcagcggcgagaaccttacccaggcaaaggagaagatccgccgcaccatggacagcatcatggcgggcttcgagcgccagttggacgccctgtatcacgccgacgccatggatgtggacagcgatatccgggtgatggagaccatgctgcgccgggacggcggcagcgtggaggaggactttgggctgggcggtacggcggtggccacgcaggaggatctgtaaaggcgggagatatgttctgcctgcgtcgtctggctgcaccggttccacggcaagaaaggctttttacaagagatcggcatccctgccggtctcttgttctatgtggagatgggttcccaagcaaaaagtctgtcgaagattccgtttgtgccttcggcggtccatgatccttctcttttttgttgtctccgacgggtaactttctgccagtagcagcagaaagt

SEQ ID NO: 12417 - DNA, 1645 bp, Unknown
  gut microbiota DNA sequence
gatcgccacaggcggtgtgagcactggcttcgcaatggcgggctatatttgtgaaggcagctttcagcggtccatgatccttctcttttttgttgtctccgacgggtaactttctgccagtagcagcagaaagtacccaaagggtgccgcttgaagcctaaggtttcaagacttcctcttttgtgtgcaagagttgcatcctgaatcccgccgaagcagggaattggcgtatttctactcacgctgccgctacgtgggcagttgaagaagcctgatgctctaccgtgggggacgaattgccacagccagtgtgagcactggctgtgggaatccctactcccaaccatagacccacacgccccttcgccggagcgggagcggcagcgggtctgttgctgagtcaattccctttacggcccataacgaatgcagcgcttgaagggaaaggaagttttgaaaccatcggtttcaaacggcgttttttgcatactttttgtcgctgttgacaaaaagcatgccgccggaggcaaacaagaaactactgctgggaaaggtgggccgccggaggcacggtccctacaagagaaaagcacccgtcggaacgaaaaagaaaacctgcaaagagggaacggattcccacgaccagcctgcggactggtctcggaatgacgggtttagcatatgagagaattttcagcagcccaataaagcctgtgcctttttgtgtcaatccgttctccacggtagaatggcggccattccggcgaaaagaaaaaatagtgcttgctttttgtcgccggggcgtatataatgggggcaagtcaataaaaggacagagcgtccggcgccttgtgcgtcggcggcggaatcgggtgagaagcccggcgagttggtcactgtgatgcctgctgagacaggataagtcagatacaccgagctctgtgccttggttttgccatcaccgaagccgaatcgtgaaacgctttgcagcttgcacggtcccgcttggatcgtgcttttttgttgtgcaagagcggaagaaaatgattccctgccgtgggcagggggcttttcgtgcggtgccggcagccacaggcccgcatggaacaaaaacgcaagccgaggggcggtcaaaccgtccatttccataagggcaggaggggtttcagccacccctcctgcctccttcttatgtgtgctgtattttttgggcatccgccttcaaaataaatttgtaaaagagaggacaaaagcgaatgaagaaacgcattgtatcgctgcttctgacgctggtgatggtactgtctctggtacccatgagcgtttttgcagcggacaaccacgacggacaggttcatgtcatcgtggagaacaccacctacccggaagccgagggcgctccctgggaagggacactggtggaggaatggatagatctgaatgaagattctaccatgatgggctgtgttgtaaaggcactggaaaagaacggctacgagcagacaggcgccgagaacaactacatcagctctatccaaggtctgggtgcattcgacggcggctccatgtccggctggatgggaaccctgaatgattggttcaccaaccaaggccctgaccttcagcgccggtgagctgtcccccg

SEQ ID NO: 12418 - DNA, 47488 bp, Unknown
  gut microbiota DNA sequence
acacccatgagtataccctgacggtggacaaggggaccgacagcgtgctggtcacccccaccgccagcaacaagaactatcaggtcaggacctatgtgggcgagacggagtataagcgcacggcgatggttcccactgtggacggtaccaccatcaccgtcaagtgcggcgatcccagctggcccaatatgaacaacgacaatgagccggcacaggtctacaccgtcaacgtgaaggtgaagtcggacgacaagcctgttactcccaccaacaccaaggtgctggttcgggcgcaggacggcggcgcatggctgcaccagcccatggtgagtgagcttaccggcggtgaggcggagaagtacggctacaccgacaaggtggagggcgtttccgctctggatgcgctggtggtctcccacgagttgaccttcggcgacgactttaccccggaaaccgccaagaatttcctggaggtcggcagcagcggctttatcaccaagctgtacggcacggagacctatgtctgcggcttctatgtcaacgccggctatcccaatgacggcaccaaggcaccctccggccctggctataatggcaccacggtggtcaacaccaagctcaaggacggcgacaccgtggatttcttcttctatgccgacgatacggcgtattccgactactatacgtggatcgatgtcccggagaccatggtgaccggcgaggccatcactgtgacggtgaagggcttctttgccgtggagggctatcgctataaggatgctgcggagctgaaggccgctgcccggcccctggagggcgtgggtttggcttgggtggacgcggacggctacatcaagcccatcaaggatgttgtgacggatgaggacggtcaggccaccttcaccgtgggcagcgaggccaccggttatctggtggcccagagcggcgacggcgtgtatgctctgatgaatcccagcgactacatccgcaaggtggcgggcaagcccgtggagacgctggggctgaccatccgctctcaggcggacaacgcctatctgcacagcatcagcgaggtgcaggtggccagcaataccgccgagaagtacggcttcaccgacaaggtggagggcgtttctgtgctggatgcgctggtggccgctcacgagatggtttatggggataagtttaccccggcaacggccaagcaatatctggccattgatcccaacaacgattgggagagcaaggtctttggccgtgagaccggcttccacggcttctatatcaacggcgacttccccaccaatgaggcaggcgctgcccggcccaaggtgacggataccaagctgctggacggcgatgtgctggactactttgtgggcagcgacgccgagaaccagaacgactactacacctggctggaggttccggccaccatgacctccggcgaggacatcaccgttaccgtcaagggggtacaggcactggatcccgacgccacgcaggccaatgcccagccgctggagggcgtgggtctggcatggctggatatgaccaccggcaccattaagcccattgacggcgtggtgaccgatgaaaacggcaaggcgaccttcactgtggtggagggtgcggcgaccggttatctggtggccaccaccgccacctatcacacgcatacgacctatgcgctgatgaaccccagtgagcagatcaagatggtcagcggtaatgtccatacggtggagctgaagggcctgcacaacgcacagctgaacagcctgaagctgtacacctacaagaacggcgtgaaggggacgcaggatctgctgtccggcatcagtactatggcagacggctacgggctgaagtacacagcaaagctggcctccggcacctattgggtggagggctacgacgccaacaaggactgcaacggcggcatggagatggtcatcgctgatgataccacctctgtttccgtacagcgtgcctatgagatctatgcccgcaacagcggctgggtggcaggcaccgactacaccatcgactatcagttgaccaccgccgacggcgtgaagcgcactgccacgctgggcagcggcaccgtttacggcaacctccgcaccacgggtatcttcgtggagacggataccgtgacggtgaacctggtcccctccgaggagcacactgcaaattacaacgttggcaccaagaccgttgtcacgaaggtgggcggcggcgctcagtccttcgccatctccgtacccaaggcctttactgtgaaggtgacggctcctgccggctctaccgtcagcgtgggtaccttcggcaactactatacctatgagttcctccgtccgcaggaggacagcaccgccaccaaggacggcgacaccgtcaccgtgacctatcgggcgccggagaccaacctgaaccacttcgtgcgggtgcagaatcccgacggcgtgacctattgggacttcaacaagtggaccgccgatcaggatatcgtcgtgacccgtgccgatctgcatatggacgacgatttcaacaaggataccgtcagccggttcgataagaatacctacgatctgggcaatgtgtatctgaacatcaactccaagggctacatgaacatgaacgccggcgacacctatgaactggatgtgttccgtaactggcaggccattgagggcttcatcaacgccaagatcgccctgccggatgcccactacgaggtggtggacttcgacggcaagcccagcgacgtggtgagcatcgctcccaatgccgacaacagctgcctggcctatatgaccgccaaccatcagggtacggcgctggtgaaggtcacctacgacgccatgacccataagcagggccagagcagcaccgccgacaagactttctccgccatctggccggagttcaccggtgtgtttgtggtatccgtgggcgctgacggtaccgccatccagaccaatatgctcatggatcgtatggatgccgccgtcaccaaggacgagcagaagcagctggatgccgagcacgacatcctgttctatctgggcaccgacggcgccagctataccttcactccggagagcggctgcaccgttaccgtggcccgctccaccgtgggtaagaccatgaccttcaacggctttacctctcagggtgtcaccgtggacgccgagaccggcgccgtgacggtggcgaacctcaccaccggccgccatatcgtccgggtagagaaggacggcgtggccacctatcaggtcatcaccgcccgtggcgtcagctacaagctgctggacgccgagggcaatgagctgccggagaatgccgaggtcaagcccggcgagacggtgcagctgcagttcactgggctggtgagccccaaggagaagatgtcgggtgtgtataaccacaacttctccctgtactataccgacggcgacggtaactccttcaagtccaatcccggcggtggctatggcgtgtatgacttcagcggcaatcccgcccgtcagcgcatctccatcaccgttccggcggatcaggagggcctgacctatgagctgaccggcgccatcaaggtgggcggcttcgccggcaagcccacccatcgtatcgtgacctacgccaagggcatggggatgcagtacggtaccaccaccgccaacgtgctggcccagctgcctcaggtgaccttgaagctgtccggctatgccgccgacgctgtggagaagctgatcgatgctatcggtacggtgaccctcaacagcgaggaggctatcaaggctgcccgtgatgcctacgatgctctgaccgaggagcagaaggctcaggtggggaactaccagaccctgctggacgccgaggccaagctggctgacctgcaggctgccgacgctgtggagaagctgatcgatgccatcggcacggtgacgctggacagcgaggaggctatcaaggctgcccgtggtgcttatgatgctctgaccgaggagcagaaggctcaggtgggcaactaccagactctgctggacgccgaggcgaagctggcccagctgaagaaggatgctgaaaagccctctcagccggagcagcccgcaaagcccagtgaggatgccaacaagcccgctaccggcgatgccggtgtggcgctgtggctgacggtcatgtgcatgacctctctgctgggcgctgctctggtgggcaagaagcgcaaggcgtaacctaaagcaaataagaagtccccggccagtggccggggacttcttgctgcatgggtaagtaaaagggtataagaaaagacggcatctgcatttggacagatgccgtcttttggagcttgtggccggactcgaaccggcgacctgctcattacgagtgagctgctctaccaactgagccacacaagcaaaataggagggtgggctgtatactgcaccgcacgcaggacacagccacgcatcgtattgtgccacattttctgggatttgtcaactaaaaattccggggtgaataatacataacgtaatcggcaccaaagttttgcgacaaaagaaaccccggtgcgtacagaatccacaaagcccgtccaaaacaccccaaaagcccctttggaaaatggtgcggaaaagaggagagaatccatgaaaaaccggacttttttacacggcgacaggatgggggaggattcgcctgagttttacataattcatttgtaaataaacctttacaaagagttattcacattatccacagacttttccacaccgggaaaaaccttgtcggaaaaaggttttccacattatgcaccggtttttccacagggcgcaaacgcagttttacaccggaacagaaaggtgaatataatttacataatgtaaaaatgtaaaggcgtttttcctgtgagtagacggggagttaccataacttggagagagccgaaaagaaggggagcggccatacagaggtcgctccctttcgtgcaattttatccacggtccagatcccgtgtggcgtaggcgttcagggaaagatccgccgtatgtcccgccagatactcatagtagccctgtgcgccgatcatagccccgttatcaccgcacagccgcagaggcggcaggtacagccggcagcccgcctgacggcaggcccgctccagatcgccccggatgatggagttggcggccacgcctccggcggccacgatggtgcgtcggccggtgcggcgggcggcctccatggcacgggggaccagctcgtcgctgacggcctgagtgaagtcacgggccagcgccgcagcatccagaggctcgcccttttgctgggcattgtgggccagattcaccaccgccgttttcaggcccgaaaagctcatatccagttccgctccctccacatggacacgaggcagggtatacttgccgccgggggactgctgggccagagcatccatgggcttgccgccggggtagggcaggcccagcacacgggccgccttgtcgaagcactcaccggcagcgtcgtcccgtgtggcccctaagatcgccatgtccgtatagtcccggacatccacgatgagggtgttgccgccggagatggccagcgccagaaagggcggctccagctccgggaaggccagatagttggcggcgatgtggccgcggacgtggtggaccgggatcagcggcacgtccagcgcataggccacggacttggcgaagctgacccccaccagcacggcgccgatgaggccgggggcataggtgacggccacggcgtccacgccgctcttggtgagcccggcatcggacagcgcctgatccgtcaggccggcaatggcctccacgtgcttgcgggaggcgatctccggcacgacgccgccgtagagagcgtgcatatccgcctgagagaggatggcgtcggagaggaccgtgcggccgtcccgcaccactgccacggcagtctcgtcgcaggaggattcaaaggccagaatgttcattgtgccgcctcctcgtcaaaacgccgggtgaggatcagagcgtcctccttggggaggtcatagtagttcttgcggcggccagcctcctgaaagtcgaagccctgatacagggcgatggcggcggcattggaggggcgtacctccaacgtcagaaaggccagatggttggcctcagcgaagttgagaaagacctgcagcagctgcccggcgatgccacggcggcgctgctccgggaacaccgccacgttggtgatatagccctcgtcggcagccaccagcagtcccgcatagcccagcacgtcgccggtgacggcgtcctccgccaccagaaaggcagcgcactggttttccagctcctccgccagcatcttccgggaccaggggcgggagaagcagatgcgctccagtcgctccagcgactccagatggtcggcgttcatgggtacgatcttgatgttgttcataggatgacctcgatatctgtcaaattattcagcccttggcggagagccagtcggggccgctgtgggcatcggcgggcagggggacggacagctgggcgacaccctgcatttcctcctgcaggagggcttcgacacggggggcctccgctgccggacactccacgatgagttcatcgtggacctgcatgatgagccgggcggccagaccctcgttggagagccgatgctccacccggatcatggccagcttcatgatgtccgccgccgtaccctgaatgggcatattcagcgccacccgctccccaaaggagcggaggttgaagttggagctcttcagctccggcagcgcccgacgccgcccgaagagagtggcgacgtagccctgctgccgggcctgctccaccacctccgtcatataccggcggacgccggtgtaggtggcgaagtagcgctccatatactccttggcctcggccacggtgacaccgatgtcctgagacagggagaagggggagatgccgtagacgatgccgaagttcacggccttggcccgtgaacgcatctggtgagtcacctcctccggcggtacgtggaacaccttggaggcggtgagggtatggaagtcctccccggaacggaaggcctgctgcatcacctcgtcgccggagatgtgggccagcagccgcagttcgatctgggagtagtcggcatccaccagcaggttccccggcgccgccacgaacatccggcgcatctggctgcccagctccgtgcgggtggggatgttctggaggttgggctccgtggaggacaggcggccggtggccgttaccgtcatctggaagctggtgcggatgcggccgtcggcgtcgatgaccttcagcaggccgtcggcataggtgcttttcagcttgctgtactgccggtattccaatacgtccgccacaatggggtgctgccagcggagcttttccagcacgtcggcgttggtggaccagccggttttggttttcttgccgtggggcagctggagatcctcgaagagcaccttgcccagctgcttgggggagttgatgttgaagggagccccggcggcgtcatagacccgctgctccagccggcggatggtgccggtgaggctctcgccgaagtccgacagcgccttggcgtccaccagaaagccccgctgctccatccgggccagtaccgggcagagaggcagctctacggtatgatacagctccttcatgcccagctcctccagcttggggggcagggtctcatacagggcctccacggcggagcagtagctgtggagagccgcccacgccgaagcggtatccgccagcggggcaaaggcatccggctccagatgcaggggcttgggcagctcttcattatagtaggtcacgaacagccgctggaggtcgtagcttccggcggtggcatccagcagataggcggccagcgccgtgtcaaacaggtagccgtcggtgggaagctcctgttccagtagggagcgcatggtatccttgatgtggtgaccgacttttcggatatcggcggagaacagggcggtcagcagggcgtgccagtcgccggtatagcggttctggtccagctcggctgcggcggaggtgtgcgctccggtatcccactggacggagaggacggagaggtccggcagggcgtagacggtcacatgatccgcctgacgccactgggccagcagggcctgagcctgctgctctgtcgccagcgactccacggtgacggtgcgctccggggcggcctcggtgtcccggtggggggtgaggccgtaccggtcgatgagcttctgaaactccagcttcagcagcaggtcatagagctccggggcaaaggggcggcggaggttgtcctccggggtgaagttcagcggggtatcggtgacaatggtggccagataccgggagtgctcggcgctctccctgccctcctgcagctttttgatgacgccgggcttggcgtcgatctccggcagcaggcggtacagctccgccacggaatgatactgctgcaccagtgccatggcggtcttttcccccacgccggggacgccggggatgttgtcggaggcgtcgcccatgagggccttcaggtcgatcatgtggatgggggcgaagccgtactgctcccggaaggtctcctccgtcatgtccttggtggtggtctggcccatgcgggtggacaccagcttcaccttggtgtggggggtgatgagctggagactgtccttatcgccggtgacgatgacgcagtcccagccggccgcctcgcagcggcggctgatggtgccgatgagatcgtcggcctcgtagccggtgaggtcgtactgggggatgttcatggcggagagcacctgcttcagatacggcagctgcatggccagctcctccggcatccccttgcgctgggccttgtagcgttcatccgcctgatggcggaaggtgggctcccggcggtcgaaggtgacgcacagcgcctccggctgctcctcgtccagcagccgctggagggtggtgagaaagccatagatcgcatgggtatacagcccgtcccgtgtggacagggggcggatgccataataggcccggttgacgatgctgttgccgtcgatgaccatcagtttcatggagggtcctccttatacttcctaacatactccacttcattatacgccagtttcgcccataaaacaacctccgccgtggagcgggacagaggttttccggtattttgcatggaatggggcggaaaagagggagaatttgtttttcctctttctttttccggcgaaatgcgctataatctatatttgactgaaatttgaccggaaggggtatgtagatatgtccgcagagctgttacagctgctcaacggcgttcagaccatgtccatcgtgggaatgtgcaagaatgccggaaaaaccaccatgctcaactggatgctgcaccacgaccgcctgcaggggacgctgggcctgacctccatcggccgggacggcgagtccaccgacgtggtcaccggcacggagaagcccggcatcttcgtacgggaggggactctcatcgccaccgccaaggatatgctgcggctgggggacaccacgctggagatcatggagaccaccggcatccccacaccgctgggggaggtggtgatcttccgggcccgcagcgacggcaatgtccagctggcagggccgtccatcaccacgcagctcaaggaggtctcccggctgttcttcgagatgggggccgacaagtccatcatcgacggcgctctgggccgcaagtctctgggcgcacgggctgtggcggagggggtcatcctctgcaccggggcctcataccacatgagcatcgacaaggtcgtggccgacaccgcccacgtgtaccggctgatgaatctgcccaaggcggagaccatgcccccggagatggaggagagtctggagaagtgcctgaaggatcacggcgaggccctgatctccggggcgctgacggataccatggtgatgcccctgctgcgctccggcgtgctgcggaatacccggctggtggtgaaggaccccagcaaggtactgctgagcagcgatgcgctggataagctccagacccgtcaggtgcggctggagacggaggaggccgcccggaccctgtgcgtcaccatcaacccggtgtccgcctacggctggaagttcgacaaggatgaatttatgacccggatgcgggaggcggtggacgtccccgtcatcaatgtgaaggaggagctgacatgatcaatattcgctttgaagagagggaaaaaatcggcttgcagtatgcgctggagactctccacgggtgcagccccttcggtcaggagaagatccgcaagctgcgctactactcccccgacgagcgggaggagctggagacggagctgtataacgtggagcaggccgccaaggcggcggatgccctgaagcccctgtacgacaggatcgggctgatgctgtgccagatgaaggacatccgtggctctctgcgccggtgccaggcgctggagatcccggatcatgtggagctgtttgaaatcaaggtatatctccagcggctggagagcctgatccccctgttccagcaggtgtgccagactacccactttaaggcgctggccttccatgatccggcgcaggcgctggagatcctggatccggacaagacccgcagccgtggcttctacatccccgacaatgcaacgcccaagctgagggagatccgtgcggccaagaagcagatcgaggagcagctgcaccatgcacagaccgatgccgagaaggaggagctgcgctcccgccggacccgtgtctgtgccgaggaggacagcgaggagaccaaggtgcgccgcagcatggggcaggcgctggctccgctggcaggagatctgctggaggacgccgacacggcgggccggctggacttcatcatccagaaggcgctgtttgccgtgcgctacggcggcgtgcggccggagatcacggagacggagctggagctgacggacatgatcaaccccgagctgtgcgacctgctggagcagaaggggcggtccttcgtgccggtgtccatccggctggagcagggggccaccgtcatcaccggcgccaacatgggcggtaagtccgtggtgatgaaaaccgtggccctgaacgtgctgcttttgcaggcgggctttctggtctgcgccagggaggcccggatgccgctgttttacagcgtgaagatgctctttgacgacttgcagtccatccagtcgggcctgtccggcttcggctcggagatcgtgcagttccagaaggcgctggaggaggtggagcagggctactccctgttcctgctggatgagttcgcacggggcaccaaccccgacgagggcgccgtcatcgtgcaggcagtgaccaaatacctcaacgaggtgaatgccatctccctgctgaccacccactacgacaaggtggcagagaacgcccggctgcactatcagatcatcggactgcgggacgtggatccggagcagatccggcaggagctggcggctaccggcgacgacggcattcaggtcatcgcacggcacatgaactacggcctgtaccgggtggaggggaagtccgactgccccagagacgccctgaacatctgccggatgctgtcgctgaagccggagatcctggagaagatcgagcaggcgtattaagccgccggaggctctctgcggtggttggccgctactgcgtgcggcgtctgtggggcggtatgcgctgccggagggcggcagaattggaagaatgaccggcgaaggcgggggagcggatacgccccccccgctttcgctgtattcgtgggatatcgctttgtgcataacccatagaaaacgatgcagaaattttatctcatgcacaaaaaatctctgtcttttttgtcacaatgccaccttgacaaagccccggcggagacgatataatgagaatcgtagaagttcataccgcaatcaatagaggtgcgggggacagggtactgcttcgtgaggacagacactcgcagagcggggcaggaaggggtccttcgccgaaagggcatgacgggtctgatgtcatggccttggggtcggggtgtaagcgccggcactgtcatgtcgaaagacgtggagcgctattggtcagccttgaccgatagcgctctttttatgcccgaaagagcggtatggccacagcggcggaacttcatgaaaacgacccaaatttatgaaggaggaaaaacttatggaaaagatcacttctaccctgcggctgcgtatgagcgcaaaggatgctcactacggcggaaatctggtggacggcgcacacatggtgcatctgttcggtgacgtggccaccgagctgctcatcaagtgcgacggcgatgagggcctgttctgcgcttacgacatggtggagttcaaggctcccgtgtacgccggcgactacattgaggcctatggcgagatcgagaagatcggcaacacctcccgcaccatgcgcttcgaggcccgcaaggtcgtcgttgcccgcaccgatatcagcgcttccgctgctgacgagctggacgagcccatcgttgtctgcgtggctcacggcacctgcgtgacccccaaggactgccagcgcaagaagatcgagaagtaagggagcggcaagatggagaagctgattattactgctgctatctgcggcgctgaggtcaccaaggagcagaaccccgctgtgccctacactgtggaggagatggtccgtgaggccaagtccgcctacgaggccggtgcagccatcctgcacatccatgtccgtgaggacgacggcacgcccactcagggccgtgagcgcttccgtgtggtgatggatgccatccgcaaggaactgcccgatgtcatcatgatcccctccaccggcggcgctgccggtatgaccccggaggagcgtctgcagcccaccgagctgttccccgagatggccactctggactgcggcacctgcaacttcggcgacgagattttcgacaacaccatgcccaccatgcgtgccttcggcaagcgtatgctggagaacaacatcaagcctgagtacgagtgcttcgagctgggccacattgacaccatccttggcatggccaagaagggtgaggtgcctgcccatcccatgcagttcaacttcgtgctgggcgtccacggctgcactcccgcaaccgtggagaatctggctttcttcgccagcaagatccccgctggctccacctggaccgtgtccggcgtgggtcgttccgcctggaccatggctgctgcggccatcgccatgggcggcaacgtccgtgtgggcttcgaggataacatctatctgggcaagggccagaaggctgcttccaatggcgaactggtggctaaggtcgtccgcattgccaaggagctgggccgtgagatcgccactcccgctgaggctcgtgagatcctgagcctcaagcccctgaagtaaaaacaactctttcatttatacatttatttaggaggaaaaatattatggcagagctgaaaggcaacaagtacggtactcatcgtgttatcgagcccaagggcgttctgacccaggctgcttggaaggtcgataacgatatgtccaaggtctactccaacgagatcgtctgcgacgtgacctccctgaacatcgactccgcttccttcactcagatcgctgaggcttgcggcggcgacgagaagaagatcggcgagatgatcctgggcatcgttgctgagcgtggtaagcagcagaatcccgtgaccggttccggcggtatgttcaagggcgttgtctcccacatcggtgaggatctgaagaagaagcccggcttcgacctgaaggagggcgacaagatcgtctccctggtgtccctgtccatgaccccgctgcgcatcgacaagatcctggccatccacaaggatatcgaccgtgtggacatcgagggcaaggctatcctgttcgagtccgctctgtatgccaagatgcccgaggatatgtccgagcctctggctctggctgctctggacgtggccggcgctcccgctcaggctcgcaagctgccccacgagggtgacagcgtcctgatcctgggcgccaacggcaagtccggcgtgctgtgcggctgggaggccatgaagaaggtcggccccaagggcaaggtcgtgggcgttgtccgtaaccccaagcaggttcccggtctgctggagctgggcgtgtacaccgacgtgatcgtcgccgactgcaccaagcccgttgaggtcatggaggctgctctggctgccaacgacggcaaggagtatgatctgtccatctgctgcgtgaacatcgagtcctgcgagatgtccgccatcctgcctgtccgtgatgacggcgtggtgtacttcttctccatggctacctccttcaccaaggctgctctgggcgctgagggtatcggcaaggatgtcaccatgatcatcggcaacggctacaccaagaaccacgccaacatcactctggatgttctgcgtgagaatcccaagctgcgcaagctgttcgacgagaagtactgctaaactgcgatgatgtgctctacctacaggggccttcgggctcctgtaggtaagcatcttattcggagccccctgccttcgggagatccgaacgctgcgtgcggcttgaggaggcggtacgcagagttgaggagaaatggaaaatgcgtggagcaccacgcaggttaaataacggtgtgcagaggtctggcccgttgaggagcgggaaggacgctgctggccggaacagtcgcccgtgcgcccagtgcgacgggaaaagctaaccgatatttttaatatttgaaggagaaaacgaatatgaagactcgcaatggtctgttcgctgacgttcccgaaaatctgtggaatgactggcattggcaggtcgccaatcgtgctgagacgattgaggatctgaagaagtacatgaacctgacccccgatgaggaggccggtgttgccaagacgctgggcaagctgcgtatggcagttactccttattacctgtccctgatcgatctggacgacccgttcgatcccatccgtaagatggctatcccccgcgctgaggagctggagtatgccgattacgaggatgccgatcctctgcacgaggataccgactcccccacccccggcctgacccatcgttatcccgaccgtgtgctgctgctgatcaccgaccagtgctccatgtactgccgtcactgcacccgtcgtcgtttcgccggccagaatgactgcgaagtgcctatggctcagatcgacaagtgcatcgactacgtggccgctcatcctgaggtccgtgacgtgctgctgtccggcggtgactccctgatggtctccgacgagacgctggagtacatcatcaagcgtgtgcgtgccattcctcacgtggagatcgtccgtctgggctcccgtacccccgtggtgtgcccccagcgtatcactcccgagctgtgcgccatgctgaaaaagtatcatcctgtgtggctgaacactcacttcaacacgcccaaggagttcactcccgaagccgccaaggcctgcgccatgctggccgatgccggtattcctctgggcaaccagtccgtgctgctggccggtgtcaacgactgctctcacgtcatgatggagctggttcacggcctggtcaagatgcgtgtgcgtccttactacatctacgcctgcgatccttccctgggtctgagccacttccgtactcccgtgtccaagggcatcgagatcatggaagctctgcgtggtcatacctccggctattgcgtgcccaccttcgtggtggatgctcccggcggcggcggcaagactcctgtcatgcccaactacctgatctccgagactccccgcaaggttatcctgcgtaacttcgagggcgttatcacctcctacactcagcctgagcactatgttcaggattgccactgcgatgtctgcatgggcaagaagaaggctgagaagaccggtgtggcatgggtcgccgagggcaccaagcagcgttatctggagcccaccaagctgctgcgtaacgagcgtcacgtcaagaaataagaggtaaaaatatggaaagcaaactcggcttgaatatggagctggtcaatcaggcccgtcagtctgccgccaaggtggccgacgacgttcaggtctttatcgaccagcacactacggtcaccgttgagcgtgccgtctgccgtctgctgggtgtcgatggcgtcaacgatatggacgtccccatgcccaacgtggtggtggatcatctgctggcagtttccctgctccctgcaggcgctgcttgggcgatcggcaatgctatggtagagaccggcaaggatcctcaggctgtggctgaggccgtcgacagtggtgagctggatctgtccaaggttcccgctcactctgacgaggagatccgtgccgtgattgaccccgtggttcgtgcaacggtggagcgcatcaacaaaaacgttgccaagcgcaacgcttacctgaaggagtggggcgacagagaaggtccctacctgtacatcatcgtggctaccggtaacatctacgaggatatcatccaggccaaggccggcgccaagcagggcgcagatatcatcgccgtgatccgtaccaccggtcagtccctgctggactatgtgccttacggcgctaccaccgagggcttcggcggcacttacgccacccaggagaacttccgcctgatgcgtgcggctctggacgaagtgggcgaggagcagcaccgctatatccggctgtgcaactactgctccggtctgtgtatgcctgagatcgctgccatgggcgctctggagcgtctggatgtcatgctgaacgatgctctgtacggcattctgttccgtgatatcaatatgcagcgcaccatcgtggaccagttcttctcccgtgttatcaacggctatgccggcgttatcatcaacaccggtgaggacaactatctgaccaccgacgacgctatcaccagcgctcacacggtgctggcttcccagttcctgaacgaagccttcgccaagaccgccggtatgcgtgaggagcagatgggtctgggccacgcatttgagatggatcccgccgtggaggataccttcctgtacgagctggctcaggctcagatggcccgtgagatcttccccaatgcgccgctgaagtatatgcctcccacgaagttcatgaccggcaacatcttccgtggccacatccaggatgccctgttcaacatggtcaccatcctgaccggccagaagctgtgcctgctgggcatgatgaccgaggctatccacactccgttcatgtccgaccgtgctctgtcgatcgagaatgctcagtatatcttccgtaccatgaaggatctgggcagcgagctgacctataaagagaacggtatcatccgcaaccgtgccaacgaggtgctgaccaaggccaccgatctgctgaaggagatcgagaagctgggcctgttcaccaccatcgagaagggtatcttcgccgatgttaagcgtcccaaggacggcggcaagggcctggccggtgttgtggtcaaggacgacaaatacttcaaccccttcgttgaggtcatgaaaggtaaggtggcggcagaatgagcagcggactgtataatacccacaaaatcgacttcgataccacgctggacctgacccgcctgaagccttacggcgataccatgaacgacggtaaggtgcagaccagcttcaccctgcccatcaaggacgatgagcgtggtgaggaggctgcccgccagatcgccaagaagatgggtctggaggagcccaacgtggcctatcacgcccctctggacaaggagttcaccttctacgtggtgtacggcagctgtgtccactccgtcaactacgaggatatccacgtgatcaccgtggagtccgacgtcatgagcatggaggacaccaacgactacatccgtgagcatatcggccgcaaggtcgttatggtgggtgcttccaccggcaccgacgcccacaccgtgggcatcgacgccatcatgaaccgtaagggcttcgccggccactatggtctggagcgttacgagatgatcgaggcttacaaccttggctctcaggtccccaatgaggacttcatcaagaaggctctggagctgcacgccgatgttctgctggtctcccagaccgttacgcagaaggacgttcacatccagaacctcaccaacctcattgagcttctggaggccgagggcctgcgtgacaagtttgtcgtctgctgcggtggtcctcgtatcacccacgagctggctaaggagctgggctatgatgccggcttcggtgccggtaagtacgccgacgacgtggcttccttcgctgtgaccgagatggtcaagcggggcatgaagtaaatccaacctgtgcagacggtcatggggcatagtccccatgaccgtctgatgcggcatagcgccgttttccggtattttttcctgcacgttctcttgcaattttcaccttcatgtgttatgatattaaggtgtgataaaattttgacgattttagagaacgaaaataaacaaggaggaactgaaatggcaaagaaacctgttatcactgccaaagaggcagcggcaatgatccccgatggcgccaccattatgtgcggcggcttcctggcctgcggtcaggcccgggcgatcgtgaaggagctggtggctcgcggtaccaaggatctgaccctcatcgccaacgatatggcccgtgcggtgggccccaagggtgaggagttcttcggcattgccgagctgatccacaatcatcaggtcaagcgtgtgatcgctacccacgtgggcatgactcccgaggtgggccagcagaacaccgagggtactctggaggtcaatctgctgccccagggtactctggccgagtgcatccgtgccggcggcgccggtctgggcggcgtcctgacccccgtgggcgtcgacactctggtggaggacagccccttctgcctgggccgtcagaccatcgacggcaaggattatctgctgatgaagcccatccacgccgacttcgccctgctgggcacttacaagtgcgacgagtacggcaactgctggtacaagggtaccatgcggaacttcaacgtggtcatggctaccgccgctgacaccgttatcgctgagaccgagtatctggttcccgtgggcgagatcgagcccgagaacgttcatacctatggtatgtgcgtgaactacatcgtggaaggagatagaaagtaatggaaaagtccgagatcaaaggctttatcgccaagcgctgcgccaaagaactgaagaacggcgatgtcgtcaatctgggcatcggcctgcccaccttgatccccaactacctgcccaaggatgtggagctgatcatccacgctgagctgggtatcgtttctgccggcgctacccccaaagagggcgacgccaactatgatccctaccacgtcatcgatgccggcggcggcgttgcttccgtggcttacggcggcggcttcatcgattccgctaccaatttcggcctgattcgcggcggccatgtggacgcctgcttcctgggcgctctggaggtggatgcccagggcaatctggccaactggatcatccccggcaagaagatgcccggcatgggcggcgctatggacctgtgcgtgggtgctaagcactgcatcgtctgcatggagcacaccgccaagggcaaccccaagatcttcgagaagtgccgtctgcccctgaccgcttcccactgcgtcaacaagatcatcaccgagatgtgcgtgctggaagtgaccgacaagggtctgctcatgaccgagatcaaccccgagttcaccgtggagcaggtgcaggccgctaccgctgcccccatcactgtctctgagaacctgaagagcatggtggactaagtctccgcatcgggaataaaatgtgcaaaaagacacggcagagttctgccgtgtcttttctcatgccggggcgtgctgatacaggcaaggagggccggatatgaagctccacatcatcggcggcagcgggaaaacgtgtctggcccggcggctggcacaggaatatgacattcctcatgtggagttggacgagctgcagtgggacagcggtgccacgttgctgcggggtctgcggtagctcttgaatttgttcacatccagcatggcctgtacccgcacccaatcgccgcctgcgatgatgccgggatgcttgcccaccgccacgatccattcctccatggggcggatctggtttgccttgccggggcgctggagcgagcggttgtacaccatgatgccgtgctcaccgtcgaattctgcgcactcggcaaagtcgccgatgttgcggctgatgcggtcgaggcggtagaccacgatggcggcaaaggcgatcttctgggaatccttcatcattttcttgaactgcgggcgctccagattgccgccggaaaagtcctcgtagaccagcacgttttccgccgcttcctcgccaaagtgcatggcgatgtactggcggcacctcgcatgatgttgtatcgttaggctgataggcatattatatcggattggaatccgcttgaaaaggcaccaagggaagaatctgaaaaatgttgtatatccggctcggctgggatgtttttgcagaataagccaataacacagcagccctcacggttatgccgtgagggctgctgtgcagctatatgtcctcaggcttggaaatggccgcaaaggactttttttcattttgttcatcaagggagaggatgcgcacctccaggccggtaatataattatccgggtgtccctcgcagcactgatccacgatattgggggtgatcacacagtcatccaccggtagcttccggcggtaagcttcaccaaacaggcggtcgatggagtcctgaatggtgagatacggtccgtagtgatagccgcagagatagtccccggcaggaatataggaaacaggctggtcggccatcaaatccggcaggcggcgggcctcgtcgggagtgtcttcatagagataggcgccgaaccattttcgctgtccctgataaaagcctacggtgggatagaagtaaaacagctcatgggtaaaaaggttgatttcctcgccgatgtgcagaaaggcgcgacgcgggaaggtgcggacatagaatttatcccgctggctgaccgcctgttccctctcgataaactccaccttctgctggatgatttggatggtggcattcagctcatcgcattgacggcgcagctgctgcgcctgctgggagagcatttgcaggttatcacgaagaccgttgctgtggagaaaagccttgatctgggcaagggagtagtccagtcgccgcaggtatcggatcgtggccaagggatagacctgatcgaaatggtaaaaacggcggttgttttcgctgttgcgcacctgcggcaccagcagacccttggtatcataatggcgcagcagttggacatccatgttgaatatgttggcaagctccccgatcgtcaagaattctttcataaaacctcccattttcccgctatgtaacgctaggattttgtaagaacactagaaaatccagaaaagtcaaaattagggcttgaacctataaccgttataggttgtaaggtaagtatatcatttacgaagcaacttgacaagtatctggatggagggatctcatgcaaacctatttgaagaacggttacatcgtctccatggatcagcaggacaccgtttttgacggtggcggcgtgctggtggaggatgaccgcattacggcggttggtaaggtagaccccaggctggtgaagcccgacgcagaggtcattgacctgcagggcaagtatgtactgcccgggtttgtgaacactcacgtacacacctcccagcagatttcccgcggagtgggcgatgatgttgatttcatctgctggcttcatgaccggatgtggccctttgagagcaacatgacggaggaggactcttatgtatccacgctgatgaccagtctggagctgattcgctccggcgtgacctcctttgcagagcccggcggacagtttgtttccggcatggcccgcggtacggcggaatccggtctgcgcggtaagctggccaaatctgtgatggactgcggcgagggactgccggaaatctggcagcgcaccatggagcaggaactggagcagcaggtggtggatctggaaaaataccacaacacggctgacggaagggtgcaggtatggttcggcctgcgcaccattttcaacaacaccgatgagctgtgcgtccgcaccaaggaactggcggataaatacggtgtcggcatccacatgcatgtggctgaggccaaggaggaaaaagaatatacctatgcccgctggggtgagggtacggtgaagcatctggagcggctgggtgtactggataagaatttgctggccgttcacacagtatggctgacggacgaggaactggaactattcaagaagcgggaggtaaaggtttctcacaacccggcttccgccatgcgtgtgctgggctttgcccggatcccgaagatgctggctatgggactgaggccctccatcggcacggacggcgcttcttcctccaatcacatggacatggtggacgagatgtggctgaccagcctgattcacaagggctggcgtctggaccccacggtcgttccctcacaggatattctgcggatggccaccaagtggggttcccgtgcgctgctggacgaagacctgtatggcagtctggaatgcggcaagaaggcggatctgatcgtcattgacccccacggcccgtctatgatgccagtgaatgacaaaatcgccgcactggtgacggccatgcattcggccaacatccagtccaccatgtgtgacggcaagtggctgatgcgggaccggaagatcctgacgctggacgaggaggccattctgaaggaggcctgcgaccgggcaaaagccatctacaagcgggcgggcattgagctgccggatcgcttcccggtggtgaaggtttaaaggtttttaccggtgcgaggcaccagaacatagaagaaacagcagcaagcggaattttgtgtttagtatggaggtacagcatgaatcagaaattactgtccgttgcgaaaggggagactccggccgatctggtgatccggaacggcaaggtagtcaatgtttattccggtgagatttacgacggcggcgtggccatctgtggcgacaccattgcggccgtgggcgatgtggaatactgcatcggtgaaggcacccgggtggtggatgcggaaggaaagtatctgacccctggctttttggacgggcatatccatccggaaagctcgtcactggcaatccgtccctttgccgaagcggtgctggcacacggcaccacaggcatcatgacagacctgcatgaggtgggcgtggtgtccgggttggagggcatcgaggccatcctgaaagaggcggaggccacagacctgaaaatctatttcgtggtgccgtcccatgtgccgttttctcccaatctggagaccagcggcggacgctttaacccggagatcatccgcaaggcactgaagcgtccggatgcggtgggactgtccgagtgtgtcggtccctatatcacggccggttttcccgatctgctggagtcctttgacgcaacgctgtcgatgcccggcaagacgctgcagggccatctgccggatatgtacggcccggctatgagcgcctgcatcgccgccggcgtatccaccgaccacgagtccttctgcgaaaaggatgtgtttgagcggttgcgcaacggctgccacctgatgatgcgcgagggcagcgctgcgcggaatatgccggtactgctgaagaccgtgatggaaaatcatctggacaccgctatggtcagcatcgttaccgacgacctgcacacggtggacctgcaggagcggggccatctggacgattctctgcgcacggcgctggacatgggactggactttgtcaaggctattcagatggttaccgtcaactgcgcacgggcgttcaatctggatcgggagatcggcggactggcccccggacgccgggcggacatcaatattaccaccggcccggaggatttccgcgtgctgaccacctttgccggcggccgccagattacggacaacggcaagctgttggtacactatgagacggcagagcatgagccctgtgtgctgaacaccatgcatctgaagaaccccatcacggcagacagcttcaagatccatgcccctgcaggcgccaagaaggtgaaggcgctggtgatggatacgctgccctacatgcccttcaccaatcgccgggatgtggagctgccggtggtagacggcgtggtgcagtgcgatgtggagcaggatgtgctgtacattgcacaggtagagcgccatggcaagaacggaaatgtgggcaaggcctttatgggcggcttccatatccggggcggcgcaatggcttcctccgtgggccacgacaaccacaacatcattgtcatgggcgacagctttgaagacatggcgctggcggtgaaccgctgcgtggagctgggcggcggacaggtgatcgtccgggacggcaaggtggccgccgaggtggcgtatcccatctgcggcttgctgagcgacctgccgctggaggaactggcggagaagaaaaaggaactgaaccgggtggctcacgaaatgggcacggaaattgccattcccttcatgttcctcagctttatctgtctggcggctatccccgcttacgccattaccgactgcggatttattgatgtggtgcagcagaaggtgatcgaccccattctggaggtcgtggaataaaaccgaattccctgaaaaaccgatttacaaaagagcacagagaggagcaacatgaaaaaagatttttttaagctgaaggatcacggtactaccgtccggcgggaagtgctggcaggtatcaccacctttatgaccatggcctatgtgctggcagtgcagccttcagctatctgtggctttggccccgatccctacatcacggatataaacggcattgtcatcagcaagtcggcgctgctggtgatgtgtgcgctggtcagcggtatcattaccctgtttatgggcctgtatgccaatttgccgctggcactgtctaccgctatgggcagcaacttcattcttggcgggctggtcaacagcggcacggtatccttcggctgggccatggcactgctgctgtgctccggtatcctgttcattctggtgacggttctgggtgtgcggaaaatggtggtggatctgctgccgaaaaacctgaagatcgccataccaaccgccgtgggcttctttattgcctatctgggctttaaaaacaccggccttgccactttcagcgacagcggtctggctttgggcgattttacccagcctgcggtgctgctggccttgatcaccctggcagtgatgggcgtgctgacggcctacaaggtgcgcggcgctattctgatcggcatcattgtcggcaccatcatcagcattcctatgggtgtgtctacgctgcctgctgcgctggtgtccctgccggatatgagcgaaatcggcaatctggtgctgtgctacgacttcaagtccgtgttggctgacatccccggcgcactggtgtggatcttcatcctgtttaccagcgacttctttgctaccttcggcgcactgatcgccgtgggcgcccagaccaatatgctggatgagaatggcaacttcccccagattgaaaagccttttctggtggatgccgttggtacggtggtgggttctggcaccggatgcaccaccatctccaccttcattgaatccaccatcggcgtggaagctggcggtcgcacgggcctgacggcgattgtcagcggagtgctgttcttggtgtgcattttcctgtccccgctgtttttgatgatccccactgccgtgaccggcgtggcgctgatcttcgtgggcttctccatgctgtcgggctttacgaagctggacttctccgacttcaagagttgcttcggccccttcgtgatgattctgttcggcacctttaccggcgacattgctgcggcgatctgcctgggcgtgctgacggacgtgctgatcaaggtgctgacaggcgatgcaaagaaggtacacccggtgctgtatgtgctgtgcatcccgctggtgctgtatttcatcgtgtaaaaaccggataacaacgcaacttcccggcatacccggataagcaggtctgattgtgcggagtagcgcagcgtaagctgcgctactccggtttttattgggatatgtatgcagaacagtaatagatttagcaatcatgggtagtatctcttactaatatcctacaatcattctaccgaaataatttttggcgttcaagaccctgcttgaaatacctctcccgtgtggatttgaagatttgcacgcttccctgttcccatcgatcaatagtccgccacgtcacgctggcgaagtcctttttgataacgataccaccgccgtttgttccactgtaatagtatggctttgccggtgctgatgtcatctgtctgctggacgtgccccggcggaagctgggctgggagccgggacgtcgggagagactggcatccctacgggcgctgctgcgctggacagataagcatcagcgggaaaatatggtggaaatccgctgtctgctggccccatatgaggccgaggcagtagaggagccgccgagggaaaaggcgctgtgacaaagtcgcagcgccttttcctctgttttgagtaggctggcagagaggctctcggctattcgagctggctcggcacgtcctgctccagccagcggtaggtccgcaggatgaggacggcggcaatgaggaaggtcagcacatcggacaccggcatagagtacagaacgccgtccagcccgaagtaaaccggcagcagcagggcaaagcccacgccgaacaccacctcccggatcatggacaggagggcggaggccagcgccttgcccaccgcctgcaggaagatgaagcaggccttgttgacgcaggccagcaccaccatggacaggtagatgcggaaggcttgcagggcgaagtccgtgtaatagctgctctcgttggcggcgccgaagatggcgatgagggatcgggggaagcactccgccaaaagcagagccacagcccccacggaggcctcggctatcagcaggagggagaacagctggcgcacccgcaaacgtttttcagcccccatgttatagcccacgatggggatgcacccggcggccatgcccaccacgatggagatgacgatctggaagaacttcatgacgatgcccaccaccgccatggggatctgggcatactgtgcctgcccgaacaccgggtccagagcgccgtacttccgcagcatattgttgatggcggccatggcggccaccagactgatctgggagaggaagctggtgatgcccagtgtcagcatccgggagcagagcttgccatggagcgggagatcccggcggccggggcggatcaccttcatccggggcagataccagacggccagtcctgccgtgattacctgccctatcacggtggccaccgctgcccccatcatgccccagcggcagacgaagaggaagatgggatccagaaggatgttcaccactgctccggccagcgtggaaatcatggcaaagcggggagcgccgtcggcccggatgacggggttcatggtctgcccgaacatatagaaggggatgcccagcgagatgtagaagaaatactcctgcgaatagcggaaggtctcggcattgacggtgccgccgaacatggccagaatctgatcggcaaacagcaggtacagcgccgtcagaatcagaccgctgcccaccgccagtaccactgcgttgcccacggcccggcgggcatcctcctgccggcccttgcccagcgagatactgacgaaggtgcagcagccgtcaccgatcatgacggcgatggccagcgctaccaccgtcaggggaaagaccaccgtattggcggcgtttccgtaggagcccagatagctggcgttggcgatgaagatctgatccacgatgttgtagagcgcccccaccagcagggagatgacgcaggggatagcggtgcatgagtcgcccggcgggctcggcctccagaaattgtgtgttgtgttccataggtgtatcctctctttcggcgtgataaaatgcgtaagtcccggaaatccggacttacgcatctctgctgcacgatttgcctatggaattccgcaaaaaacgtgcggcgcttctgcaaccggatttacgcagaaacgccacacgttgtaagatgattatatcagatgggaagaagcttttcaaatgtttttgccgctgcccttacgccgccgtatcccggcggaagcggcgcatgaggatcaatgccatggcaaaacacagcagctccgagcagaggggggcgaaccagatgctgctgccgccccagagcgccgccagcaggagcagcgccccggcctgcagcaccagtccccggcccatggagatgcacagggcggagcggggccgctccaccgccgtcaggaagccgcccatgaggatgttgaagcccaccagcagatacgatagagcgtaccgccgcagcgccccggtggaggcggcgttcagcagaggcttctccgagccgaggaagatatgtaccagctgcggggccagcaggaaaataccggcaaagcagaccgccgtcatgatggctacggtgatcaggccgtaccgcagcagccgacggtatttctccgggtccttgcggccgtactggaagctcaccagcggctgggagccctgagacacacccagcatgatgttcaccaccagcgtattggtgtaggcaatgatggtatagctcaccagcccgtcggtgccgatgcagcggaggatcacatggttgaagaggaagatcatcacgccgttgcacagctccgtaacgccgtccgccagtccgatggggatcaggcggcggtagatggagccctccggccggaagcgcaccagatggaaggtggtgtgcttgccaaagaagtgggtgacgtagatgatgcaggtcagcagctggctcaggcctgtggcgaaggcggcaccccatgcgccccagttcagcacaaagatggccacatagtccagcacgcagttggtgaggcagccgatgcacaccgtgagaatggccagcatgggccgcccatcggttttgactaagatctccagattatacgacacgatgaagcaggtggcaaagggggccagtccccgcagatacgacatggtgtagcccagcgtttcctcctccgcccccagcagcagagcaaagggttccagaaagaccagcaccagagcggtgatggtcaggccgatgatcaccagcagcaccagattctgggagaacaggcggttggcgtgctcccggttgccctgccccagatagatggagaggatggtgctggtgcctacggcgaaggtgacggcgatggagaacatgacgttggtgaaggggacggccagattcaccgccgccatggcgtagtcccccacgcccttggccacgaacaggccgtccacgatggagtacagggaaaagaccatgagggaggccacggtggccgaggagaagcgtagaaactgtgccagcagactgcgctgatcttgcattttcgatgagattcctttccattcagcggcgtaccgcatatatcccgccgcagcggttgtaccgtctattatagccgaaattttccgttcggtcaagacgggggcgcctacatcccacagcagaatacggcaaaatgtacaggaggtgcggtgcgtccattggagattttgtgcgatggggacagcgtcctccgttcaggaaacgtgaaggatgcggcggagacgaaaagagggacgccctgacgggcgtccctctcaagactgccgaaaaacccttcggttttttcggcaaaagcattgcagtctgctgcgcgcataatttgtgtgccataggcgcacaaattccacacttgcagcctgagaagtattttctctcacgcacatgtcgcaagagaaaatgattttacttctttgccgcctgcgggcggcaaactctgcgaggcttttttgatacactgaagagggacgccctgacgggcgtccctcgatgtaggaaaaagtgaacagcgaagatactcaggaatccgacttcccggcgaagatgacacccagcgtgatcaggacggcaccgatgatgcacatgagggaaattttctcccccagcagcagccagcccgccaccacagtgacgaaaggagtggcatagaggtagttgttggtgatgaccacgcccagccgcttgaaggcgatgttccagatggcgaagcacacggcgttgccgaacactcccagaaacagccagctcaccagaatattgggctgggtgaacaggggcgtcaggctgggcaggccgtccgtcagcagcaccagcggcagggaggtcaggaaggcccacaggaacacccggcgggtcacaaggaagttgtcgtagcgctcggtatactttttgacgaggatggagtacaccgcccacatgagggcggcggccagagccagcaggtcgcccaaggggcttagatggaaggacagggtgccgttgagcaccaccatcaccacgccggcgatggctaccacggcgccgatgtagacccacttgcccagcttctcccccctgcgggagaacagctgcgccaaaatcaccgttaggataggggacatggataccagaatactgacgttggcagcggaggtatgggccgaggcggtattctgcaggaagaagtagaagctgccgccggtgatgccgatgaggatgaacatcagctcatccttccacgggagcttcatggtcttgggtcgcagcgcccacagagccagatacgccagccccatccgtagggggatgatctgggtgggggtataggctgtcagcatgaccttggtgagcacgaagcagctgccccataccagagtggtaaagatggcatacagatgccccatgagcttttgacgatttgacatgatccacactcctaacacacaaatgctgcgctgatgcagcgcttaatcttcggggatgacgggggtctgacctgccatgacttgtgcaatgagatccttggccacgttcaccgtgtcatagtcgggccacatgacccacagggcctgaccgggcatggagtagcactcctccgtgccgccgtagccggtgacggagtagctggtgatgttccagccggacatatccgacagctgcatttttaccagactgctgatgtcctcatagggcatattggtaatcatggtgtccgccacggccttgagcacctcatcatacttggtgagaatggcggaggaggtagccttgttgaagatggccttgatcatggccatctggttgcggccacgctggttgtcgccgtcagagaaggagtagcgctcccggcagaaagccagagccgcctgcccgtccacgttgtagttcatcccctcggtgaaggagaagtagtcgtcatagagattaccgttcttatcggggatctgcatgaccttggtggtgaaggtctgctcggagtagacgtctacgccgcccagagcatccacgatcttggtcaggccgtagaagttgacacgggcgtagtactgcgtttccacaccgtagagatcgtccagcacccgcatggactcgtcgatgccgtacataccggcgtgggtcagtttatccaactggccgttgaagctcaggggcaggaagtagtcacggggggtatttagcagcaggatctgccgggacttgggattcaccaccgccaaaatgttcacgtcactgaggctctggatgttgacatcggagttccgggcatcgatgccgctgcaatagaccacgaagggctccacggtgatggactcgttgggtaccaccggggcgacctccttggtgaagtcgaactgcttgaggatacgggtgtagtcgtcaaaatccgtatagccctccgtctgctccagaatgggcagatagccgtcgttaaggataatggcgtccacctcgccgtcatacagagcgtccgccagctggggcacagaggcgtaggccttggaggtgggattcagatcggacagggtcttgagcacctcggcggtgttctcctgatcggcgttttccagcacgccgaaggtatagcccacggcatcctcgatggagctggcctcgttgtccttcaggacgatgatgtcgatggtctgcttctccgccatcttgcccacgatgcgggtgacggcacttttgagactgccgccggccacggcgccgtagatcattccggcggacaggatcacagccagcacgccgcagccgatcttggcggcatgaccacccttggaggggcggcggggcagctgcaccacggcgtggccgctgttgaggatcaggatgcccgccatcagcagcagcagatatttgttgtccagcatatccagattcaggagctggcccagcagcaccagactgcacaccatcagcagtcccagcgcaataaggccgaaccagtccatccacgccatacggcggctgccggaggtgtcgctgtgtattcgtttggaagtcataatatttctccttacttcagagatgccggcccgcatggtcttatgaccggccgcaatcccctattatataggatagatagtagaattaccagagatttttgcgaaaaaaacggggaaatatcaaattttccggaaagacgggggaaatcagccgttaatgagctcccggatcatccggcgagcggcggcgacggagctttcatccggcaccagtacgctgagggggaagccggtggtgaagcagtcctgcatatccgtggtgccggagagggtgtaggtgctgatgtcccagtccaccttgtcctccagctgcagcttcaccagcttcaggatatcctgctggggcatattggtcagcacggagccggagacggccttcagcacatcctgatacccggagagaatggcgggggaggtggccttgtcaatgatggcctgcagcaccgccatctggttgcggccccgctgcacgtcgccctgagcgaaggcggagcgctcacgggagaaggccagagcctcccggccgttgaggtgattgacgccctcggtgaaggtaaaggcctcgtcgtgatagccaccgtcgccgttttcgttgggcatctccatggcgacggtagtgaagtccaccggggaggtgacatcgatgccgcccaaggcgtccacgatatccataaggccgctgaaattcacacgggcgtagtagtcggccttcacccccagtaaggtgttcagggcctcgatgggctcgtccatgcccttatcactatatacgctgaaatgggtcagcttatccatctctccgttgaagggcaggggcagatagtagtcacgggggatattcaccagcagaattttatgggtggaggggttcaccaccgccagaatgttggcatcgctgcgggtgttgagcagggtatcggagatgcgctcgtcggtgccgctgcaatagaccacgaaaggctgacgggagatgttggcattcggggcgatggtgtcggactcgtgtgtcacgtcgtatgtatagatctcacgggtgcgggacgtaaaatccttgtaaccgtcggtctgcttcagggtggagaccatgcctttgcccaggatgacggcgtctacttcccggttgtacagagcgtcggccagagccgtaggggtgtcgtaggacttggtcttgacctgccccagtccctcctccagatgcgtcagaagggcatcggtggtgtcggtatccgtctgagccagatagccgtaggtatagccgaaggtatcaccgatctcctgagcggagtcgttttcccggacccgcaccactacggtcttgacgctgccggtgctggacacacgggagagagtctccaacacggcgttggtggccacggtggcgtagatcatgcccgccgacagtaccagcgccaccacgcccagaacaagcttccagagcttgttgcgccagcggggcagttgggtcacggcgaagagaacgttcagtcccgccagcaccgacaacaggagcagcgtcagcttctgggtcagcacgccggtggtcagcagccgggccgccagaaagccgctggagatcagcaacaggaagaaggtgagtataccgaaccgatccgccccagtgcggcggcggggggacccgtagccgccgtaggagcgggaggaatgacgtctggacatagaggaaaaactcctttccgaaaatcagcaaggcacgacaggatagcccaccggccgaaggcacatagtctctctattataaagcggcggcgacaggaaatccagtgtaaaaggttacagatttgtgaactttacggcgaatgcggcggatgtgacgattttgttatccggggatttcccggcggaaacggttgaagcggcggcgggagtgtggtataatcatcgaagcggccacgggccgttacggaaaaataagccgccgcccctgcggaatggaggcggcgtatttcaggaggatcaccatgaaggcagcactggtcattatggcggcgggactgggttcccgctacggtggaaataaacaggtggacggcgtaggacctcagggggagatgctgatggagtattccatttacgatgccgttcgggcgggctttaccaaggtggtgttcatcatcaagcccgatatgcgggagctgatggatcgcctgtggggggaccgcacactcataacaaaaacaggagagccgctggaggtctgctacgccatgcaggatttcaccagcatcccggattactacaccattccggcgggccgcaccaagcccttcggcaccgcccatgcggtgctgtgcgcccggccctatctctccgagcccttctgcgtcatcaacgccgacgactactacggcgtggatgcctaccgggccatgtatgaggagcttcagcgcctgccccggcagggacgggccaccatggtggggtatctgctgaaaaacaccgtcagcgccaacggcaccgtatcccgtggcgtgtgccgggtggaggacggctggctccgtggcatccatgagacgctgaagatccagctgttcccggacggctccatcgctgatgtggcggagggccagcaccgggagctggcgccggacacggtggtgtccatgaacttctggggcttcatgccctccatctttcaggagctggaggcctacttcgaccacttcctgcgctgcgaggccggggacaacatcaaggcggagtgcctgctgccgggcatggtgggagacctgctggagcagggacagctggaggtatccgtgctgcactcggcagaccgctggttcggcatgacgtaccacgaggaccggcaggcggtggcggcggagctgcagaagctccacgccggcggtgtgtatccacccaccctgcgggcctgagaggggagaccgacacatgagcgactattacgatcagaccccggagcagcgccgtcagctgcgggcgcagcggaatcggcggcggcaggcgcaggtgcgtcggcggaagctgctgctgggcctgctggtgctggcggtattggctgtggtactgatactggtgctgcggggctgcggcaagggaaaggaaccggcgcagcctacccccagcgagaatgtggacaagcccgataccccaaacactccggcggagccttcggatagagagccgaaccagaagcctgacgaccagaagagcggccagaagcaggagatcccgtggaatctgacgctggtgaaccggtggaatcccctgccggagggctggaccgtggacgaggtggagctctccaacggctgggcggtggacagccgctgctacgacgccctccagcagatgatggacgcctgccgggcggaggggctgtatcccgtggtgtgctctgcctaccggacgcaggccatgcagcagaccctctttgaccagatgaagcagtccctgttggatcaggggtacagcgatgccgacgccgagacggaggcgggccgtcaggtggccgttcccggcaccagcgagcatcagctggggctggcggtggacatcgtggatctggaccaccagctgttggacgagagtcaggagcagacggcggtgcagcagtggcttatgaccaacagctggcgctacggcttcatcctgcgctatcccaccgccaagacggagaccaccggcatcatctatgagccgtggcactaccgctatgtaggacaggaggccgctgcggagatctatcagcagggtgtgtgcctggaggagtatatcgccgccaaatacggcgcttgaccggagggacgaggaatgagattgagaaagtaagcagctcacatttgtataaaggagttgctgatggatgtatatcgaggaatataccacttatcaggagtcggaggtgctggctctgtatggaagcgtcggatggacggcctatacggagcagccggaggcgctgcgccgaggctttgccgggtcgctgctgacactggcctcccgtgagaacgggacgctggtggggctgctgcgggctgtgggcgacggctgtaccgtggtgctggtacaggacctattggtgcggccggatcaccagcggcggggcatcggcacggcgctgatgcaggcggcgctggagcgcttccgatcggtgcggcaggtgcagctgctgacggacgacacggagaaaaccaaggggttctaccggtcgctgggtctgctgacactgccggagctggggtgctgcggcttcatgcgcccgtaaaaccacatgggggagagtgtccttggacactctcccccatgctttgtcctgtgtaccgggcggtcagcgccggttctggttctgctgctcctgctgattctgattctgattctggttctggttctgcttgttctgcttctgctgattctggttctgctgattctggttctgctgatttttgccggacattgaggcacctccttccgtatctgcgatacagcttcagtttgcccgaaaaccggcggagcatacatcctcccgtgaaaaatttccggcggcagataaaaaatccgcttgacaggcgggaggagcgatggtatactactaaagaaaacaaagaaggcaggatgcatccgcctcacctccagcaaaggcaaagaggtcaacagcgagtatggcggcggcccggaaggggcgcaggctttgttgtgcggatgcagctttgcatccgtgtttttattttctgaaggaggtgcttcggttattagcaatgtagtgcatcaactcaacgaggagatccgtgacaaggagatccgcctcatcggtgagaccggtgaacagctgggtatcatgtcctccgccgacgctctgcacattgcggacgagcgggggctggacctggtgaagatctctccccaggcgaccccgccggtgtgcaagctcatgaactacggcaaataccggttcgagcagagcaaacgggagaaggaagccagaaagaaccagcacgtggtggagatcaaggagatccggatgtctccgggcattgacgtgggggatttcaacaccaaactgaaaaatgcccagaagttcctgacggaggggaaccgggtgaaggtctctgttcgcttccgtggccgtgagatggcacataccgagatcggccgggagcttctgaagaagtttgccgaacagtgcgccgaggtcgccaccatggataaggccgccaagctggagggccggaatatgtcgatgttcctctctcccaagaccggcaagtaaacaaaagttctgcttgcccccggcaagagaatagatggaaggagtaaaaattatgcctaaactgaagactcacagcggcgccaagaagcgcttcaatctgacgaaatccggcaaggtcaagagagctcacgctttcaagagccacatcctcaccaagaaggacaccaagcgtggccgtcgcctgcggtccggcacctacgccgactgcaccaacgaggcgaccatccgcaagatgatcccctacaaataagagacggaatcgttagaataggaggcaattaagatatggcacgtgtaaaaggcgctatgatggcgcgtaaaagaagaaataagacgctgaagctggccaagggttactggggcgctaagtccaagcacttcaagatggccaatgagcaggtcatgaagtctctgacctacgcctatgtgggccgccgcctgaagaagcgggacttccgtcagctgtggatcacccgcatctccgccgcctgcaagatcaacggcatgaactactctaccttcatgcacggtctgaaggtggccggcatccagatcaaccgcaagatgctctctgagatggccatctacgatgccccggcgttcgccgccctgtgcgacatcgccaagaaggcgtaactgtcttaaaaagcacgtcgcatatgcggcgtgctttttcctgtggcaaagggcggaaatatctggtatactatggagcagcgagagcatatcagaacgaaaggagtttttccatgtactgcacgagaaaggtaaatgacgattacacgtgggtaggcgccgacgggcggcggctggccatgtttgagggtgtgttcgacgtacccaacggcatctccttcaacagctatctgctgagggatgaaaagaccgtactgtttgacacgacggatgcggcggtgcgccgcaccttccgggaaaatctcctccatgcgctggaggggcggtcgctggactacgtggtggtacaccacatggagccggatcacacggcggagctggaggagctggtgctgcgcttcccggaggtgcagatctattgcagcgctatggccaagaccatgatgacccagttcttcggcaccggccttcaggagcgcatccatgtggtgaaggagggggataccctctgcaccgggcggcacacgctgcgctttattgcggctcccatggtccactggccggaggtactgatgacctatgatgagacggatcgtctgctgctgacggcggatgccttcggctgcttcggggccttgaatggccggttgtttgccgatgaggtggacttcgaccgggattatctggacgaggcccggcgctactacaccaatatcgtgggcaaatacggctctcaggtacaggcggtgctgaagaaggcggcagagctggacatcgccatgctgctgcccctccacggctttgtgtggcggaaggagttggggtatctcctgcacaagtacgacctctggagccgctacgagccggaggagcggggggtgctcatcgcctatgcctccgtgtatggcaacacggagaacgccgccaacattctggcctgccggctgtcggagcggggcgtgaaggtgcagatgttcgatacctccgtgacgcctacctcttacattctgtcggcagccttccgttacagccatctggtgtttgctgccaccacctacaatgccggggtgttcattaccatggaggagctgctccacgatatcgctgcccacgatctccagaatcgccgggtggtgctgctggagaacggctcctgggccccggccagcggcaaggagatgcagaagatcctccagcctctgaaggggtggcagcagatggaggacacctttaccatccgctccgccctgcgggaggatcagaccatgcagctagaacggctggcgggtacgctggcggcggacgtacaggctgcggccccggcggaggaaaagccggaggggcagcaccgctatgtgtgcaaggtctgcggctatgtatacgagggggactccctgccggaggattataaatgccccctgtgcggcgccggtgcggagtatttcaagcaggagtcgtaaagagcgcttttccccatgaaaaaacagcaggatggcatggccatcctgctgttcttatatcattctacggaagaagcttccaccggagcagcctccgcaggttcctcctccggctccgtccacggctccatggtagccacgcagcggttgatgttcttccccagctcatagaacttggcctcgtagtccgtcatgactcccacggggccgttggcgtggaggtcacgggtcacctccgacagagaaaagccatactgggggatctcctccacggaccactggaacagcttgtcgttgtccgtcttaaagtggatctgcccgcccataggcagcacctgccggtagcacttgagaaaattgccgtgggtcagacggcggcgcttctggttgctcttgggccacgggtcgcagaagttgatgtacagccggtccacctctgccggggcaaacatatccggcagcagggcggcgtctcccaccacgaagaatacgttgtgcagccccgccgcctgcgcccgctccatggccaccaccatggcatccggcaccttctccacggcgatgagcagaacatccggctccgcttgggccgtacccacggtgaagcgccccttgccgcagcccagttctacccgcagctcacgggcatcgggcatcagctcccgccagtggccccgcatggcgaaggggtcctgtacctgacaggcccggcaggcctccatccggggcagtagattcttctttttccgcatacgcatggtgtcgttcctcctgaaaaacgccgcatggcgatggtatccgactacccaatataccggttttccggcgaaaaagcaagagggaacgccggaaaaactctcccggtaagggagagccgccgaagcgacgttttcgtaggacggcgcatcgaagaacaggtgcggcaaaaagctggaaaagtaccaaaaaatccgacgaaatttgtgacttcctctaaaaagcaaaaagccgggtgagaagtgcttgataaattttagacgaacgtctataatggataaggtatatgagaaggcgcattttgcgggtgaaacacccctgtagaaagcgctttttcccatgacgctgccgctgcttcggcggcggctgccacagtaaggaggaaccattgtgacgaacgtactgttggagaaaaaaggtccatatgccgtggccaccatccaccgtccggaggcgctgaacgccctgaattctcaggtgctggcggatctggcggagctgctggacaccgtggaggccgacaaggagatccgtgtactggtcatcaccggcgcaggggagaaagccttcgtggcgggggcagacatcggagagatgagcaccctcaccaaggccgagggcgaggccttcggcaagaagggcaacgacgtattccggcggctggagacgctgcccatccccaccatcgccgctgtcaacggctttgcactgggcggcggctgcgagctgagcatgagctgcgacattcgcatctgcgccgacaccgccgtgttcggccagccggaggccggtctgggcatcacccccggcttcggcggcacccagcggctggcccgtctggttggccccggtatggccaagcagctgatttacaccgctaagaacatcaaggccgacgaggccctgcggatcgggctggtgaacgccgtctatccggcgcaggagctgctgcccgcagcggagaagctggccgggaccatcgccaagaacgcccccatcgccgtgcgggcctgcaagaaggccatcaatgacggcctgcaggtggacatggatcgggccgtgaccatcgaggagaagctgttcggcagctgcttcgagacggcggaccagaaggagggcatgggtgcttttctggaaaagcgcaagcatgagccctaccagaaccgataaagctctatcagaacgttgttttccggacataacgtccggtgggcaaaccaatgaccctatatattctaacgattaggaggaatcatttatgaagatcgctgtttttggtgcaggtacgatgggtagcggtatcgctcaggtgttcgccggcaagggccacaccgttctgctgtatgcttccagcacggccagtgcgcagcgccacaaggataagctggctgcttctctgaataagcgtgtggccaagggcaagatggcgcaggaggccgctgacgatctgatgagccgtgtgctggtggaggagttcgaggccgccgctgacgccgatctggtcatcgagtgcgtggctgagaacatggccgtgaagaaggagctgctgggccgtctggacgctctgtgcaaggacgaggccatctttgcctccaatacctcctctctgtccatcaccgagatgggtcagggcctgaagcaccatctgatcggtatgcacttctttaaccccgtgcctgccatgaagctggtagaggtcattgccggcggcaatacccccgctgagctggtggactacatcaagaacctgtccaccgagatcggcaagacccccgtggtggtcaacgaggcccccggctttgtggtcaacaagatccttatcccctattgcaacgaaggcgtttgcgttctgcaggagggcgttgcctctgcggaagatatcgatattgctatgcagctgggctgcaaccaccccatgggtcccctgcatctgggtgacctcatcggctgggacgtggtgctgaacatcatggatgtgctgttcaatgagacccacgacagcaagtatcgtgcaaacgtattgattcggaagatggttcgcgccggcaagttgggcatcaagtctggcgagggcttctttaagtataccaagtaaaatttcgtaaaggagaaaagagtatggacttccatctgactaaggaacagctgctcgttcgcaagatgtaccgcgaatttgcagagaacgaagtgaagcccctggccgccgagatcgacgaggaagagcgtttccccatggagaccgtcgagaagatggcgaagctgggcatgatgggcatttacttccccaaggagtatggcggcgccggcggcgacgtcctctcctatgccatgtgcgtggaggagctggccaaggtctgcggcaccactgccgttatcgtttccgctcatacctctctgtgctgcgctcccattttcgagcacggcaccgaggctcagaagcaaaagtatctgcctgacctgctgtccggcaagaagatcggtgctttcggcctgaccgagcccggcgccggtaccgacgcgcagggccagcagaccactgctgtactggacgagtccggcgagaactacatcctcaacggctccaagtgcttcatcaccaacggcaacgtggctgataccttcgtcatcatcgccgtcaccggtaagaccaccgacaagcgtggccgtgccatgaaggagatttccgccttcgtggtggaaaagaccgaccccggcttcactcagggtaagcacgagaagaagatgggtatccgcggcagctccacctgcgacctgattttcgaggactgcgtcatccccaaggatcgtatgctgggcaagaagggccagggcttcaagatcgccatgcagacgctggacggcggtcgtatcggtatcgcctctcaggctctgggtctgggcgagggcgccgtggaggaggccgtcaagtacaccaaggagcgtgtccagttcggtaagcgtatctcccagttccagaacacccagttccagctggccgagatgcacacccggatgcaggctgctcagttcctggtctactccgctgccatgaagaagcagaaccacgagccctactccatggatgccgccatggccaagctgttcgctgccgatgccgcttccgacgtgacccgtcgtgccgtgcagctgttcggcggctacggctacacccgtgagtatcccgtggagcgcatgatgcgtgatgccaagatcaccgagatctatgagggcacttccgaggtccagcgcatggtcatcgccagccatctgggcgttaagtaattgaggaggtataaggcaaaatgaaagttattgttactgtgaagcaggttcccgatacctccggtaaggtggctgtgaaccccgatggcactctggaccgtgcgtccatgcagaccatcatcaaccccgatgatatgaacgccgtcgaggctgctctggccctgaaggacgagctgggctgcaaggtcgtggccttcaccatgggtccccctcccgccgagggtatgctgcgtgagctgatggccatgggcgtggacgagggtgtcctgattaccgcccgtgagttcggcggctccgatacttacgccacctcccagatcatcgccgccggcatcgacacctacggtgtggatgaggacgacgtcattctggctggccgtcaggccatcgatggcgataccgctcaggtcggcccccagatcgctgagaagctgcatctgcctcaggtcacctatgccggtgagatcaagaaggagggcaacaccttcatcgtcaagcgtatgctggaggatggctacatgaccgttaaggtcaacaccccctgcatgatcacctgcatcaaggagctgaatcagccccgttatctgtccgttggcggcgccttcgaggcttacagcaagcctctggtcaccatgacctacgagacgctgaaggatcaccccctgatcgatgccaccaccatcggtctgaagggctcccccaccaacattctcacctcctttacgcctcctcagaagggcgccggcatgatgcttgagggcgccggcaaggagaccaccgacaagctggctggcattctggccgccaagcatatcatctaaggaaggagataagaaaatggcttttaatagtgctgataccgctgccttcaaaaacgtctgggttttctgcgagcagcgtcagggcaagatgatgcccactacctttgaactgatctccgagggccggaagctggctgacgaactgggcgttgagctgtgcggcattctgctgggcgacaacgtggacggcatcgccaaggagctgggcggctacggtgccgacaaggtctatgtctacaacagccccctgctgaaggactacaccactgatgcctacaccaaggtcatcaccgacgctgtggaggagatcaagcctgagatcctgctgttcggtgcctccaacatcggccgtgatctggctccccgctgcgcagctcgcctgcacaccggtctgtgcgccgactgcacccatctggacatcgatatgcccatctacaagaacttcctgcgtgaggcttccacgctggctgaggagcgtatcgagaagctgggtaccgtgaagatcaacggtcaggatcacgatgtctcccgtgacatcaagatgacccgtcccgctttcggcggccacctgatggcctccatcttctgcccccgcttccgccccgccatggccaccgtgcgccccggcgttatgaagaagcgtgagttctgcgccgactgcgccgagaaggttgagatcctgcatcccgctttcgagctgtctgccagcgacatcaagaccgaggtggtggagaccgtcaaggctgccaagaagctggtggacctgatcggtgccgacttcatcgtgtccgtgggccgtggcatcagcaaggatgtcgagggcggcatcaagctggctgaggagctggccgaggttctgggcggcgtcgtgggctcctcccgtgcctgcgtggacgccggctggatcactgctgaccaccaggtcggccagaccggtaagaccgtccatcccaaggtctacgtcgccctgggtatctccggcgccatccagcacaaggctggtatgcaggactccgagtgcatcatcgccgtgaacaagaacgagaacgctcccatcttcgaggtggctgactacggtatcgttggtgacctgttcaaggtcgttcccgagctgatcgagtccatcaaggctgccaaggctgctcagtaatcgatcccctttacgaatcaagaagggctgtcccgctgtgggacagcccttctttcattacttggatcatggtcaggtggtgatatgccagtaggtgacggtatcctcgatatccatttccgccagataaccacctactccgtcagagcagaataccgtgggccagttttgataggtggcaaagtcgttgatcacaaggggatcggtctgctgcgtatctggatagaggatatgagcagcaaaggcatcgtccacgtgcatacaactgctgccgcttccggtcagacgccacaggggcactgcggaatcagcggtggatacctttccgtcgctgatgcggatcgtcacataggaaaatttttgagtctccgggtcacccaaaccgcacaccatgtactcgcccgttatggcaaaggttgtgacctgctgcgaaagctccttctggtacagaataccggacgcattgcagaggaacgccgtccagtaggcgtcgtttttggcagaggccaaaaaggcgaattgcgtaccattggtgcaaacggttacatcggacatggtgtagtcggtgaggttcagcacgctggaaacggcactgctgtccacatgatatacggatatgccggtatcctctgattgcagatacatgggctgaccgttcaggcagaacaacgcagggacctgatcataggaagcggcttgaccggaggcgagagtgcttttccctgtgtctgtggaccggatcagagaccatttgaggccgggctccacggcttcatagtccacgtacagaacatcggacccgtccagaacggcggagatgatataggccggggaggaaacgggaaactgcttggtggtcccgtccgaataattccagtaaagcagatagtcggtattataaagggggccggtctgagccgtattgcgatgcccgacagccaacaggacactgttttccccgcagcactgtataagggtggcggcctcatcctcggaaagctccaatggcgaggtgagccgctgcaccgtgggggcgggaatctgttccggcgccttggagcaggcggagagaggaatggcgcatatcaggaagagaagaacgataattttttt

SEQ ID NO: 12419 - DNA, 69275 bp, Unknown
  gut microbiota DNA sequence
acggtttttgtgaaatacatattccatcacaattaaacataacgaaattgtatgcaaaattgtacaagaggggccgcccctgtggggcgccccctccgcatggcgaaaaaatcttttcgccatgcggaggcatttttcagagcctcaaaaagctctgaaaaatggtgatcatcatcgtgcaggacacccttccgggtttcccgcacacacccttcttccccgttgacgaaaggttcccactttttgacaggctcagtggccgcccatgtggggcgacccctctcttttaccacgaagctctcccgcccttcgaccatccggatatggcagaatgtggaagatgataaagaatctgcaaagaaataaaaattcataatttcataatacttccatagcgctccgggggttgcaattcccgaaacggagtgctacaataggcgtcgcttgagagatagaatcctaaaaagaggcgaatttcctatggtagctgaaattgcagcgttggtaatttttgtcatcatgttcctgctgatcgtgctggaccgcatcccccgccagtgggtgacgctgggctgcggcgcactgatgctggtgctggtattcggcatctgtatgcacgatggcggggccatatgggatactctgaacctgtccgccttcggccagagtaccttctggtacggcgcatcggagtcctccggcggcatcaactggtccaccatcgtgttcattgcgggcatgatggtgatggtggagggcatgggccacgtgggcatctttcgctggctgtgcctgaagctggccaaggcggtccattaccgcaccgtgccgctgctggtgtgcttcatggtcatggcagccgtgctgtccatgttcatcgacagcatcaccgtcattctgtttctggccgccgtcacggcggagctgggccgcaccctgcgcttcgacccggttcccatgatcctggcggagatcttctgtgccaatttgggcggcagtgctaccatgtgcggcgatccccccaacatcatcatcggcacctcgctgggtctgaccttcttcgatttcctcaccaacaccggcgttatcgtgctgatctgtctggtggccacggtggtgtacttctacttctgcttccgccgcatcctgcgggagagtgagagtcagcgccccacggatatcacctatccagacgccgcttccgccatcacggatcggcgggccttcatcgcctgcggcgccgtgttcctgctggtggtggtgctgctggtcacccacgcacagacggagctgacggtggccaccatcggctgtatcgccgccgtattgatggcgctggccaccctctgcacctccggaggccatgcggcagcggggctgtttgccaaggtggactaccacacgctgctgttcttcatcggcctgttcgtggtggtcagcggtttggaggacaccggctgtctggacgtgctggccggctggatcagccgcatcagcggcggacacgccgctgtgatggtggccatcatcctgtggctgtcggctgtgtgcagcgcctttgtggataacatccccttctccgccaccatggtgccggtgatccagtccatgtcacagtcgcagggggtggatctctccctgctggcgtgggcgctgtccatcggcacggatctgggcggcagtgctacccccatcggagcctccgccaatgtggtgggtacctccgtggccgccaagaacggccacccggtgacatggggtacctactgcaagtactgcgccccggccacggtgctggtcatcaccattgccatggtctgcctcttcgtgcgttatctataatataatgggtattacaaaagcatccccggcctgttttacagaccggggatgcttcgtgatgcaaatcagaactccggatagccgtccttcagatgctcgtcgtagatggcacgctcaccgccgatgaacttgggccgcacacgggccgccagcaggatggcgctgccgatatggttctggggcaggcgcaccggcaccgccactttcttcaggtgcatcccgatgagggtgccgccgatgtccagaccggcgtcggcccgaatctcctccagcgccaccggatgccggaagctctgataggcggcggtggcgaaggagctgcccgccttgggctggggcagcacattgacgatctccgcctcaggcaccgcctcatgctccacgatcagcgcacggttcaggtgctcgcagcactgggcggcgatgtagacgcccatgggggcaaacacgctgttgagtccgtcgaaaatggcctgtgcgatctggggtgttgaccagctgcccacctgatgccccaccacctcgctggtgctgcagcccaccaccacaatgtggccccgccgcagccgggctgcctccgccagctgccgtgcggcgtccgccgcctcctgccgcacctgttccagcaggtcggtgcgctctacctcatgaatgatcccagccatagctatcttcctttcctcgcatgaacgaaaagcggcggatgatcgctccgccgcttttcgcaaaagcaattctgcaccttcagtgtaccacgtccggcgccattttgcaaccgttcttacgccagcttttccagcgccttactgcgcttgagtaccaccagcagcaccagaccgatgaccatgcccatagcgccctgcaccagattgccggggatgctggccgcagcgccccagcccttgcccagcagcagggaggcgtagccgaagtagcccagcaccatgatgacctcgctgaccacggcgctgatgacgtaggaggccttgctctccttcatggccttgacgatgagggccgccaccagagccatgcagcccttgataatcagcgtgccgggcgcatagtgaccgtagccgcccagcaggtccaccagcatggagccgatgccgccagccgcagcgccccaccacgggccgaggatccagccgctcagcagcacgatgcagtcacccagattcacatagccctgcatgggggagggaatctgcacgatggaggtggccacataggtcagtgcggccatcagggccgccagaaccagtttcttgatgttcgcatctctcatgggaaaaatctccttgcttttatgtactgtctgtattatagtagaaattggtattattaaaatgcccatatcgatattatcggataataccagatggaggagctatgctgacctatcccctgagcaaagagagcggccggagcctgtatgagcagttatatgagggcatccgccgggatatcctgtccgggacgctgccggcccaccagcggctgccctccaagcgggcgctggcccagcatctggaggtcagtatcatcaccgtgcagaatgcctatgagcagctggcggcggagggctacatctactcgcaggagaagcggggctactacgtcagccccgtggagcgccccttacaggcggcggcccggcagcctgccccgctgccgccggagccggagcagaagacctattttctggaccttgtgaccaattccatcgaccgggcgtattttccctttaccgtctgggcccgcctcatgcgggagacgctgctggagcgggacaaggccctgctacaggccgccccctacaacggggcggaggagctgcgccgggccatcagcgactatctgcgccagttccgtggcatgaacgtggacagcggccagatcatcgtcggcgccggtacggagtttctgtattcgctgctgatccagctgctgggccgggagaagtgctacgccgtggaggaccccggatacagcaaaattgcggaaatttaccgcagccatcaggtgaatctgcggcaggtgggactggatgaaaagggcctctccacccggcttctgcgccgtcaggaggcggatatcgtccacctctcgccctcccaccactatcccacgggcatcgtcatgcccatcggacggcggcaggagctgctgcgctgggcggaggagcaggagggacgctggatactggaggatgactacgacagcgagttccgcttcgtgggccgccccatccccacgttgttctccatcgacgaggcccagcgggtcatctacctgaacaccttctccaagaccatcgccccctccatccgcatcagctacatgatcctgccgccccgactcatggaggtctatcgggagaagctgggcttctacgcctgcacggtgtcgggcttcgagcagtatactctggccaaattcatggcgcagggccgctatgagcagcacctgagccgcatgaaggcccgctaccgccagaagcgggacgccgtcatcgccatgctgcgctccagcccgctggcggaccgggtggagatcatggagcaggacgccggtctgcactttctggtgcggctggatacccgtctgccggatgcggcgctgcggagccgggcggcggagcagggggtgcgtctggcgctgctgtcggactattacagcgcccggtcgtcggcgccccagcatatcgtggtggtaaactattccggcatcgacttggagcgtctgccggagggactgcgccgtctggcgcaagcttgggaggaataatgatgtacgatgaattgacccgtggcgacgtgcagaagatgcaggaggagatcgactaccggacgcaggtactgcgccccaagctcatcgaggacgtgcagacggcacgggccttcggtgacctcagcgagaacttcgagtataagtgcgccaagcaggagaaaaaccgcaatgacagccgcatccgctacctgcagcggatgatcaagaccgcccgcatcatcgacgaccgctccggtcaggacacggcgggcctctacgacaccgtggagatcttcatggaaaacaccggcaagagccggaggatccagctggtcaccaccctacggcaggatgcactgaagggcctcatcagcaaggagtccccggtggggaaggccgtgctgggccgccgggccggggaccgggtacaggtggatatgggcggcggccgcagctactggatcaccatccgctccatcgaaaaaggcaccgacgacggctccatccccatcggcagcttttgagcccctgtacagaatacacagcttttgttgcaggaaatcgccttttcgtccattgtatccagaaaatgactgtgatagaatgagaaaaaaggaggtctgtcctatgagaaagcacctttccctgatgctgcttctccttctcctgatcacctgcaccgcctgcggtcagcgccagacagtacggcagatggcggcggaccgcatcacacaggccgagagtgtctctcagcttcaggaggtcagcgacctcattgtggtgttcacaccggagcgtcaggagaacgttctgtcctatttcagtgacggcaatgtctccggcggctatacgagaaccaccggtacggtatcgcaggtgctgaagggggagcccccggagcagctggtcatcactgaggagtgctatctggtggacaatgtcctctggacgcagggcggctacctcctcatgcaggagggcgagtcctatctgctgttcctcaccgcctacgacagggactccgtctacgccgggatgtacttccccacggaactggagaagggcaagtatcccctgacggacaaaccccttaccgcctccgactccgctgatgcgtgggaggtatatgtgatcgagggagacgacctgcacgactatcaggactggtatcagcagatcaccgccctgtatccggagctgttttaacgaccccaagtcctctatatatgataatgtaaaagcccatccggcccgcattcagcgggccggacgggctttctgaaattctacgctgcttctatggtactcttagcccggaggccaggtcatatcccggccggacagcacatggaagtgcaggtggtggacgctctgccccgcctgctccccgatgttggataccacccggtagctctccagccccttctcccggcacagtcttgcgatgacctcgaagatgtgggccaccacggcgctgttgccgccatccacctccgccacggaggcgatgtgggccttggggatcaccagaaaatgggtgggcgcctgaggggcgatgtcataaaaggcatagcacagctcgtcctcatacaccttgttggaggggatctccccaccggcaatggcgcagaacaggcaatcgtttttcataggatgctcctttcgtctcagcccagcttctcggacacgaaatcgtccacggaggccagcgcatcgtccaccttcaggggatcgctgccgccgcccatggcggaatccggcttgccgccgcccttgccgccgcagatggcggacacgtgccgcaccagatcaccggccttgatgccacgggccaccgcctccttgccgcacacggccaggaaggtgatcttctcgccgttgatgctggcgatgaccgccacggccttgggatccttatcccgcaggaaatcgcccatggtccgcagttcggcggtgtccacgccgttgcgggtggtggcgagaacatggaggtccttcaccgtcttggcggaggccaggaactgccgggcctcacccagagatgcctcggccttgaacttctccagcgcctgacgcagctgcttcatctcgttggcctgctgctccatccgctccagcagcccggagggggcggttttcaggaactgggccgcccggctcagcacgccctgactgctctccatggccttcaggctcagcttgccgcaggtggcctcgatgcggcgcacgccggaggcgacgctgctctcgctcttgatgcggaagggaccggccttggcggtgttgtccacatgggtgccgccgcagaactccacggagaagtcgctcatctctaccacccggacggtctcgccgtacttctcaccgaacatggccacggcgcccttctttttggcctcctcgatgggcagtatctccgtcaccacgggatagccctccagaatggcgtcgttcaccagttcctccacctgccgcagctcctccggggagatggcctcaaagtgggtgaagtcgaagcgcaggcggtccggctccaccagagagcccgcctgatggacgtggtcgcccagcacctttttcagcgccgcatccagcaggtgggtggtgctgtgagcacgctggatggccttgcggcgctccatgtcaatggcggcgtgaacggtgtctcccacgtggagcacaccctgtgccagacggccgtagtgcatgaacttgccgcccttgtttttctgtacgtccgccacggtgaataccacgccgtcggcggtgatggtgccgtggtcggccacttgaccgcccatctcggcgtagaagggggagtgatccagcaccaccacggcctcggccccggcggccacctcgtcccgcagctcctcatcggccacgatggccacgatcttggcatcgcactcgctgtggtcatagcccacgaactccgtggccggcacgtccttgccgaactccacaccggcccagcccagatcgcccagcgccttccgggcctcacgggctcgctccttctgctccttcatcagcttctggaaagcgccctcgtccacgctgagaccctcatcggctgccatctccatggtcaggtcgatggggaagccgaaggtgtcatacagccggaaggcgtcggcgccggagaaaattttctccagcttctgcttgtgttccgccagcaggtcggagaagatcttcatgccgccgtcgatggtgcggccgaaattctcctcctccgtgcggatgaccttggtgatataggtctgcttttcccgcagatcaggatactggccctcattttcatggataacggtgtccaccacctgatacaggaagggatcgttgacgcccagcagcttcccgtggcgggcggcccggcgcagcagacgccgcagcacatagccccgcccctcgttggagggcaggatgccgtcgcagatcatgaaggtagcggagcggatgtggtcggtgatgacccgcagggacacatcccgcttctccgtctcgccgtagtgagcgccggtgagctcagacaccttgtgggtgatattcatcacggtgtccacgtcgaagaggctgtccacgttctggcacacgcaggccagacgctccagacccatgccggtgtcgatgttcttctgcttgagctcggtgtagttgccgtggccatcgttgtcgaactgggagaacacgttgttccagatctcgatgtatcggtcacagtcgcagcccacggtgcagccgggcttgccgcagccgtactccggcccacggtcatagtagatctcggagcaggggccgcagggaccggagccgtgctcccagaagttgtcctccttgccgaagcggaagatgcgctcggcggggatgcccacctccttgttccagatgtcgaaggcctcgtcgtcgttcagatagatggaggggtacagccggtcaggctccagccccaccacctcggtcaggaactcccagctccatgcgatggcctcatgcttgaagtagtcgccgaaggagaagttgcccagcatctcgaagtaggtgccgtggcgggcggtcttgcccacgttctcgatgtcgccggtgcggatgcacttctgacaggtgcagacccggcggcggggcggctcctcctcgcccttgaaccacggcttcatgggggtcatgccggcgttgatgagcaggatggacttgtcgttctgcggcaccagagagaagctgggcagacgcagatgacctttggactcgaagaacgacaggaacatctcccgcagctcattaagcccgtgatagggatgagacatgatacattactccttttgcttgcaatcggaattgcagaattttcttttgtgacagttcctgtgacagacctctgtgactggatgccgtcactcctctgcctgccagctgtccgccagcgcctgaagctcccgctccagaccggagaagaactgcgagatgtgcagcccgtctgccagggcgtggtttacaaacagcgacaccggcagggtagtgcgtccatgcttggtgacagccttgccccagctgatgcgggggttggagtcgtcggcgctgacggcgggatgctccagctgggaatagtgcagccacggcagactggacacaaagaagaagctcaaagcgtctccgtcctcggtgagggtaccccgtcgaagtacctcctcctgtcgccgctgacccagcaccacgaacgactcatagggcagatccccctccaccgtgcagtatacgtataccccgtcgggcttcatggcggtgtaggaagggggacaccagtcgtattccaccacgctgccatccgcccggatgcggcggcgcagctggggaatggcgttagcggcccgtaccacggcatagaggaagctcaggaagaagggccgcccctgccgccgtgcggcgaagtccgtgatgtctacctccgccgtgatcccggcgaagggaaagagcatctgacggaaataggcaaactgcccgctgcgtgggtccttggtcatgtcgatcagctgatagctcacaggccacctcctgtaaaacagaacttcgggggaaaatcggaaacaccgggacgcaggagggctgccgaaaaaacaaaaagcccccgcccacacataggggcgaagacttgcttcacggtaccaccctaattgaacggccaaggccgccatctcggtcatccggtaacggggatggggcgtgcggctcgtcgtcgcctgctcggaagtggctgtcacaccggccggacaaggggcttccaccgcttcccctctcgctttgggcggcacatggcggactcgtttcgtcagcgcatttcacgctctctattttaccacagatcccgccgttgtcaacacaagaaacgccgcatttttgcgggatttttatgcagtttttcccttgcggaaacgccgcaggctgatatactaacgaaggattatcttgtcgttatttgtaggagttataccatgacggaacagaagcttcttcctatcgatcactgccgccatctggcctttgctgcaataggcggctttttcggcggttacgccctgctgtgccgcggcgggatactgggcagctcccagaccatgaatctgctggagctggtcagcgacgcactctttggccgggggagcagtgtgctgctgcatctgctgtgtctggtgatctacgtggtgggcgtcatgttctccgtcatcgtcccccacgtgttccatgtggatatgcggcggctgtcgccgtgcatcacagcggctgctgccatcgccatgggctttttcccggcggatatgactccgctggtggcactgtatccggtgttcttctccatgagcatccagtggagcacctttgccggcgccagaggcttccagagcgccacgatctttaacagcaacaacaccaagcaggcatctctggcgctggcccactacctgtgcgagggagagcgggagcagctgacaaagctgtggttctacggctccaccctgctggccttccacgccggagccgtctggagttggctggcggtgaagtggctggacgtgcggggcgtctggggcgtgctgcctcagctggcactggcctactatctggtgctccgggaggagcaggcggagcgtgtcctgaccccggcacagatccgggagcaggaggttctgggcgaagccgaggaactggtggaggaagcccaagagctggtggaggaggagaaggagaactgatcctccccaacgtgtctccactcgccgcattctgatcaaaacctgaaaaggcacggggctgcaccgcagccccgtgcctttttcaaagcgacgatcgatctgtcggaggcccatcactcctccgccatatcccgccgcagctgcgccagcacctgaggcgtatccacatccgtcagctccggagccgggacctcccataagaggaggtcctcctcatggcggcggatcacctgattgccgccgtgatccccctgcagagccagcagctccgggaacagccgtgccgggaacaggcaggggttcccccggacgccgccgtgacccagcgcagcgatgtgctccgggtgctcccggtaaaagtccactagactccccacgctctcccggcgcagcaggggctgatccgccacctgaaacagcgccgcatccatctccggcagcttccccagccccagcgagatggtgtggctgatgccccagtccggatgccggttgggtaccggcacgaagcccatgcgatgggccagctccagcacctccgggtattggctcaccaccaccgtccggacgaactgctccgccggtacggcctccagcgcccggtggaacagcgccttgccctgcacctgcaccgccagcttgttctccccgaagcgccgggcatttcccgccgccatcaccacgcatccgatccgcagctgtgccatgccgcttcctcctttgtcccgtcattttcttacagtatacccggaaatgcccattccagtcaaccaccgttatcctataattagtattacgaaaaggactatgcaaatgacaaattttatgctatgatatcttaaatttataggtacttttgccggtaactccggctatcgcagcgacgctgacataaggaggaacactacatggctgaagtaggaaaagccgaggtgcgggtagacgcctttgacaaggccaccggccgcaccaaatactacgaggacctcatgccccgtgatgcactgtatgtccgcatcaagcacgccactatcgcccacggcttcgtcaagtcggtggacacctcggcggcggagcagatccccggcgtggtgaaggtgctgacctgtttcgacgtgccggagcacccgttccccacggcgggccacccctggtccatggaccccggccatcaggatgtggcggaccgccacctgctgaaccggcacgtccgctactatggcgacgacgtggcggtggtcatcgcagaaaacgaggtggccgccatgcagggcgtccgggcgctgcaggtggaatacgaggagctgcccttcgtgctggatgtgcagaaggccatggagcccggcgctccccagcttcacgaggcataccccaacaacatcctcaagcataccgatatgaagaagggcaactatcaggctgccattcaggagccgggcctcattaaggtggagggctggtacgagacacccacggtgcagcattgccacatcgagaaccacggctgcttcgcctatgaggagaacggccgcatcacggtggtgtcctccacacagatcccccatattatccgccgtgtggtggggcaggcgctgggccgcccgtggagcgatatccgggtggtgaagccctatatcggcggcggcttcggcaacaagcaggacgccctctatgaacccctgtgcgcttggtgctccacgcaagtccacggtcgctgtgtccgggtggactgctcccgtgaggagaccttcgtctccaaccgtgtgcgccacgccatccgcttccacatcgtctcgtggctccgcaaggacggcaccttcgccgcccggaaggtggagctctactccaatcagggatcctatgcctcccacggccacagcatcgtggccaaggccatgggctccttctcccagcactatccctgtgacaacatggagtgcgatgcgtggacggtgttcaccaaccgtcccgccgccggagccatgcgtggctacggaatgcctcaggcttcctttgccgacgagtccaacgtggacgagtgcgccaaggccgtgggtatggacccgctggccttccggatgcagaacctcatgcccaagggcttcgaggacagcttctcccacaacgtcaactatgaggattccttccgccagtgtctggaggttggtaagaagtacatcgactacgaccgcaaaaaggcggagttcgccaaggagaccggccccatccgccacggcatcggcgtggccaccttctggtataacaccgccgtctaccccatctcgctggagacgtcctccaaccggatgctgctgaatctggacggcagcgtcaccatgcagtgcggcgagacggagatcggacagggcgccgataccgcttatgcccagatgacctccgacgtggtgggtctgggcgattaccgtaaggtccatgtggtgtcctgtcaggataccgacatcacgcctacgggcttgggtgcttatgcctcccgccagacgtatgtggcgggcttctccatccgccagacgggcctgatgctgaaggagaagattctggattatgcctccaagctcacccgtcaggcggtgtacaacatggatatcgtggacggcaatatcgtccgcaacaccgacggcaaggtgctcatgagcctgtcggagctggccatgcacgcccagtatgaccccgccgactcccagcacatcaccgccgagagtacttataccatccgcaataacgcctattccttcggctgcacctttgccgtggtggaggtggacatccccatgtgcaaggtgacgcttcaggagatcatcaacgtccacgactgcggcaagctggtgaacccggcgctggcagaggcgcaggtccacggtggtatgtccatggccattggctacggtctgtcagagcagctgctgttcgacgaaaagaccggccggcccctgaataacaatctgctggactacaagctctccaccatcatggatcacccccatctggaggcgcagttcgtggagaacgccgagcccaccagcgtcttcggcaccaaggccttgggcgagcccccggcctgctccggtgcgcccgccatccgcaacgccatctacaatgccaccggcgtggccatcgatcaggaccccatcaccccccacgtcctcttccagcgcttcacggaagagggcctgatccgggactaaggaggaaataccgctatgtatgatatgtcagcgctctatcaggcggaaagcgtacaggacgccatccgtctgcgactggagcatcccgaggcccagatcatcgccggcggcaccgatgtgctggtgcagatgcgggagggcaagcgggccggaaaggccctcatcagtattcagggctgtggtgaaatgcggggcgtgacgctggatgaggaggagaacctccgcatcggcagtctcaccaccttcagccacatcaccgccgatcctctgatccaacagtatatcaacgtgctgggcgaggcggtggatatggtgggcggccctcagatccgcaatgccggtaccatcggcggcaacacctgcaacggtgtgacctccgccgactccgcatccaccctccacgcatgggaggccatggtggagatcaccggcaaaaatggcgtccgccgggtacccattaaggacttctacctgaaggcaggcaccgtggacctgcgggtggaggagggcgaaattcagaccgccatcctgatccccaaggcatcctacgaccgcaccttcggccactacatcaagtacgccatgcgcaacgccatggatatcgccacgctgggaacctccgttaacgcccggctcagcgaggataaaaagaccttcgaccgggtgcggatcgccttcggcgtggcggggcccgtccctatgcgtgcgccccacgctgaggagtttatcaacggcaagcccgtgacgctggagaacatcgagggcttcggaaaagcggtgctggaggacatccatccccgtgactcgtggcgggccagcaaggcattccgctctcacatcgccgtggagagcgccaagcgttgccttatggagtctgtgaagctggcgggaggtgagctgtaatggcaaagaatcagtatcagctggtgaccttcttcctcaacggcaaggaggtggagcggatggtggacgtccgggcctctctgacggatatgctccgcaacgacttctccatgacctccgtgaaaaagggctgcgaggtgggggagtgcggcgcctgcaacgtcctcatcgacggcgagtgctataactcctgcctgtatctggcggtgtgggccgagggcaagcatatcaccacgctggagggtctcatgggtcccaacggcgagctctccgacattcagcaggccttcatggaggagaccagcatccagtgcggcttctgtattcccggatttatcatgacggcggtggagatcctggatcgtggggtatactataccgacgaccagctccgcaagctgctgtcgggccacctgtgccgctgcaccgggtatgagaatattttcaaggcggtgaagaaaaccatgctccgccgtctgggtcgtctggatgatccgttcctcaacacctgaccgggtgctatcccaaaaccggataccggtcgatgattctgccggacaccggcgggatacttgaccgatcccgatgggataccagccggacgatggccggacactggctggatatctgccggatacggctggatgcttgtcgggcggctgccggacagtccggtggacgtccaccggacacgaaccggacgactcagtggacgtatatttccggcagaatggacacgccctgacaggggaatttgccccgccgcacggaggcatctgaaccggccgccgaaaggaagaaaacttccaaattatgggaaaatccccgcttcgccagatggcgaagcggggctttgctgtgtccagcaggaatggggggccgtgacttggcggaaaagtgtgaacggagcgtaaaggatgcgaaagttcacactttattcataatgatatggtatattatgtcccacaatttagcggatggacgccgtgaggagggcttgtatgaaaaaattccggctgagggattacctgccggtgctgatcatggtcctgtgtgcggcgatattcggcgtgctgctggccacaggggtcatggatctggatacggtgccgcagctggtggcggaccggcctgtgctggcggtgctggtggtgctgggactatatgtgctgaagggcttttccggcgtggtggtatacaatgcgctggtggtcgtggtgtccatggtgctgccgctgccggcggcgctggccgtcaacggcgtggggacggcggtgtgcttatccatctcttacgccatggggcggttcaccaagacggagagtctggagtcggtgctggaccggcatcccaagatcaagcgctatttcagcgccacgcaggaatacggctttgccatgtgctttgccatccatatgctggggctgaacatggaggtgctgggcctgctgctggggatgctgcgggtggattacctgacgtatctggcggggtcgtggctggccattgcgccggggatggtgtgtctggtcatcgccggaaattcgctggatttcagttcaccggtgttctggatctttctgggaatcaacacggtactggtggtgtgcagcgtggtgtacaccctgcgaaagctccgggccgccaaggccaaaggtgagaagcaggacgggtagaggacgatcggctgcgggcggagttgctgtcgtggatgccggaacaggtggactatctgcacgatgccgcctgcgggcggagctgctggggcggtgtcagggagcggaggtgcttcaggtccgggagatggagagccatgaggagttctgggccgactggctgcggcaggacaacgaatacgccatcggcgaccgcaaggccatggaggccggaggtatttgaacttcatcgccatggtgctgcggaagaagtaaaagacagcaaggcccccgaagcgaatggcttcgggggccttgccgtttggggggaagatagagtggaggtcagatgacgtagttgtcgccctgcggaacggccatcagatccgccaaggtgatgccggagaagtatttccgggtcaggtcatagtagccctgccacaccgagagggtgcggcactccccggcccgctggcagggggaggcatccgtttgcaggcaggacaccggggccagctcgccctccgtcacccgcaggatctcccacaggtcgtactgctccgggtcacggttcagccggtagccgccgccgatgccgtggctgctgtccagcaggccggcgtttttcagggcgggcatcagcttctccacatatttcagggagatgctctgccgggcggctacgtccctgatgggggtatagcccacgccccgatgctcggccagatccagcaggatccgaatggaataacgtcctttggtggaaatcatggtgtatgcctcctcatttattcagcctattataccactaaactggtaggaaaagcaagcgccgtgacagttgtcttgcgaaaaatttcggggcagcttttccgaaaaacgcccaccggggagcgcagcggctctccggtgggcgttgatgatagggaaattatttggtgtggaaatagaggatgcccagcgtgcgggggccgcagtgactggagacggtgcagccggcccgtgtgtgcagcacctcgtcaaagggctggtagctgcggacggcggcctccacctgcgccagctcctccggggtgaagccgccggattcggtgatgaaaatgcggcgggtgtcaatgtcatcccggcccttgagccgctcccggatgtactggagcaggcagctcacataggggccacggtacttcttgcccaccatcatctggccgtccttcacctgaatgcaggggcgcaggttcagcatattggcccccagcagggcaacgcccgagcagcggccgcccttgtgcaggaagtccagccgctccaccagaaagctgacgtccagcagctcccggcggcgctccatctcgtgggcgatctcctgagcggtgagcttgccctcacgggtcagctgcgccgcctccagcaccagctggccgatgccggtggagaggctgcgggagtccacggggtagacgttccccacctcctgagcggcgatgcaggcattctggtagcaggcggacatatcgccggagatgtggaaatgcaccacggcgtcgcactcctccagctggcggcggaagaactgggtgtagtcgtacaccgacaccgccgccgtgctgcacattccgccgccggaattgacgtgggcgtagatttcgtcgggggtgatgtccttgccgtctaccagagactggccgtcccggacgatgtacaggggggtgatgcggatgtcgtatttttcaataagctccggggacagatcacaggtgctgtcagcggatattctaatattcatgattagtagatgcctttctgtatattattaaatctcgcaaattggaaacagaaatattatatcacacgaatcctatcatggcaatcccctttttgcaacgaaaaatggcggttttgttcggtatcctgcacaagtgcggcggggcgttcgggaggatggacagtgggggcgaaaaagaagcggtacatggcttgccatgtaccgctgagggggataaggggtcagtccatagtggggcgctcgtcgcccaggaagaacacggccaccgtgccggggccgctatgggagccgatgatggtgccgatgtcgcacaggcggatcttgcccttcaggcgggggaagcgctcctccagcgccgtgatgagcagggcggcgtcctccgggcactgggagtggcagacgaagcagcgctggtcgtagtcccggccgccctgagcgtgctgctccatgacgttcacggtggtctccaccgccttcttcttgccccggaccttgctgtaagccttgatggcgcccttatcatccagccgcatgatggggcagatgttcatgatggtggccaccatggccgctgcgccggagacacggccggtgcggcggaactgggtcatgttggaggagaagaactggtggtggaccttgttgcggttttccagcacccaccgagccgtctcctccagcgtggcgccgctgtcccgcaggtccgccgccgcatccaccagcaggccgtagccggaggaggagcacagggagtcgatgaccacgagtttcttatcagggtacttctcttgcaggagcttggccgccgccacggcgttgtggacggagccggactggccggaggtgaaggcgatgtgcagcagatcgcccttttccagctgggcctcgaagaagtccagataggtgccgacattgatctgggaggtctggggcagcttgcccgcctccagaaaacggtagaaccggggcagagcttccgggtcacggcccatgtcgtccacgtactcctgcccgtccaccacgtaggtataaaacagcacgggaatgtctctgctctgcatataggaatagggaaggtccacggtagagcagcagctgagaatgaatttacgttccatatgtcttcctccggtcaacacacaaattaggcacactgacggggtatattgcaacacactgtctattatatcacatttcgccgccgtgtcaacgaaaagtccctgtggtttccccgttgcaatccggggcgcagtccgatataataaagattcagatcatgatcccggaggcggcatatgttcattctcacagagaaaaatcaggcggcggcggtgcagcaggcgctgcggcagtggctggagggaaccggcgtcacggtggcgcatcccggcggggaggtgctggtgctggagggagagacctttcggctggacggggagagtctgcggcttctgcccggcgtacgggcggtacagcggctgacggagccgtatccgctggcggcccggacggggcatccggaggacacggtggtatccgtgggcaaggcacgcatcgggagggacttctgcctcattgccggaccttgtgccgtggagtcgtcggagcaggtgacctccatcgcccggcaggtgtccgccgccggggcgcagctgctgcgaggcggcgccttcaagccccggacctccccctatacctttggagggctgggggccggggggctggagctgctgtgccgtgcgggccgggagacggggatgccggtggtgtcggagatcaccgatccccggcagctgccgctgttccgggaggtggacgtcttgcaggtgggcgcacggaatatgcagaatttcgagctgctgcgggagctgggacggcaggagaagccggtgctgctgaagcgcagcttcggggccaccgtgacggagctattgcaggcggcggaatacatccttgccggcggcaatgagcgggtgatcctctgcgagcggggcatccgcaccttcgaggcggacagccgggccacgctggatgtggcgggcattgccgccctgaaggagcagtcccacctaccggtgctggccgatcccagtcatgctgccgggcggcgggagctggtggctccgctggcgctggcggcggcagctgccggggcggacggactgatgatcgaggtccatgaccggccggaggaggccctctccgacggacggcaggccctgacctgcggcgaatttgcccggctggcccgacgggtgcaggcactgacggccctgctgcggcaggaggaatgacaaaaggtgaaacagccctcacggcagcgccgtgagggctgtttttatgcggaaaaggacccggcggaaaaggcgggttcaaatctaccatatcacgccgaaggccgggatgcaagagaaattttctccgggagggaaatttcagaggactgccccatgcacagggggcgggaggggaaaatcttgatgattctgcgggcttgacggcgtttttctccggcggtaaaatcggtgggtaaaaaatcagagggcggagaagcgccccgctgtcaaaaggagagggagccatgaagtatatttttgtcaccggcggtgtggtgtccgggctgggcaagggcatctgcgccgcatctctggggcggctgctgaagcagtgcggcctgcgggtcaggaaccagaagtttgacccatacctcaacgtggatcccggcaccatgagtccctatcagcacggggaggtgttcgtcaccgatgacggggcggagacggatctggatctgggccactatgagcggttcgtggacgaggcgctggacgccaactcctccgtctcctccgggaaaatctactggagcgtattgaaccgggagcggcaggggggctatctgggcggcacggtgcagatcatccctcacgtcaccgatgagatcaaaaaccgcatctacgccatggacgacgggcagacggatgtggtcatctccgaaataggcggcacggtgggcgacatcgagagccagccctttctggaggccatccggcaggtggcggcggagaagggcaaggagaacgtgctgtacatccatgtgccgctgatcgtgtccatccccggcagcggggagctgaagagcaagcccacccagcactcggtgaaggagctgctgagcatcggcatccagccggacattctggtgtgccgcacggacagccccatcaccggggacatccggcggaagatcgccctgttctgcaacgtggaggaggactgcgtcatccccaacgtcacggcctccaccctgtatgaggtgccgctgctgctggagcgggaggggctgtgccgggtggcctgccgcaagctggggctgccggtggtggagccggacatggcccggtggcgggccatggtggagaagatccacggggtacaccgccacgtcaccattgcgctggtggggaagtacacgggattgcacgatgcgtatctcagcgtggtggagtccctgttccacgcaggcaccgcctgcgacgcggaggtgtccatccggtgggtggactccgagaccctgacaccggagaacgtggagcagatgctggccgggtgcggcggcgtgctggttcccggcggcttcggggatcggggcatcgaggggatgattttagcggctcaatatgcacgggagcatcaggtgccgtatctgggcatctgcctggggatgcagatcgccgtcatcgagtttgcccgccacgtggtgggctgggccgacgcccacagcgccgaattcaccgccatgacggcccatcccgtcattgacctgatgtccgatcaggtgggcgttaccgccaagggcggcaccatgcggctgggcaagtacccctgccggctggcggaggggagtctggcccggagggagtacggcgcggaggatatctccgagcggcaccggcaccggtacgagttcaacaaccgcttccgctgcgagatggaggcggcggggctgcggctgtcgggcctgtccccggatggcagcctggtggagatcgtggaggagcctgcccaccactggttcgtgggggcgcagttccacccggagttcaagagccgtcccgaccggccgcacccgctgttccggggctttgtgcaggcatcgctggagacggcggaataaagcgtatccgaaaagcggcaggaggaagtgacctcctgccgcttgcgactgtcgataaaccctccggttttttcgacaaaaggcttgcagtctgctgcgcacataatttgtgtgccataggcgcacaaattccacacttgcagcctgagaagtattttctttcacgcatatatcgcaagagaaaatgattttacttctttgccgcctacgggcggcaaactctgcgaggctttttgcggggccaagggggatgtgtgctttgaagcgggaggggcggctttttgtgaaaaaatcccggctgcgccttgaaagccggagggaaattgtggcataatggaaaaaacagcatccatccggcgggaggtcacaccatgaacagaaaacgcatccgacagatgaacacggccctgctgcggcggctcaccggccgccctacggcggagtatttcagcggccagcccctgctggagcggctggagagcgagaactacatccagcgctttgcgcccctttacgacggcactcgactgcgctgcggcgacgtgctggagctgtgccgaccggagctgacagagctttccggcggagagccggaggtggggtggctgcactttgcctatgactttgcccggcggcagctgttcccggagaaggaggcccctacgacctatgacgccggggcggtgtttttcctgtcgcttttgcaggtgctttttaccgccgagcgggagaagctgccctttgacccggcatgggatttcgactttctatcggagacagaggcggcggattgcgcctgcggcgccagctatcgacagatgctgcggcagtggaagcgggagtacgtctatgagatgatgcggctggggctggaggtgacaccctaccgcacgctggagcatatcgccggggtgcatcacatcgcattgacctgcggccgggcgctgcggcgcagcggcacggcggtggatctggcgctggtatccggcagcgccgccggacacgacatcggcaagttcggctgccatccgggggagcgggtagcgtatctgcactactactacacggatctgtggttccgccgccaccggctgacggacatcggccatgtggccgccaaccactcggtgtgggatctggagccggagtatctgtcggcggaggcgctgctgctgatctatgcagacttccgggtgaagcagacccacgacccggaggggcatgagatcacccacatctcgtcgctggcggaggcctttgacgtgattttgaacaagttagacgacgtggacggggagaagcgccgccgctacaccagagtttacgcccgcttgcaggacttcgaggcgtatatgatccgccggggagtggacgtgaccatgcagggggcggacacgcagccgctggcggagcgggcggtggccctgatggaggatgcggaggtgctggagtccctgaccatgcagtgtgtggcccacaacatggagctgatggaccggcttaccgggcagcggagctttgcctccctgctggagcaggctcgtggtgagaccaactggcggcggctgcgggcctatctgggggtgttcgagtcctactccctgtatctgcacattccacagaaggtgcagacgctggcgtttctctatgagctgctgatgcaccgtgagggggacatccgccgtcaggcggcggccctcatgggggagatcatcgcagggttccacgcaggctacgccaaggagcgtccggcggacagccgtcccgacctgcggacggtgacggatctggatcagtggaggctgtatctggagaagatcatctatccggatcataagctgatgccccagcaccgggggtggatccggttcaccctgaaattctgcgtgaagtccctgctctcccgctgccccggacgggaggagcggtttctggcgccggtgctggcgtatctgcggcggccggagcagctggacgatcaggtggcattgcagctgctggatgcggcggcggacctgccgctggagctgtgtacccggccccagctgaatgcactgctccgtgcggcggaggtactgtccgggcgggagagcctgacggtgcaggcggcggccatgctgctgctggatcacgtccacacctccatgccccggcagaagaggcccctgaaaattttgcaggagatggactgcggcaatatgtcgctggctttgctgcgggaggatatctgcgccggggggctgcatttgcaggaggcgcaggtgtcggatatttttctggataacctcaagaccgccacgccgtggatcatcaagcaggtgaacctgcggctgctgacggacgatgcacggaacgaccacggctcggccctgcacatcgccacgcatctttctaacctcatcaaggtcagcgaccgggtcacggtgcgccacggcgcaggactggcgctgttggagatcgctccccggctgacggtggatcagcgcaatgaggtctccgtggagctgtgccgggggctggagctggggcagcaggagttcaccaagtacattcccgactatctggggcggcttgccctatggctgccgccggagcagctggacgagtgtctggcggatctgggggtgactctcagtgcctccagcagccgcatcgtgactccggtgctggacaccgtgggcgtcatctatgaggagtacgacatctatcaccagagattcccggaggagccggaggaagcgtgcctgcgccgccgggaccggctgctggggatgctgatgcggggactggcgggcatcgacggagagacccggcaggaggccatgctggtgctgggacaacgggtgttcggctcggcacaactcagcaacggcgagaagagccgggccttccccctgacggcccgaaaactgctgactacctgccgtcaggaggacggggatgcactgtccttctactatcgggcctccatgctggggcggctgtaccgatttttgacggcccagcggctgcggggcggctttacctttgaagcgccacggcccatcgcctttttccccggtaccttcgatcccttcaccctgtcccacaaggccattgtccgaaccatccgggatcggggcttcgaggtactgctggccatcgatgaattctcgtggtccaagcgcacccagccctaccgcatccggcggcgcattgccgccatgtcggtggcggacgagttccatgtgcagatcttcccggaggatttcccggtgaacatcgccaacccggagaacctccatcggctgcggcaggccttccccggacggaaggtatccatcgccgtgggaagcgacgtggtggcccacgcctcctcctatcgcaagcccgtggagccggattccatccatacctttgaccacatcatcttccgccggcccggtcaggaggccgggggcggctacggcggcatttacggcaaggtgctggagctgacgctgccggagccgctggaggagatcagctccacccgcattcgggaggcggtggacgccaaccgggacatcagcaatctggtggacccggcggtgcaggagttcatctatcggagggggctgtatctgcgggagccgcaggacaagcccctgctgcggacggaggatctggattttaccgactatccccggccggatgcctccatggaggccatgctggaggggatctgccccgccgccatggtggagaagctgtggcagtgcggcgacagtctcctgctgctgcgccacgggatgcaggggcaggtgctgggagccgtcagctaccggcagctggagtcccgtgagctgtatgaccggctggggagtctggagctctccggctatgtgcggcagaagaccgggggtcgggcgctgctcatcagcggactgtgggtgccggacggcaaccagcagcgggagctggggcagctgctgctgacggaggtgtttaccatggcgctggggcgggagtatccctgcgccctgtacgatccgctgcccggtgcagagcacagctatgtgctgaatttgctgcggcggcagggctttgtcccggctccggtgtcggggcggccggtgttggaggtggatatgcgctgccccatcgtgctgagtcacaatgtggacacctccatcaaggctccgctggcctccatgccccgtgtgacggcggcggtatccgctgcccaccggcgcttgcaggaggcgctgacggagctgcagccggggtcactggtgctgagcctgtcggcggggatcatctatcaccggctgctccagcgcatcaccgcacgcaacggcgtacccgccgaaccggtgacgccccggcggcagggaccggatatctgcgtcccctatggaaagctgctgcggggcgtggcggtgcctaataccgtcaccaagaccctgcgtaccgacaaggtatatgaggcggatctgtcggactatgccatcgaggcctacccggagtattcgccgctgccggatcaggtgcggaccatccgggcctttgaccggcccgtcattctggtggatgatctgctccacgacggcaagcggctgcggagcctgtcgccgctgctgaaggagacgggaacgcaggtggatctggtgctggtgggctatctaactggcatgggccgggatctgatggaggaactggggtatccggtggagagcatctactatctgcccaatctgcggatgcggttcgtggagtccaccctgtatcccttcatcggcggagacaccgtgcgacggcgggatcggctcacggaggggcttcagccctctgtcaaccgtatcttgccctacgcctccccggaatttgcccccattgccccggatgtggcgtggcggctgagcctgtgctgtctggaaaacgcaagggacatcctgctggcgctggaggcggagtatcgcttcctctatgcccggaacctgacgctgaaccgcctcagcgaggcggtgatcctgcccctgtatccggataagggcgggtgcatgacctatgatttgagccgtaccgcctccacctatctggaggaggacatcgagctgctgaagcgggtgcgtcccgcagaataaggaggctaacgtgcgatactatgactgcggcggctatcccctgtgcagccgggaggtgctggcgcttccggcgctgcacgctctgccggaggcgggggaggtgctgttcggctttcaccgcacccccggcgccgggcgggataccttcccggtgacggcgccgtccctgctgaccgcggaggagggggtatcgacccttgtgacggcggaggagccggagacagattcggcgctggcggcggccatagccgccgggcgtgtgcgggcggtaaatctgacccacccccggtatgaggagctgctgcctcccctccggaggagggagcgtgtgcgggtgaacctgttggcgctgggcgatgtgggcagcactcttcttatggggctgcggctgctggggggcgacgtcatcgactccatcggcatctgcgacgtgcgggagaacgttccccagcggtgggagatggagctgaaccagatcgtttccccggagggggagagattgccgccggtggagatagtctcaccggaggaggtgtttgacggggatgtgttcctgttctgcgcctcccggttcgtgccggatacctccgttacctccggggatgtccgcatggcccagtatcaggtgaaccgggagctggcggtccgctatgcccgcatggcccggcagcggcgctatggaggaatgttctgcgtggtcagcgatccggtggatcccctgtgccgggcggtgctggaggagagcaaccgggacgagacgggccggtgggacggcggagggctgttttcccatcaggtgcggggcttcggactgggggtcatgcaggccagagccatgtactatgcccggaaggagccacggtttgccgcctttctgacggaggggcgtacctacggcccccacggagccgatctggtggcggccaactccatagagcactacgatgacgcactgtcccgtgagctgacggagcgggtggtcaaggccaatctggagatgcggcggctggggttcaagccctatgtggccccggccctcagctccggggcgctgagcctgctggcctgtctgcgggggcagtggcactgctcgtccacctatctggatggggtgtttatgggggccagaaaccggctgctccccacggggacggagccggagcggctgcccctgccggaggccttgcaggagcgtttgagagataccatggagcgcctgcgggcgatccgatgaagaggagggagcgggatggcactgacggtgctgctgccggagaatccatacagccgggagctgttggcgctgctggggccgctgctgccgccggacagccagatccgtgacccggatacggggctggaggggctggccggacagcggctgctgtttgctctggcgctggacgagagcggatgcagcgagagcgggtatcggatgctgatggccctgcggaggagccggacgctgctggagggctgcgtggcggggctggtggtgacggggcggggagaactatacaccaaggacgccgcccgtgatctggtgttcgccgccaatcaggcgggctgcgcctttctgggacgcccgctggtggaggccaccggttccctgcggaacttccgggtgcaggcccagatcggcggcaccgatgaggagacggccttccgggccgccgtatcggagctgctggagcggctgacggcgtgggaggggcctgcccccgtggggcgggtgctggcactgcacgcctcccagcgcagcacctccaacacgctggcgctgtgggagatggtgcgccgatccctgccgccggaggtgcaggtgcaggagatctgcctgcggaacgggaccatggccgactgcaacggatgcagctacaccgcctgtatgcacttcggggagcggggcgggtgcttctatggcgggccgatggtggaggaggtgtatccggcggtgcgctcctgcgacacgctggtgatggtctgcgccaactataacgatgcgctctccgccaatctcaccgcctgcgtcaaccgtctgacggccttgttccgccagacccggttctatgagaagcggctttacggactggtggtgtccggctactccggcggcgatctgctggcccggcagttgatctctgccctgaacatgaataaggccttctatctgccgccacggttctgcctgctggagacagccaatgagcgggggagtctggtgcgcctgccgggaatccgggagaaggcccggtgctttgcgcggcagatgatggaataagggccgtctgcggacgatggatgggaaaagctgccccgcctgcgatgcaggcggggcagcttttatgcgggatcatagtccggcgggagcaggcggcgcatatcctccggcagcggggcggtgacatccagccagcggcgggtcacggggtgcaggagccggagacggtaggagtgcagcgccggacgggggatgagggcggggtcctcggtgccgtagagccagtccccagccagcgggtggcccacggcggagaggtggagccgcagctggtgggtgcggcccgtctggggcagcagccgcagcagagacagctcccccggcagcagggtctcgtagagcgttcgggcgggaaggcccatagggtccacggtgcggcggagcagagagccggggtcccggctgatgggcagatcaatgctgccggaggggggctgaggcgctcccagacagatgccccggtactcccggagaaaggaatcggtgtgcagcgactccatgcacaggcggtggatatagccggtcttggccacggccatgacgccggtggtgccacggtccagacggttgacgcagtggaagctgccggtgcggaggtagtggcacacggcaccggccacggtgacggtctcctccgtcagggcggagggatggatggcgatgccggcgggcttattcagcaggaggaggtcctcgtcctcccacagaatatccagcggataggccacggggcggatgtgggggttttctcccggcaggtcggagacgtccgccgccagcacgtcgccggcctctgtgcgggtggagacgatgacggggataccgttcagggtgatggcgccgggccgccatttcagcttggccagaaagctgccggagatgcggagctgccggcgcagcagggttcgtaccggcagaccggcctcctgcggggtgacggtgtgggtcaagagacgcataaaaacacctccttatggatactttcagtctaccatattttcgggaaatgtggtagactgaaaatatcaatttacagaaagcggggggatccctatggcatcaaaagtttattgggcagatctgcgggcggatttccacgagaatctccagcagaagctgacccgcctcatgaaaactgccgggatgggcgaaatcgacttcgaccggaagttcgtggccatcaaaatgcactttggtgaaccgggcaatctggccttcttgcggcccaactgggccaagacggtggcagatttcgtgaaagagcggggtggcaagcccttcctcaccgactgcaacaccctgtatgtagggggacggaagaatgggctggatcatctggatacggcgtgtctcaacggcttcaaccccatgaccacgggatgtcaggtcatcatcgcagacggcatcaagggcagcgacgaggtggctgtgccggtggcgggcggtgagctggtgaaggaggccaagatcggccgggccgtcatggatgccgacgtgttcatttccctgacccacttcaagggccatgaggaggcgggcttcggcggggcgctgaaaaacatcggcatgggctgcggcagtcgggccgggaagatggagcagcacaacgccggaaagccccatgtgaaccatgaatactgcgtgggctgcgggatgtgtaccaggatctgcgcccacagcgctctgtccgttgcggagagaaaggccaacatcgatcacagccgctgcgtgggctgcggccgctgcatcgccatctgtccccggaatgccatccagatcgactgggatgagacggtgacgaatctgaaccgaaagatcgcagagtactccaaggcggtggtggacgggcggccctgcttccatatctcactggtcatcgacgtgtcgcccaactgcgactgtcacgccgagaacgacgccgccattgttcccaatgtgggaatgttcgcctccttcgacccggtggcactggatatggcctgtgtggatgccgtcaacgctcagccggtgatgcggggttctgcggccgacggcggtgacacccatgaccacgaccacttccatcgcatccatccggagacggattggatgagctgtctggagcacgccgagaagatcggcatcggcaccagagcgtatgagcttatcaagatctgaagagtgcgatagacgaaagcgccgcccggtggggcggcgctttcccttcggagggtgtgctgcttacgggcggcgcacgctatggggctttgcgggtcagtcctcatggggcttcgtctcctgatagagcatattccacaccacctgataggcgtggagggcctggggggagtggcagaccatggtgacggacagctgcggatgaaggcgcaggaagtccgtgatggccttcagggctacatgagccgcctgcatcagcggatagtggtagacaccggtgctgatggaggggaaggccaccgtgcggcagccgttctccagtgccagcgtcaggcagctgcggtagcaggaggccagttgggcggcctcgccgtggccgccgccccgccagatagggccgggggtgtggatcacgtaccggcagggcaggtcatagccgccggtgatgcgggcctcaccggtggggcagccgttcagcgttttgcactcggccatgagacccggtccggcagcacggtggatggcaccatccaccccggcaccgcccagtagggaggtgttggcggcgttgacgatggcgtcagtgtggaattgggtgatgtcaccctgtacgatggagagattcatgacggcctcctgagatgatgtttgacgttttccggagcaaaggaaattgcggccaaggagaaacaatggacaaaagggagcaggtcaaaccgatagacggggatttatcttccggccagggaattgtcccaccccatgcacgatggtaggacatggtatcttcatcggccagcatcatttgccgaaaccacaagccctcatattttggctcatataaagcaagcgtaattacttccacaaacgccgatttgccgaatggatattcagtatagcacacacgaacttcgatcgcaagtgatcggcagggggacgtatcccttataagctgcatcctgttaagggactttacaaaaatgaacaaaacgtaaaaatctgacgaataacttgggaaatatttacagagacggggagatatgctacaatgtgtctaataatacaagacatggagggatgacggtgaagaagtttgtaccggtttatgagggggagctgcgcaagcacagcattcaggttccccgctgcatcagcgagtgcagcggcattcgcattttcgggcggcgcatcaagtcgctggtgttttccacggatgtggccattatcaagaacatcaacgccgacgccgtcatcgccgtgtatccctttacgccccagccggctatcacacaggccattctgtcggtgtcggaggtgccggtgtttgccggggtggggggtggcctcaccaatgggcagaggtcggccagcatcgccgcctatgccgagcatcagggggcctttgggctggtgtgcaacaccttcatcaccgaggaggccattcgggccatcaaagagacggtggagatcccgctggtgtacacggtggtgtcggaacagacggacgtggccggaaagctggcggcgggggtggatttcctcaacgtatccggggcggcccggacgccggagatcgtggcccatatccgggagcagttcccggaggttcccatcatcgctaccggtgggccgacggatgacaccatccgggccaccatcgaggctggggccaatgccatcacctacacgccgcccaccagcgctgagctgttttccgagagtatgcggaaataccggggcaggtttgcgtaagggactgcggaggagcagaaaaatgaaaagatcagcacccacccgccaagcgggtgggtgctgatcttgtttcagcgggccagatattggcggcagcaggtctcggcctcctgtgccaggcgctcctcgtccaccgtcatgagatggccctgggccacggtgacacggccatgaaccacggtgtagtccaccgggccccggacacctacggtacccagcaccgacttggggtcgaagcaggaacccaccagctccagacggcggctgtcgatcataaagaggtcggcgcacttgcccaccgccagctggccgatatcgtcccggcccagcagccgggcgctgccacgggtggccattttcagcacgtcgtagccggtgggggcccggcggctggcgttcaggcggtggagcaggaaggctacccgcagctcctccataaggctggagccgtcgttggaggcgctgccgtccacggccagtcccacgggaacgcccagctccagcatctccgggatccgggcgatgccggaggagagcttcatgttgctgatggggcagtgggccacgccggtgccggttttggccagcacccgcagctcctcgtcgttgaagtggatgccgtgggcgaaccacacgtcgctgcccgtccagcccaaacgctccatgtactccagagggcggatgccctcccgttggagcatgaaattctcctcgtccttggtctcgcacaggtgggtgtgcagccgcacgccgtactggcgggccagaatggcgctctggcgcagcagctccgccgacacggagaagggagagcagggagccagagcgatgcggtgcatggctccgtaggaggtgtcgtggtacttctcgatgagccgggcggagtccgtcatgatctcatccaccgtctgcaccacgctgtccggcggtaggccgccgtccttgacgctgagatccatgctgccacgggaggcatacatccggatgcccagcgtgtcggcggcggcaaactgggcgccgatcaggtctccggcgtgggtggggaacacatagtggtggtcgaagcaggtggtgcagccgtgcttcatcagctcgcccatgccggtgagggaggagagacggatgacgtcctcgtccagatttttccagatctcgtagagggtcttgagccagtcgaacagctccatattctgcacctgtgggaggttgcgggagaacacctgatacaggtggtggtgggtgttcaccagaccgggatagcacagcatatggctggcgtcgatggttcggtcggcggtgatgtccagatgggggccgatctgacggatgaagccgtcctcgcagtagaggtccacgtcctccagcagttggtccttatcgtcgcaggtcaccagatagcgaatgctgcggatcagcaggcttgccatagatcattactcctttcagaagaatatcccccgaaggatcgggggatattcggtcggtttaccggtcttcccggaagtagttcagacccagagaggtggggggctgatcctcccgctttttccgcagggacacgataatcagcaccaccagcgtcaccacatagggcaggatcttatacagctgcgtggggatgaagggaatcgtcagacgcaggtacaggatcatcagagcgccgaacagcacggagccccaaatggcggacagaggacgccacaggcagaagataaccagcgccacggccagccagcccacgccggacagaccctcgtggttccatacgcagccggcgatggtggtgatgtacaccatgccgcccacggcagagatgccgccgccgatgatggcgcccagatagcgatagcggctgacgttgatgccggcggcatcggcagtagccggggactcacccacagagcgcagctgcaggccggtgcggctcttgttgaggaacaggtgcatgacgatggccagcaccacccccaaatagaagaagatgctgttgccgaagaggatcttgcccacgtaggggatatcctgcatggcctgagggaagggggagctgatgaatacggccttcaggtcgttgcccacggccacgaagccgccctcacggatccgcatgatctcgccaatatactggcccacgccggtgccgaagatggtcagcgccagaccggtgacgttctggttggcccggagggtgatggtcaggaagctgaagatcagagaggcgatgccgccggcgatgaaggcgcacagcagaccgatgagcaccgccagaaaagcgctgggagattccacggccttttcgtagtagaacacaccgccaaggccgatggcaccgcccatgaacatgatgccctccacgcccaggttcaagctgccggatttctccgtcagcacttcgcccagcgtaccgaacagcagaggcgtgccgtaggtgatggcggccaccaccaatgcgatgaacagattcacggtattcagcatgacgcatcctccttactctcggtctgatcagactccgcagcggcgggggcggcgggagcctccgcctgcttgcggcggaagatcatgcggtagttgatgaagaactcgcagcccagcatacagaacagcaggatgccggtgacgatgtcgctgatggaggtaggcacctgcatggcggtctggagggtctcagcgcccttttccagaatggccagcagggcggagatgacgatcatggcgaaggcgttcagctggctcagccatgccactgtgatggaggtgaagcccacgccgttggccacgccgtcatacagggtgttgttggcaccggaggccacgatgaagcccaccagaccgctgatggcaccggagaggaacatggtacgcatcatgacgtggcccacgttcataccggcgtagcgggcggtgttcagggagtcaccgatgacggcgatctcgtagccgtgcttggtgtagttcatgtagaggtgcattaccaccaccagcaccagcacaatgatccaaccgcagtggacgccgaaaacctccggcagccaagcggactgatcgaacatggggatgatctgagagccgggacgaccctcccacgggccgccctgcagccagcggaccacgccgatgatgatgtagttcatcatcagggtgaacagagtctcgttggtgttccagcgggccttgaagaaggcggggatcagcgcccaaatgccgccggccacggcgcccgcagcgcccatgatgagcagcagcacggcgctggggaccttaccgacccagtagagggcgaagtaggaggcggcgatggcgccggccgtgatctggccctcggcgccgatgttccagaagcgcatcttgaagcatggagcgatggccagggcgcagcccaacagggggacggcgatcttcaccgtctggcggatggcggtctttttgcccaaagcgccggtgatgatggtgccgtaggctttgaaggggttcacaccggagatggcgatgaccagtgcgcccagcagcagcgccagcaggatggagcccacacggatggcccacaccgtccgcttgtccatgccctctcgcttggccagacggatcaggggcgttttcatcgagttattcatgagcggctttctcctttccgccgacacgggtcatcagcaggcctacctcttccttggtggtggtgcgaccgtctacgatgccgctgaccttaccgccgcacagcaccagaatacggtcgcacagctccagcagcacgtccagatcctcgccgacgtaaatgacggcagagccctgcatcttttccttggtgaggaggttatagatggtgtaggaggtgttgatatccagaccacgcacggcgtaggcggtcatcagcacggagggggcggtggcgatctcacggcctaccagcaccttctgcacgttgccgccggacatccggcgcacggggaagtcggtgctgggggtgaccacctccagctccttccagacctgcatggccagctcgttggggtccttgcggttgacgaagatgctcttgccctttcgccaggagcggagcatcatgttgtccgtcatgcccatggagccaaccagacccatgcccagacggtcctccggcacgaaggccatggccacaccggccttcttgatctgcatgggggtcttgcctaccagttcagaggcgggcttaccctccggagtgaactggatggagccttcagccacgggatgcaggccggcaatggcctccagcagctccctctggccggaaccggcgatgccggcgatgcccaggatctcaccgcccagagcggtgaaggagacgttatccagccgcttcacgccctcgccgtcgtagcaggtgatgccctttagggtcaggcgggggaccggagcatcatacttgggccggtcaatgttcagggtcacgctgtggcccaccatcatatccgtcagggcctgcggattcgtctcggaggtcttgacggtgccgatgtacttgcccttgcggaggacggccaccttgtcggacagagccatgacctcgtggagcttgtgggtgatgatgacgatggccttgccgtcggccttcatgttccgcaggacggtgaagagcttctccgtctcctgcggggtcagcacggcggtgggctcgtccagaatgaggatatccgccccacggtacaggaccttgacgatctccaccgtctgcttctgagagacggacatatcgtagatcttctgagtggggtcgatgtcgaagccgtagcggtcgcagatctccttgaccttggcgttggcggccttgatgtccaggcggccgccctcgtccagacccaacacgatgttctcggcggcggtgaacacgtccaccagcttatagtgctgatggatcatgccgatgccgtactggaaggaatccttgggggagcggatggatacgggcttcccctctaccaagatctcgccctcgtcagggaaatagatgccggccagcatattcatcagggtggtcttaccgctgccgttctcccccagcagggagaggatctcaccacggttcagggccagattgatgccatcgttggcgacgacgctgccgaaacgtttggtgatgtttctcagctcaatggcgcaaacagtttccaaggctgtcatcctttcgttgtgaattggggcgctgccgccccggtacggtttccggacaatatataatataaatatgttatcataagcagccgaaaaagtaaataaaaactgggcgtctgctatgcagaaagtaccgctgattttttggagaaatcaacaaatcgtcaggaaaactaaaaattttttagataccaccacgaaaaaagggtacggctgcctgtgtgcagccgtaccctttttcagtttacagcttgttgtccgcttggctggggagggagaggcttagttgccgtaggcggagttcagccactcgatcccgtcgatctgcagggtgaagtagggggcggactggaagtaggactcgtggaatgcgccgtcgaacacggcctcctcggcgtcgggggtgaagtcgccgtcggtatccagagcgaaggcgtgggtgacggtctcacccttgacggtgaacttgctggtatcaaagacctgcagagtgccgtccttcagagccttctccacctcggccaccttctcggcagtacccttagcgcagatcttctcgttcagggtggtcatgaccacggagccgtcggcaatgcccttgcaccagtcctgatcgatggtgccgccgttgtagacggtctcgatggcgtactcaaagtagggagcccagtcgatgcgggtgccgatcagggaggcatcgggagcaacgccggtcatgtcgttgttgtagccggtatggaaagcacccttggtctgagccatggtggcgggggtggtgttatcggagtgctgggagatcatcacgcagccggcatcgcacagagcggaagcggcgttggcctcctcagtggcgtcggaccaggagcccacgaactggaccttcatggtgacggaggggcagacgctcttggcacccagatagtaagcggtgaagccggaaatgacctcagcgaaggagaaggcgcccacgtagccgatgacagcctgctcggcggtgatgtcaccgttgtcgatcatctcctgcagcttcatgccagccaccacgccggccacatagcggccctcgtagatgttggcgaaggcgttgtgggtgttctccagactgtcgctgcgggaggcacagttggtgcagccgatgaactggatgtccttgtactcgctcttgccggccaccttcagcatgaagggctcatggccgtaggagttgttgatgatgagctggcagccttcctcggcgcactcgatgttggcgttggtgcagtcgtcgttctcgcccttgttgtacttgatgacccactccacgttgatgcccttggcagccagtgcctcggtggcggcttccttaccgcggatgaagttgtaggtgtagccctgatcgttctcgtcgccgatgcagatcagaccgaccttgatggtgttggtctttttgccatcatcgggtgtgtcgttgttgtccttggagccgcaggccaccaggctcagagccatgaccagcgcaaggatcagcgcaaggatctttttcattcaattttcctcctttaattgttggcagacgcacatttgaaccgaagctgtacgaatgctgcggacagggagaatacccctgtcaactatgcgttattatacaggatttgcgccgggatttcaacggggaatgaggaaaatcacaaatttacggccaccagcacaaagaaagaggagaatttttgtgagaatttataatgggcggagaaaaacccggagcggtgatatggatctgcactgtcaggaattgggtaaactaataaggcggggcacataaggtgtcccgccctatcagggaggcgatgtgtgttataggtggactctcgtaccggtcttaccctcgatgccgtgggcacacccacaggctgccggctgcgccgggagccgtggatcagactgtcaggacggccatcgagggttagaagctgctgcggtacaagggatggggagggggaagatcacagatgcactctcgtacccgttttgccctcgatgccgtccttggccttctccagcagagtgatcagagccacacgaccgggggcggactcggcaaaggacagggctgcctgcaccttgggcagcatggagccgggggcgaactggccctctgcgatatactgccgggccagctccggggtcaggtcactgagccactgctggtcgtgcttgccgaagttgatggccaccttctccacggcggtgaggatgatgagcatatcggcgttcagcagctccgccagcttggcggaggcgaaatccttgtcgatgacggcgggcgtgcctaccagacggccgttgcggcgcaccacggggataccgccgccgcctacggtgatgaccacggtgccgctgtccaccagcgcccggacggtattcttctcgatgacatccacgggcttgggggaggggaccacctgacgccagccacgaccggcgtcctccaccatggtgcagccacgctgggccatgatgcggtcggcggccaccttgtcatagaaggagccgatgggcttggtggggtgctggaaggcagggtcgttttcatccaccagcacctgcgtgactacggtggccacgtccttccggaggccacgggcggtcaactcattgccgatggcattttgcagatggtaaccgatatagccctgactcatggcgccacactccgggaagggcatatccgacttgatggcgccggcctcggcggcggtagagagccccagattgatcatgcccacctgcgggccgttgccgtgggcaatgatgacctcgtttccggcggcgatgaggtccacgatgggcttagcggtcagggacaccagctccagctgctgggcggcggtattgcccagggcgttgccgcctaaggcgatgacgatgcgtttggacatagctgttacctcaaaactttccttagagtgaaatagcgggagccgaggcccccgctattagtttgcctgatttagaaggatttacgcttaccgtcaccctcatccatggccatcagcgtacgaacggggtccttcacctgagacatgaagatcatagcggcgatgatatagggcttgtaggaggcctgcttgtacagaggcacgatgtagcggtcgaagacggagttgtccacctcgccctcctcgcagctcaggccggtgatatcggcgggcaggcagtgcatatacagcgccttgccgtcacgggtgagcttcatcatctcctcggtgcaggcccagtccttatgctcggcgttctgagccagcagcttcttctccaacgcatcgatgccggcctgatcgcccttggcgtacagcttggtgcgctcctccatggcggcgaagggtgcccagctcttgggatagacgatatcggcatcccggaaggcttccttcatgtcgttggtcttgtggaaccgggagccgtacttctcgcagttctggcgggcgatggcctccacctccggcatgacgtcgtagccctcgggatgggccagcgtcacgtccatgccgaagcgggtgaacaggccgatgacgccctgaggcacggacagaggcttgccgtagctgggggagtaggcccaggtcatggccaccttcttgcccttcaggttctccacaccgccgaagtagtggatgacgtgcagcatatcggccatgcactgggtggggtgatccacgtcgcactggaggttcaccagcgtggggcgctgctccagaatgccgtcccggtagccctcctccagagcgtccataaaggtcttctgatacttgtggccctcaccgatatacatatcgtcccggatgccgatgacatcggccatgaaggacaccatgttggccgtctcacggacggtctcgccgtgggcgatctgagacttcttctcgtccagcacctgctcctccagacccagcagattgcaggcggaggcgaaggagaagcgggtacgggtggagttgtcacggaacagggagatgcccaggccggagtcgaagatgcgggtgctcttgttgcgctcccgcagatcccgcagggcgtcggccacggtgaagatggcgtcgatctcgtcgtcggtcttgtcccaggtccagtagaagtcggttttgtacatatcgttgatgtgcagcgtctccagatgacgtgccagctcaagcgtcttgctcatgatagttctcctttatattgttatgtgtagttcagagacttgctttacttgatgtcgttgccggtgagctcctgacggaagctggtggcggagccatccttgttctcaggcttatacaggccgggaacggcggcgtacagagcagcgcaggtcaccagatcctgcttccaggtgatctcattgggggcgtgagcctgagactcggcaccggggccgaagcctacgcaggggatgccgtagcggccctgaatggacacgccgttggtggagaaggtccacttatcggtcagaggacggccggtgcgggtggacatggccttctcatcggcgccgatgcgctcggtaccccacaggttgtggtaggcatccaccagcgcctgaacatggggagcggactccttgttgatccacgtggggaagaagcactcggttttgtacacgtggccggtccatgcgggacggtcatacatatacatggagaccttcacgtccttggcgtacttcttgcaggcgggcagatcctcgatctccttcaggcaggactggtaggtctcgccggcggtcatgcggcggtcgatggagatggcgcagctgtcggccacggcgcagcgggagggagaggtgtagaagatctggctggtggtgcaggtgccacggcccaggaaacgggcatcctcccagtgttcgggattgtacttgggatccagcatcttcaccagacccttgatctccacggagtcgtcggcgggattttcgttgagatcccggacgttctggatgacctcggccatcttgtggatggcgttgtcgccacgctccggggcggagccgtggcaggacacaccgtgcatatccacacggatctccatgcggccacggtgaccacggtagatgccgccgtcggtgggctcggtggaaatgacgaactccaccttgctgcgggcatcctcaggtccgttgaagtactcgttgacgatggactgccagcacataccgtcgcagtcctcctcctgcacggagcctaccaccatgatcttatagccggcggggatgaggcccagatccttcatgatcctggcaccgtaggtggcggaggccataccgccctcctgatcggagccgccgcggccgtagatgatatcgtcggtttcgtagccctgataggggtcggcctcccagttgtcccggttgccgatgcccacggtgtccacatgggagtccagagcgatgatcttgtcgccctcgcccatccagccgatgacgttgcccagcttgtcgaactcgaccttgtcataaccaagagccttcatctcctcggcgatgcgatgcaccacgcccttctcctcacaggactcggaaggaatggcgatcatgtcccgcaggaacttgaccatagcgggcttatagccctcggctgcttttttgatggcttcgaaatccatagtatacctccgttaaaattttatgattgtgacagacgtattcagacaaattatttacccttacagcaccatcataccacagtcccggcagatgtcaaacaaaaattcatgaaaccaaaaagtttttctgaatgaggcattgatttctgcgaaaagtgtggtatcatgtagctgtgaaagattcaaaacaggaggcggatacatggagacaagacggctggaaacgctgaagcagatcgccgccggtgtggcggcccagttcgggagcaactgcgaggtggtgatccacgacgtatcgggcaaccggccggatcacaccatcgtacatatcgaaaacggccatgtatccggccgtaaggtgggcgacggagcgtcgcaggtggtgctggaccaattggcccggcaggacgagcagccaaaggatcacctgtgctatctgacccgtaccccggacggcaagatcctcaagtcctcgtcgctgtacatccgcaacagccggggcggcgtggtagccatcttctccatcaactatgatgtgtcggggctgatgatgatccagaacaccatcggggagctgctttctacccgtgacaaggagcagacggagccggagcgcatcatcaacgtcaacgccgtcctcgacgagctcatcgaccagtcggtggccatggtgggaaagcctgtggccctgatgaacaaggaggacaaggttcgggccatccagtttctgaaccagtcgggggcctttctggtgaccaagtccggcgacaaagtggcaaaatacttcggtatttccaaatataccctatattcctacatcgacgcaaacaaagacggagacaaatgaaacaggaggaaaaaacatgatcgatctgtccatcaacaaggttggcttggagcataacatccagaaggccaaggagaaccacattatcatccccaccattgctcagatgcagaaccccgatctgatcccggagaagatcaaggccaagctttccaccaccggcctgtgggacgtggatcccgtgaacctgttccgtatttcctggcacaacgaggccaaggagaccggcggcctgttccaggcggtccccaactatgtggagatccccaccaagctctccggcgttccctgccgtatcgttgccatgtccggcaagtggttccccaccggctgccacaaggtgggcgcttccttcggctgtctggctccccgtctggtgaccggacagtttgacgccacctatcatcacgccgtatggccctccaccggcaactactgccgtggcggcgccttcaactccaagctgctggcctgtgagtccgtggcgatcctgccgcaggatatgtcccgtgagcgctttgactggctcaagagcatcgccggtcagatcatcgctacccccggctgcgagtccaacgtcaaggagatttttgataagacctgggagctgaagaaggatcccaccatgatgatcttcaaccagttcgctgagatgggcaaccccctgtggcactacaacgttaccggctacgctctggcagacctgttcgaggccatcaagaagcccggtcagaacttcgccggcgcctgcttcacctccggctccgccggcaccatgtccgccggcgatctgctgaaggagcgctatccccacctgaagctggccgtgggcgaggctctgcagtgccccaccattctggataacggcttcggcggccaccgcatcgagggcatcggtgacaagcacatcccctggatccacaatgtgaagaacaccgacatggccatcgccatcgacgacgaggactcccagcgcctgctgcgcctgttcaacaccccggagggcaagcagtacatgaaagacgagctgggcatgagcgccgaggagatcgagaagatgagctggctgggcatctccggcatcgccaacgtgctgtgctgcatcaagatggccaagtactatgaactcaccgaaaacgacgtggtggccaccgtcctcaccgactccgccgtgatgtacggcagccgcatcgaggagctgaaccagcagcacggcgcctacaatgcccacgaggccgctctggatcacgccgtgcatatgctgggtctcaagaccgacagtatgctggagctgacctacaccgagcgcaagcgtgtccacaacctgaagtactacacttgggtggagcagcagggtatggacgtggaggacctgaacgcccagtggtacgacaccaagaacacttgggatgccgttcacgctcaggccaaggagctggatcagctgatctgcgagttcaacgaggccaccggcctgctgaaggctctgtaagcgcgaatcaccccacaagacgccgcaggggcgggacctccgtcccgcccttgcgtttttattcctcttgggatagaatgatctcctcagcctcctgcatcccggcgatcagaagcgctctggcctcctgatagcgctgttggtcgatggcgtcgatggcatctgcggtccgggcgcacagaacagtgtagtatgcggggaagttctggctgttctccaagcgttccacctcctttgggccgaggatccaagtcccccggcgtgttgttttcgaccattttatcgcacggtattacaaaatgcaacacattatgcaatgcttaatgtaccatttattgaagcacaaaatgtaggtacaatttgtcatgtaaaaaagtgacaaggagtgcctatcatgcgtaaattcaagatccccagtccacccagttctaccacgaaatccatccgctttcccaacactgtcatcagggaggtggaggaggccattcagggaacggactgcaccttcaacgcctttgtggtggaggcagtgcgggtggcactggagaatttacgggaagaagactgaatcttatagaacgaggtgtcaccatgaaaaacgtgaaatacggaaagtgcgtccgctgcggcaaaacctatgaagccactccggatctgaccaactgccagtgcggcggtattctggacatcgtctacgactacgactacatcaagtccgtcctcaccaaggagaagctgtcccggcgggagaaccgctccatgtggcgctaccgggagctgctgccggtggaggaaactacccctgatacccctctgcgggtgggctggagccctctgtacgacgagcctaatctggcccgtgcgctggggatccgcaagctgtgggtgaaggatgacggccaaaaccccacggcctccctgaaggatcgggccagtgccatggctgtggccaaggcctatgaggcgggcgccaagaccatcgcctgctcctctaccggcaacgccgccagctctctggcaggcaacgccgccgctgcgggcttcaagacctatatcttcgtgccggagcgggcccccaagggcaaggtggcccagctgatgatcttcggggccaatgtcatctccgtcaagggcaactacgaggagaccttcaagatgtccgccgaggccatcgagaagtacggctggtacaaccgcaacgctgccatcaacccgtatctctccgaagggaaaaagaccgtggccctggagatcgccgagcagctgaactgggagatgccggactatctggccatctccgtgggcgacggctgcaccatcgccggcgtgtggaagggcttcaaggatctgtatgccatcggtttcatcgacaagctgccccggctcatctccgcccagtcctacggctgctatcccatcaaccgggccattcaggaggataagccctgggagccgatggaggagaacaccattgccgactccatctccgtgggtgtaccccgcaatgccgacaaggcactggcggccattcgggagtccaagggccttgctatctgcgtcaccgacgaggagatcctggcggcgcagaggctgctgggccgtacctgcggcgtgttcggtgagcctgccggtgtcaccggtacggcggcgctgaagaaggcctgtgagcagggtctgatcgagaaggatgccacggtggtatcggtggtcaccggcaacggcctgaaggacgtggccaacgccatcaagtccgccggggagcctctgcacatcgagccggatctggacctgatggtgaagagctttgcccagcggggcgtcaccgtggaataagctgtctcatgaaacaaaacagcctgctgcgtgcaaggaatgtgcgcagcaggctgttttttcatggatggaccgttttttgcgatttttcttgaaaatataccgggataagggtataatattcttgagtacttatacacaaaaatcgtttggaaaggaaggaccggtatgtatcaggtaggcgaccgggtggttcaccccatgcacggggcggggatcatcgaaagtatcgtgcaggaacggctgggcggacagctgggcagctactacgtgttccgaatgccctccggcgggctgacgctgaagatccccacaggcagctgcggggccatcggcgtccgggccctgtccacctccggacgcatccgggaggtactgagcgccattccggggctggagatcgaccgcaccaccaactggaaccgacgctatcgggagaacctgaaccggctgaagagcggcgacctgctggaggtggcccgtgtcatcaagggccttatgtggcgggaccgggagaagggcctttccaacggtgagcgcaagatgctccacagcgccaaacaaatattggtatccgaggtggtgctggtggagggacatacctatcccgatgcggagcagcgcattgagcaggccatgatgacgggagcgaagaacgaatgaagctatttgatcggctggggaagctgcgggataggcgccgcccctattgtaccatgatcgtaccggcggcgggggaatcccggcgcatgggcggcggcaacaagctgctgcttccgctggagggggagccggtgctggcccacaccctccgggccattgatgccgccacgctggtggacgagatcatactggctacacggacggagtgtctggcggagatggcggagctgtgccagcgctgcggactgcaaaagcccgtgcgtgtggtggtgggcggtgagacccgcacccactcggtgctggcggcggcgctggaggccaacgaaaaggcccggctcatcgctgtacatgacggggcaaggcccttgatccgcccggaacagatcgacgagctgatccgcttcggggagcgcacctatgccgccgccccggcggtgccggtgtcggataccatcaagcggacggagccgtccacgggccgggtgctggagacgccggaccgggcggccctctttgccgtgcagacgccgcaggtgtttcaggcggagctgctgaaggcggcgcttcagtcggcggtgaacgccgaggtgactctgacggacgactgctccgctgtggagcggctgggcaaggaggtctatctcaccgccggggatccggagaacatcaaaattactaggccgctggacctgcgtctggcggaggccattctggccgagaggaggaaacaggcatgacaggactgcgggtaggacacgggtacgacgtccaccgtctggcgcagggacggcccctgatcttaggcggtgttaccatcccgtgggagaaggggctggacggccactccgatgcggacgtgctgacccatgcggtgatggatgccctgctgggcgctgccggtatggacgatatcgggagactgttcccggactgcgacaatgcctttctgaacatctccagcctgacgctgctggagcgggtgatgaaggccctgacggagcaggggtggcaggtggtgaacatcgacgccacgttggtggcgcaggccccaaagatcgccccctaccggcaggagatgtgctgtgcgctggcccggacgctgggcatccagccggaacaggtgaacgttaaggccactacggaggaacatctgggcttcaccggcgagggactggggatgtccgcccacgctgtggcactgatccagcgggtggagagctgatccatgaacgatatgaaaaagaggaggacgagctgtcctcctctttttgtatggcggataccgcaccggcgggggcgctttcacatagaatgtcccgtgaggaggagtgcagaatgaacgagattcttttcatcgcccgctccgtcacccatgcccagcgtatggtgcgggcgttggagcagtgcggcatccgcagcttcctgttccgggccccggcggggcttaccggcggcggatgcagctatgcggtgaaggtgcggggtcagtggcagcaggaggcccagacgtgcttacagacagcggggctgacgccccttggcatatatgaacggacggatagcggctggcaggaggcggggacatgatctatctggacgctgcggccaccacgctggaaaagccgccccaggtgcggcaggccatggcgcaggcggcggcagagctgtccactcccggacggggcagtcatcccgccgcccgccgggcggaggagacggccttccggtgtcgggccgaggcagcggcgctgttcggcgtgccgtcgccggagaatgtggtgttcaccatgaacgctacccacgggttgaatatcgccatccggtcgctggtggttcccggcagccgggtggtgatctccggctatgagcacaacgccgtctgccgccccctgtacgccataccgggggtgcgcctgacggtggtggatgcgccgcccttccggcgggagcaggcggcggaggaattccgacgggccattctggccggggcggatgcggtgatcgtcaaccatgtgtccaacgtgttcggctgcgtccagccgctggaggagatcgccggagtctgccgcagccgaggtgtgccgctgctggtggacgcctcccaatcggcagggacgctgcccctgcacctgacggagctgggggcggccttcattgccatgccgggccacaaggggctttacggcccccaggggacggggctgctgctgtgcggagcacggcccgcccggccgctgctgctgggcggcacgggaagtgcctcccgtgaccggcagatgcccccgaccctgccggatcgtctggaggccggcacccacaatatgccgggcatcgccgggctgttggagggactgcggttcgtccgccgacggacgccggaggccatcgcctgccgggagcggcagctggcggcggaggcggtgcgccgcctgaaggccctgccgggggtggaggtattcacgcccgcaaacggcccccatcccaccggtgtggtgtccttccgggcggcgggccgggactgcgaagagctggcggaggcgctgggacgccggggtatcgccctgcgggcggggcttcactgtgcgccgctggcccaccgcacggcggggacactggacaccggcacggtgcgcctgagcctttccgatttcaacactccggcgcaaatagaaaagctggcgcaggagctgcaccagctttttcgtgagactgtcagatagaggagctgcttacgaccggccctccagatacccgaagtgttgggcgaagagagcgtccccggcggcgtgcagatcggcacagaaggcggtgtaggcatccagcaggagcaccgcctcctccgtcagctgcgctccgccgccgcttctcccccccacggaggtatgcagcagctggacgcccaagatccgctccgaggacttgacgatggtccacgccttggagtaggccatgttcatggccttggccgcagagcgcagagaatgaaactcctgcacatggcgcagcagctgggcgacgcccggaccgaagcacttctccccggcgaacaggcggacggtattccgatacgataatttctcttccatgtgctcattgtagcaggcttgccgcctgccgtcaatggaaaccgccgtctgaggatggaaattagcgatagcggggcggtacgttggctttcctccataccggggtgattgacgaaaacgggaaaacgtgttatcctcataaaaagagaacggatggaggaaaaacgatgctggtactgatccggggagcgggggatatcgccacaggcattgcgatgcgcctttggagggccggcgtgcaggtggttatgacggatctgccccagcccacggccattcgccgcaccgtgtgcttctcgcaggccatcgtgctgggggagacgcaggtggaggatgccacggcctgccgggcagaggacatccttcaggcccgaaggatctgtgcggcgggagagatctccgtgctggcggacccggagctgcggtgccgggaggaactgcggccggatgcgctggtggatgccattctggccaagcggaatctgggcacccgcatcaccgatgcaccggtggtggtaggtgtagggccgggcttcactgccggagaggactgccatgcggtggtggagaccatgcggggccatacgctgggccgggtcatctatcggggcagcgccctgcccaacaccagcataccgggactcgtcggcggcttcgccggggagcgggtgctgcgtgctccggcagacggcatcctgcaccagctggcggacatcggggtcacggtctctgagggagatgtggtggccacggtggaggggcagcccatgcgctgtaccatcagcggcgtgctgcggggcatcctgccggagggaacgccggtgttccgggggatgaaggccggagatgtggatccccgtggcaaacgggaatattgtgatacggtatcggacaaggcactggccgtaggcggcggtgtgctggaggcggtgctggccctgtccgggaaattgaaggaggaaccataacgtggaagagaatgtaaaactgacgaagctggccaagtgcgccggctgcggcgccaaggtaggcgccggtgtgctggcgcagctgctggagggtatccaggtccacaaggaccccaacctgctggtgggctttgataagagcgacgacgcctcggtgtataaggtatcggacgagctggcgctggtgcagacgctggactttttcccgcccattgccgacgatccctataccttcggccagatcgcagccaccaacgccctatcggatatctacgccatgggcggtgaccccaagctggctctgaacatcatgtgcgtgccggaggatatgcccaaggacacggtgcatcagatccttcggggcggctatgagaaggtctatgaggcgggagccctcatcaccggcggtcatagcatcttcgatgacgaacccaagtacggcctgtccgtcacgggcttcgtccatcccgacaggatcctcaccaacagcggcgccaaggagggggatgtgctgctgctgaccaagcccatcggcatcggtatcctcacctccgccatgaaggccgatctttgctccaaggagagcgtggagctggccatgcgcctgatgaccaccctgaacaagaacggccgggacgccatggtgaagtaccgggtccatgcctgcaccgacgtgacgggctttgccctgatgggccacctgctggagatggcgcagggcagcgacctacgggccgaggtggaggtgtcggcggtggacctgatcccggaggcgctggagtttgcccgcatgggcgtactcccggcggggatgtaccgcaaccgcacctttgccgagcagtgggtggatgccggacagacggagatcgccgtacaggatatgctgtatgacccccagacctccggcggcctgctgatggccgtggatccggcggacgccgatgcgctgctggcggagctgaagggtaccgtgccaagcgcccagcgggtgggcgttatgcgccgttatgagggcggcgcccgcatcgtgctgcactgaaaaggaaatcatagcacagggctttcttttccggaggccctgtgctatactgctgttatcggccccgtgatctgcgggaggaacaaggaggaactgtcatggaaacctacggattggaacagctgggcattgtcaatgcggcggcggtatatcgcaacctgaccccggcccagctgacggagcacgctctgcgccggggagagggaaccctgtctgccaccggggcgctggtggtaaagaccgggaagtacaccggccgcagcgccaacgataagttcatcgtggacaccccggcggtacacgacgatatcgcatggggcaaggtgaaccgccccatggaaaaagagaaattcgacgccattttcgccaaggtcacggcgtatctccagaataaggaggtctacgtctttgacggcttcgccggggcggaccccaagtatactaaatccttccgcatcgtcaacgagctggccagccagaacctgttcattcatcagctactgcgccggcccacgccggagcagctggcggactttacggcggactacaccatcgtggccgcccccggcttcaagtgcgtcccggagatcgatggcacccacagcgaggccgccattctggtggactacgaggcgcatctggtggtgatttgcggcacccgctacgccggcgagatcaagaagtcggtgttctccgtcatgaactacatcctgcccaagcagggggtgttccccatgcactgctccgccaacatcggaacggacggcgactccgccgtgttcttcggcctctccggcaccggtaagaccaccctctccgccgaccctgaccgcaagctcatcggagacgacgagcacggctgggccgacgactccgtctttaacttcgagggcggctgctacgccaagtgcatcaacctctctgcggagggggagccggaaatctacaacgccatcaaattcggcgcattggtggagaatgtggtcatggatcccgatacacgggagttcgacttcgacgacgactcgctggcggtgaacagccgggtgggctacccggtggagtatatccccaacgcagagctctccggcatgagtcccagtgtccccaagacggtgatcttcctcaccgccgacgcctacggcgtgctgccccctatcagcaagctggataggaatcaggccatgtactacttcgtctccggctttaccagcaaggtagcggggacggagatcggcgtcaccgagccggtacccaccttctccacctgcttcggtgagcccttcctgccgctggatccctccgtctacgccgctatgctggcggagaaggtggagaaggccggggccaaggtgtatctggtgaacacaggctggaacggcaccggtcagcgcatgaagctgcgctatacccgtgccatggtgacggcggccctcaccggcgagatcgagaaggcggacttcgtcaccgatcccaccttcggcgttcaggtacccacggccatcgagggcgtgcccagtgagctgctgatcccggagaatacatgggcggacaaggaggcctaccgggccgcctgccgcaagctggcaagctcctttgtggagaacttcaagaagtacacccgcatgagtgctgaggtggtggccgcaggccctaaggcggagtgagccatgatcgagctgaaaattctgctggacgaggtggactaccgctccctgtcagaggtgctgatcccggcactggcggagagcatggccaaggatggcagcgtgctgggcgggatgctgtcccagaacaaggagctggcggcctctatggcccggacggtgctggataagatgccgcaggagaagaaggatgaactgctggtgcagctgctgaaccggaaccgggacaagctgctggaaaagggcaggaccttggccgccgagaacggcgtgcgcctccagctatgcgacgtgtccgccagaaaattctgacccatgaccgctttatccccgtaaggaaaggacccccggccgtcggccgggggtccttgagcctgtcaaaagagggggagcctttcgtcaacggggcggaagggtgtgtgcgggaaacccggaagggtgtcctgcacgatgatgatccccatttttcagagctttttgaagctctgaaaaatgcctcagcgtggcgaaaagtcttttcgacacgctgaaaggacccccggccgtcggccgggggtccttgtatcgattgcggcgtttcgctgttgttactttttcagcgcctgcacggcagcccggagggcgtccacgttctcctgagtggtggcccagctggcacagaagcgcacgccggagtgggtgggatcggtgcgctcccagtactcatagccgaagttcttccccagaatggccaactcctcatcgggcataatggggtactgctggttggtgggggagtcgaacagcagaggatacccggcggagacgaagatatcccggatctgataggccatctcgtcggcgtggcgggaaattctgaaatacagatcgtcagtgaacagggcatcgaactggatgcccagcagacggcccttggccatgcggccgccccgctgcttcatgatgaagcggaagtccttcttcagagccgggttcatgatgaccacggcctcgccgaacagagcaccgaccttggtgccgccgatgtagaacacgtcgcacaggtgggcgatctccggcagggtcaggtcagcaccgtcggccatgacgccgtagcccagccgggcgccgtcgatgaacaggggcaggccgtaccggcggcacacgtcgtacagctccgtcagctccgccttggagtaaagggtgcctccctcggtgggataggagatgtagaccatgccgggctggacgatgtgctccgtggactcgtcgtttctgtgccactctacatactcctgcacctgctgggccgtgatcttgccgttggtggtgggcagggtgatgaccttgtggccggtggactcgatggcaccggcctcgtgacagttgatatgtccgctgacggcgcacagcacgccctgccacggacgcagcacggcggcgatgacggtggtgttggtctgggtgccgcccaccaggaagtggacgtcggcctccggagcctgacaggcgttctggatcttgacccgtgcggcggcgcagtactcgtcctcgccgtagcctatggtctggaccatgttggtctcgttgagctttgccatgagggcggggtgtgcgccctccagatagtcactgttgaaatagatcatgacagtgtctcctttccacgtacagtacctccattttaccccaccggaggccgggtgtaaagacccaaatgcactttcccgccaaacaaggcggcggttttcttgcaaaagcgattgaactgaccgggaaaaaggagtataataaaccgaattatcttatttgctgttttaggaggctttgccttatgactttacaggaatatctcacctcgctgcgccataagaccgtggcggtcatcggcatcggcgtcagcaatacgccgctgctgcgccgcctgctggccgaggggattgccgtcaccgcctgcgacagaagcagccgggagaagctgggtcctctggccgacgagctggaggccgccggagccacgctccatctgggggaggggtatctggacggcctgacgcaggacgttatcttccgcacaccgggcctacggccggacgtgccgcagctgctggcggcgcagcggcagggcagtaccctcaccagcgagatggaggtgttctttcaggtctgcccctgccacatgatcgccgtcaccggcagcgacggcaagaccaccaccaccaccatcatcgcagagctgctgaaggcggcgggcagaaccgtccacgtgggcggcaacatcggtcagcccctgctgtgtcaggcggacaccatggagccggaggactgggcggtgctggagctgtccagcttccagctgatgaccatggaccgcagcccccatatcgccgtggtgaccaatctggcccccaaccatctggacgtccacaaggacatggcggagtatgtggcggccaaggagaacatcttccgctatcagcgccccggcgacatcgccgtgttcaatcaggacaacgacatcacccgtcagcaggccgggcgggctgtggggactgtccgcctcttcagccggcggtccgagccggaagagggcgtgttcctccggggggaggagatcctctgccgccataacggacaggagcgccggatcatgaccacggcggacatccgcctgccgggcgttcacaatgtggagaactacatggcggctatcgccgccgtggagggcctggtgccggacgggatcatccgggacttcgctcgcaccttcaacggcgtggagcatcgcatcgagctggtacgtacctatcacggggtgcggtactataacgactccatcgcctccagcccctcccgcaccattgccgggctgcgctccttcccggagcaggtcattctcatcgccgggggctatgacaagcacattcccttcgatgtgctggggccggagatcgtgaaccatgtgaagctgctggtgctgtgcggcgccaccgcagggaagatccgtgccgccgtggagcaggcccccggctactgccccggccacccggaaattctggaggtgacgcccttccaacgtgccgtagaggctgcccgtgaccgggcgcagcccggcgacgtggtgacgctgtccccggcctgcgccgccttcgaccagttcaaaaacttcatggagcgtggcaagaccttcaaggccatcgtcaacggctggcgggagtaagcaccccgccgcccctcccggcatacactggagcaagggaggtgcgtgccgtgaagagactgcgctatgtgcgcctgtccgccggacggcgggcggccatctggggcattttcctgctggcggcggtgatgggccttatgtgtgtggccgtgctgcatatgaagcccatcctcaccaatctggcggcggccagcgtctccaataccgtcaaccgcatcgtggtcacggcggtctatgacgctgtcagcgccggggaggtggactacgacgatctggtgcatctggagaaggatcagagcggccatgtggcggcggtacgcagcgacatggcggccttcaaccgcctgcaaagccgcattgcagacagcatcctccagcggctgtcggaggtgtccacacgggagctggagatccctgtgggaacgctgacaggctcctcgctgctggcggggcgtggcccctgcatccgcatccggatgcaggctgtgggctccaccaccgccaagctccgcaacgcctttacggcggcgggcatcaaccagaccaagcatcagatcctgctggatgtcaccgtgcagatgagtattctcctgccgggcttccgcacctccacccaagtctccaacgagatcaccgtggcggagaccatcatcatcggcagcgtaccggatacctacacctacttcagcaccacgccggaggaggcagagcagtacgctgaggactatatcttgaacaacggataaggggacgactatggattatcgggaagaaatgaaacggctgcgggataccctcaacgcccacggctaccgctactacgtgctggacgatccgcagatctccgactatgaatatgaccatatgcttcgccgtctggaggatctggaacgggagcatccggaggagatcaccccggactcccccacccagcgggtgggaggtcctattctgacccagtttcaggaggtggagcaccccgtcccgctggagagcctgcaggacgtgtttgacggcggggaggtggaggagttcctgacccacatccgggagaccttttcagatgccgaatacagcgtggagcctaaggtggacggcctgtccgtggcgctggagtatcgggacggcgtgttcgtccgcggcgccacccgaggcgacggccgcatcggggaggacgtgacggagaacctgcggaccatccgctccatccccatgaccctgccggagaagctgccccggctcatcgttcggggcgaggtgtacatggcccgctccgtctttgaagaactgaaccgtcaacgggagatcgagggaaagcccctcatggccaacccccgcaacgccgccgccggctccctgcggcagttggaccccaagatcgccgcccggcggcggctggatatcgccgtattcaacctccagctggcagagggacgagagtttgccacccataccgagaccatcgactatctggcctcccagcagttcaagaccatctcctaccgccgtctgcgggccggggaggagatcatggaggagatccgtcgcctcaacgacacccgcatggagcggccctttgacatggacggggccgtcatcaagctcaacagcctgtcggagcgggaggtgctgggcagcaccgccaaatgtccccgctgggccatcgcctataagtaccccccggagcagatggagacggtgctgcgggatatcgtggtgcaggtgggccgcaccggcgtgctgacccccaaggcggagctggagccggtgcgtctggcggggaccacagtcaccttcgccaccctacacaatcaggattacatcacccagaaggatatccgcatcggggataccgtggtggtgcagaaggccggggagatcatcccggagatcgtttccgtggtgccgggcaagcgtcccgccggggcgcagccctactatctgccccatacctgccccgtctgcggagcgccggtggagcgggacgaggatggcgcagccctgcgctgcaccggggcggagtgtcccgctcagcgtctgcggcacctgacccacttcgccagccgcaatgccatggatatcgacgggctggggccggcggtgatgaaccagcttatcgagagcgggctggtcaagacccccgccgacctctacgacctgactccggcggacctgaagccgctggagcgcatgggggacaagtccgccgccaacgccgtagccgccatctaccagagcaaggagaacgacctgtggcggctgatctttgcgctgggcatccgtcaggtgggagagaaggccgccaagacgctggccgcccacttcggcaccatggacaccctgcgctccgccacggaggaggaactcaccgccatcgacgacgtgggccccatcactgccggctatatccgccagtgggtggagagcccccagtcccgtgacctgctggagcggctccgggcggcgggagtgaacatgacctgccgggaggagcagacggatcgccgctttgccggtatgaccttcgtgctcaccggtgcgctggagaagttcacccgtgaggaagcgggggagatgatcgagcgccggggcggcaaggccgcctcctcggtgtccaaaaagaccacctatgtggtggcgggagccaatgccgggtccaagctgcgcaaggcgcaggagctgggcgtgccggtgctgacagaggatgaatttctggcgctgctggatgcgccggaggaagataaaacagtgtgagacaggaggctgcatatggcacgtcaaaccaacacccgcctgcgggaaaaagtgatctacagcgtctttgtacgcaaccataccaaggagggtacctttcaggcgctggagggcgatctggatcgtctggcggcgctgggtacggacatcatctggcttatgcccatccatcccatcggggaggtaggccgcaaggggacgctgggcagcccctacgccatccgggacttccggggcatcaacccggagtacggcacgctgggggacttcatgcatctggtgggggagatccacaaacgtggcatgaagtgcatcatcgacgtggtgtataaccacacctccccggactccattctggccaccggtcacccggagttcttcctccgggacgaggcggggaatcccacccgtaaggtggcggactggtccgatgtggtggatctggattacagcaaccgtgagctgtggaagtaccagatcgagactctgaaaatttgggcggagatcgtggacggcttccgctgcgacgtggccagcgccgttcctctggccttctggcgggaggcacgggagcaggtggagcgggtgcgccccggctgcatctggctggccgagagcgtccatgccgcccacacgatggccatgcgccgggcgggctactactgcgccgccgacacggaactgtatgatgcctttgatatcacctacgactacgatatctggccctatttcgagggctgcttccagcccaccggcactctccgggagtatacggcgctggtgaactttcaggagagcgagtacccggcgggctatgtgaagctgcggtgcctggagaaccacgatcagccccgcttcgcctcccgtgtggactccgacgaggctctgcggaactggctggcgctgctgtactttgaaaagggaactaccctgctttacagcggacaggagtacgccccccgccaccgggtggatctctttaacgccgacgatgcctactgtgatatgcggctggacctccagccctatctcaagcagctgcgccagatgaagcgcaccctgcccatgtccgcctgcttccagctggaggcggtggaggaacgggctgtggtgggccgctatgacgggccggaggcccgtgttcggggcatcttcgacctgaagaacgctggcggcagtgtggccgtagatctgcccgacggcacctacaccgaccgcatcaccggccaggaggtcaccgtctccggcggcgccttcgatttggcgcaggccccggcggtcatcggctgatttgccccatcggcacaaaagcaggcactgcatcccggcagaattggagaatttaacattgacaattctgtaacacatggtaaaataaaagcacattgacggggcgtctgcgccctgtccgggtgacaggacccgtgcgggcggggcggaggctccgcccgccgtttctgcacggttctgttaaagaaaagacgatctatcatatcccgaaacacagaaaagaggaacgctatggctatacccttccaatatgaatcggaatataagcgcaagctctgcaccccggacgaggccgcccgtgtggtcaagagcggtgactggctggatatcagcatgggctgtgccttcccgtctctgatggatgccgccattgccaaacgcaaggaggagctctacggtgtgaagatccgtggctacctgatccagcagcccatccagatggtggagtgcgaccccggccgggagcattttatctacaacagctggcatatgtcaggctatgagcgcaagctctgcgaccgggggatgtgcagcttcaacccgatggtgttccggaatctgggggcctactatcagcacttcctgacggtcaacgtggccatgatgtgcgtgacccccatgaaccagcacggctacttcaacttctccctgtccaacgcctccgcccgtgcggtgctggataaggcggatatcgtgatcctggagatcaacgagaatctgccgtgggtctacggcggcttggacgagtgcatccacatcgacgacgtggatatgatcgtggagggcccccataaccctctgcccagtatacaaaccccgccggcctcggaggcggagacccgcattgccgagttcgtggtggagaacatggacgacggcgccaccctgcagctgggcatcggctcgctgcccaacgccgtgggccagatgctggcccagtccgatctgcgggatcttggcatccacacggagatgctgtgcgactgctatctggatatgtaccgggccggaaagatcaccaacaagcgcaaggacatcgaccgctataagagcgtgttcggctttgccatcggctccgaggatctgtacgactgggtgcgggagaatcccggcgtggtgacctaccccatctcctactgcaacgctcccagtaccgtccggaacatcgagaactttgtctccatcaacaactgcatctccgtggacctgtacggccagatctgcgccgagagcgccggtacccgccagatcagcggcaccggcggtcagctggactttctggagggggcggcggtgtcccccggcggcaaggccttcatctgtctgacatccaccttcaccgataagcagggggagatggtctcccgcatcacaccgctgttgaatcccggcgacatcgttaccgatccccggagtctggcttactacatcgtcaccgagtacggcggcgtgaatctggtgggctgcagcacatgggagcgggcggagcggctcatctccgtggcccaccccaagttccgggatgagctggttgagcacgcccggcagcagggcatctggatccgttccaacaagcggtaatacccctatcatgaaaaaaagctgagacccgaagtcgggtctcagctttttttcatcatgatggcagtatgtgcttctccggctccttctgatcccggaggatctgcttttggtagcggtcttcctcgctgaacacgcagccgcagtacttctgcatataaaagcccagcgcacgggcctcctgctgtccctgccggaagccggggcggaagtcccggtacaggaaccggacaccgtactcccggcccatgcgctccgctgtctccgccagcagctcatggttctggtagaggctcaccagcagggtggtggtgaagctgtcatagccgttccgggcggcatattgggccgcttgggccagccgcagggcatagcacacgctgcagcggtggtcgatgtccccgcagaccgcccggcagaactcccgcaggccgtaattctcctgcacgataagctccatgccgatgctgggggcgtaggccatcagcgtgtcccgccgggccttgtactcctgataggggtggatgtttgggttataccagtaggccaccggctcgatgccctcgctccgcagctgctggatgcaggagacggagcagggagcgcagcaggtgtgcatcagtgttttttccatagacgctccttaatgccagcgaaaagagagggcttttcggatcttttgccgggccttgcgccctgcttcctgctgccggagagaagctgggccgtcagatagtggttgcggacctgctggaagggctggcgggcgtaggcatcgaagaactccgcccgctgggccgcctgcttcaccggggaggacaaggccggatcgccggtcacggcctccgacaggggccgcagctcccgcttcaggggcagcgtatcgaacacatgggcgccgtggggcgtgttcaccagcagcagggagacaccgctgcgctgctcctgggggtaggcgtccttaggcaggccgcagaatgctcccagcgacagatcgccgggccggtccacggaggcatagggacaggtgtgacaggccgggcgcaggaagaggtttccgaaaaagcccctgccgaactcggacttggacagaggggagtcgaaggtagtgccatcgtcgaaccgtacctggaagcggcgctcccgctgaccgggcagcttgccgcagaattggacggccaccggctgcttgcgcttgatgtaggccatggactgcaccagcttggcccatacgccgggggagcagacgccccgacacagcacgtcgcaggtcagcagcttctccgggtgctctcccagatagtggtaaagtccgtccacctgacagggcgtaccggagaacagcacaggccgcccccgatccagctcccgccgcacctgctgatagataccggtgacgtcgctctggacgggcttggctccccggatgcggggcaggtcctccttgcgctttaccgcttcatggcggacccgcagctgggcgtccatcccggcaccgaacaccacgccgccgccctccagcacatagtccgccagcagggagaatacacccccgcaggtggagttctgccgcacggcattgtcggggttccatgcggcaaagaccgccggctccggatgggcctcccgctggcgcagcaccgggcagatgtgggtgcaatggccgcactggatgcaggcgtccgtcaccgtggggtagaggaagccctcccggtcgggcagcatatggatggcatttttagggcagccctcggcgcaggcggcgcagccggtgcattgactgcgagggggtagctgcggaacggtgtgatcgttcatagcgatgtctcccgtgattcttttagatgtttcgtttttctccattctaccacgggaaagcaaaaatgacaagagcccccgtttccagctatgctaacttctgcgagtaaaaaacagagtgagccgccgtggctctcacggcggctcataggagagagatatgtatgtagaccgccgtatatgcaaggcatatgccgcggggatttttgaaaatgtgagcggagcggggataacctgtcataccccggcttcgatcttataccccttgccccagaccaccgtcacatagcggggattgctggggtccacctcgatcttctcccggatgtggcggatatggactgccacggagttttcggcggcgggaggctcccgccagacctggcgatagatctcctgcggagagaataccttgcagggatgctgcatgaggaatttcaaaatgtcgtactccagcggggtcagggacaccggcttatcgttgacggtgacggctctggcgtcatcgtccagcgtaataccgccgaccttgagggctgccggggagggaggactgagatggaggtagcggcggaggtggcagcgaatacgcaccagcagctccgcctgctgaaagggcttagtgatataatcatcggcgccgatggtgagccccaggatattttcagtgctgtcagtcccggaggtcaggaggatcaccggcaggtcatgcatctgccgcagccgggtgacggtggtaagaccgtccagccccggcagcttcgtgcctagcagggccagatggatatgctgcttggacaggatattcagcacctcccagccggtgcgggcagtgaccacctgatagccctcggcggtgagacaggcggtcagggaggaaacgatctccttttcaccgtcacagacgagaatacgatacatggagaaagactcctttttcagataagatgaaagggtgcggcgggccgaaagcccgccgcaccgtatgtcagaagggaagaagttcctgccggtcacggcttcgcaggtgcgctgcggagacacggtgctcaatgggcttccactggggcttgcagaagaaagccgccagagaaatgggaatgtaggtgaacataaacaaggggaaggtgaacatatacacgatcttcttgacgggggaggtgcggatattcttccactctgtaatggtggtgatgccgcccagcaccagcagcgtcagatacatattcagcaacatctgtcccacggactcaaaagccaccaacagattgtctccggccagagcaccgacgacacccagcgtgaggttgacgaggatactgacggtggagaggacgaaggcgggcatgatggccatggacatatcgaagcaggagaagctgccccggaagatgccccggagaaggcgggcgccgtagtcacggaacacctgcagatagccctgagaccagcgcatccgctgccgccaggactggcggaaggtggtgggctgctcgtcgtagaggacggcgtcgggggcgaaggccaccttgcggccctgaaggatctcgtggacggagaactggatgtcctcggtcagcagatggaagggccaggggccggtctcctccagcacggcccggctgaagaggaagcctgtgccggagacggcgcagctggtacccagcaggctgcgggcgtggttgaggtagcggctctcccgcaggaaccacagggcgtagccggcggagatccagttgtcgccgtagtttttgctgttgcggtagctggtgacgatatcgtggccctgcgagaaggtgcggttcatggcggcgatgtaatcggggtccagaatgttgtcggcgtcaaagacaaagtagccgtcgaacccggcggggtagtcctgctccagatggcccagcagggtctggagggcgtagcccttgcccacctgcacgttattgaagcgctcatagacggtggctccggcgctgcgggcaatgtcggaggtgtcgtcggtgcagttgtccgccagcacgaagatgtgcagcagactctggtcataggtttggctgcggagactgccgatgaggtcggcaatgacggcggactcgttccgggcacagatcagcacggcgtagttgtggggcgtggcctccagcgccgccgccttggcagccttgcgcttggccagcagccacggaacgggaatgtacaggaactgataggtatagcagacaaagaaaacaacggcgatgatgtaattggtcattcgcaaagtatccataaggaagcatcctttctctgtatgaagattctatgtgtattagagattatagtacacataggataccatatgagagacaggttgtcaaggactgggaagtgatacttttgtcatgcttcgg

SEQ ID NO: 12420 - DNA, 15215 bp, Unknown
  gut microbiota DNA sequence
ctcgcaggcgcgccaaagatcggcaaatcatttctggtggcgcagatcgcctatcatgtcagcaccggcaaagcgctgtgggactacgaagtccatcccggtacggtgctgtaccttgccttggaggacgattttcagcgcatccagagccggatgttcatgatgtacggcgtcaacgacaccgaccggctgcactttgcaactgcggcgggcaagatcggaaacgggctggacgagcagcttgagaatttcgtgtgcgagcatcccgacaccaaactcattatcatcgacaccatgcagaagatccgggaggtcggcggcgaagcatacagctacgccagcgattatgagatcatcggtcggctcaagcaatttgccgacaagcactgcatctgcgttctgactgttcaccatacccgcaagcagcctgccggtgacagcttcgaaatgatctccggtacgacagggttgctcggctgcgcggacggttcgctgcttatgcagaagaaaaagcgcacagcgctggaggcaactatcgacgtggtggggcgcgaccagcaggatcagatcctctatctgaaaaaggatgtcgatacacagatttggaatcttgagaaggtggagaacgagctgcacatagaaccgcccgatcatgttctagaagctgtctctggtctagtgtccgcagaacagccggtgtggacaggctcgccctctgcgcttgccaatgccgtccatgtcggtatggcggcaaacgtactaagcaagtatctgaatgtaaagtccggtaggctgctggatgaataccatgtccgctatgagaacaagattcgtcatgaaggtcggtgtatcacactgatcttcgtagccgcaaacgaataatccgtgcgacggctgcgacggttgcaacggtaaatctgataccgccagaataaccgtcgcaatcgttgcgaccgtcgcggagaaaggtcggcagcacgacctttcgcgtcccctgtctccatcgaaaactccgctgagtttgagatggatgtgggcaaaagattatgcgcagagaatgcctgcaaataagctgctgaccacgccggttttgcggtttgtatcctcactgcaaaccgcaaaaccggcagaggcttccgcagaagccgcataccccctcggagagcccacgatactttgcagccgcaggatgaaagtatcatagtgggttattacacttccgcagaagtgctccctcggaagctaccccatcctgcgcaatctgaaatcaggaggtaaactgcctatggcaagaggcgacggtattcaccgtaccaacgcaagaaatatgaggctgaccactgccaaaatcggcaacgcgcagcagcacaacgaacgggaaaaggaatcctatgtcaatcaggatattgtcccggagagaacgcacctcaatgtccatttcaagaaaccggccgccggatatgcggagatgtttgagcagatgaaagaggatgggatcatctccacccgcggactgaaagaggacgcctttctctacggcgaactggtctttgacgtaaacaccgccttttttcataatcacggcggctatgacttcgcaaaacaattctacaccgacgcatacaaatccgcaatagaaatcgtaggcggagagcagtacattctctctgcggtcatgcacgccgacgagcgcaaccgcgccatgtccgacgcgctggggcaggacgtgtaccactatcaccttcatgtggtctacattcccgtcgtggaaaagcaaatcctgtggtcgaaacgctgcaaggataaatcgctggtgggtacgctcaaggaaacgatacagcaggtcagtatgagtaaaaagtgggattccaagcccgcgctggacgagcatgggaaaccgctgctgaacgccaacggcaagcctgttctcaagaaatcctacagtgttttacaggacgatttcttccgctatatgcgcgacaccggatatgatgacgtggagcgcggcgaacgcggtagctcagaggaacacctgacagtgacgcagttcaaggtgcagcaggagcaggcgcggctggcagaactcgcagagcagaaccggcaacaggaaaaacaagcagcaacgctcggcaggcagattgagaaaattcagaatcagcaggtcgatatgcgggctatcgaaaaaatcgaagcgatgtctattcccttctcatccaaggttgccgtggagcgtgaagattttgaacacctgtctacgcttgcgaaaaagtacgttgcagccgagaaaaaggaatccaaactgcaaaaagctctggacgcggcaaacaggctgattgcaaggctcaaggaagagattgccggtctgaagcaggagctttccgagtacaaatccgttcgcagcaagctccgcacatcggacttggaacgcgagaacgcagagcttcgcggaaaagttcaacgctacgaggacgtgatccagcgcaataacctctggcatttcttccgtccacgcagagaaaaagcggcaatgcgggacgatgcccgctgatgccgtgttgagctgagaaaaacggattttatcgaatgggagcgtccgaatcaagcagcatatcatttgggcgctccccatgcaaaaatcagcctgtttttacaggtgtagagctgagaaaaaatcttgaaaatgtgcctgtttttgcagaacaggcagaaatggaggcaatatgaaaaccggactgaccaaacggcagaaaacgacctgcatctattttgatgaagccagcagcaccgtcgaaattcaaacgcacaataccgcgctcaaaaagcggctggcacagtacgcggcagagcatcccgacctgtgcaggcaaaccgacgatgatgaacagggtgggctgactttcgagatcgaccgcagacgattcgctgtccgtctgactgcaccgtattcggatgagcgccgtcacgcagcaagcgagcttgccaagaagaatggattgaaagggcgagacaaaaccggaaacaagtgatttatctgctaatgaccataggaactgccatgctcctatggtcattttgtatgagcaagaaatattggtaattacgcccttgttccctgatccaaagtatgatatactcataatgatttcagcgaaaactgatttttacgcaccaaaatatgaattcaatttgctgttggagtgaaggacatggctgtaagttacaagaaattatggaagctgctaattgataaggatatgaagaaaaaagacctttgcgcagcagcaggcatcagccatgcgtcaatggcaaagctcggtaaaaatgaaaatgttacaaccgatgttcttgtgaagatttgtaccgctttacaatgcgatattggtgatataatggaacttacacccgaggtcaagacctgaaaggaggcggcaaaatgcaaagtaatacagcagcacagatttctacaatagccgccaaaccgattctcaagtgggcaggcggcaagactcaaatgctgggagaactgtttccaaaggttccttcttcctatggacgttacattgaaccttttttcggtggcggtgccttgttttttgcattgcagcccgaaaatgctgtcattgcagatagtaaccccgagctaatcaatatgtatcgtcaagtagcagaccacgtggacaatgtgatcagctaccttgagaaataccaaaatacaagtgaaatgttttattctgtacgcagtttagattgggagactttgcccaaggcagaagctgccgcaaggacgatttatctcaaccggacatgctacaatggactttatcgtgtcaataaaaaagggcaatttaatgtaccatacggaaagtacaagaatccaaaaatatgtgacaccgaagcgcttcatgcggcgtcacaggctttgcggaaagctgatattgtctgtggagactatttccttgttctggagcattatgctcagccgggtgatttcattttcttagatcctccatatctcccgatttccgagtattcggattttaagagatacactaaagaacaattctatgaagaagatcatgttgaacttgcaaaacaagtcatgcgtttgcacgaaaaaggctgtcacgtcatcctgacaaactcaaaccatcctcttgtgcatgaattatatgctccgttcaaaattgatgttatccaaacgaagcgtcacatttcctgcaacggaagtacacgaaaaggcgaggacgtgattgtaaccgttccaccaaagcagcactttcttatcaaacttgcccctaagcctttaccggaacaggtttctgcatatcctcctacacggtttatgggttcaaagagcaaactgttgtctgagatatggtcggttgcttctcagttccaagcagaaacagtagtagatttattctctggttctggcattgtcgggtatatgttcaaggcccaaggtaaaacggtaatcagcaatgattatatgtccatgtcagcaacttttacaaaagcgatggtcgagaacaataatgttaccctgccgctcaatgaggcaaagagtctgctggttacgcacaaggaatccgatcattttgttgcaagcacatttaaggatttgtactatacggatgatgagaatgatctcattgatactcttcgcaccaatattgcgggaatacacgaccaatacaagcgtgcgattgcaatgacagcgttgattcgcgcctgtaccaaaaagcgtcctcgcggtatctttacatacactgggaatcgttatgatgatggacgaaaagatttgcaaaagacactcgcccagcaatttctcgaagcagttgacgcagtaaataaagccgtctttgacaatggaaagccgaataagtcacgaaatggtgatgcaatggatctccgcattgaacaggctgatttggtgtacatagaccctccgtactactcacccctctccgataatgagtacgtgcgccggtatcattttgtggagggacttgcccgagattggaaaggtgtagaaattcaggagcatacgcagacgaagaaattcaaatcctatccaaccccattttcaacaaggaaaggcgcagcagatgcgtttgaccgactattcaagaaatttgcaaacagtgttttaatcgtttcctattcttcaaatagtcttcccacgcaagatgaaatggtggcaatcatggcgaagtacaaaaaacatgttgaagttgttccggtagattacaagtattctttcggaaatcagagtgatgccaaaacgcacagaaattcggtacaggaataccttttcgttgggtattgatcggaggcacagcatgagcgaaaagataaaaatatggctagttggaaataccggtctgcgtaaccccaatcgaattcaggagggattcgcagcgtatgccggctctcctttcgtcggaaatttaagagaagaaaatgaagttgccttcatgaatttcttaaatgaaaaaggcattattcaaaatgaagctggaaaggacgaatccggaagtcacgcacgaaagtggcgcttgatgttttccagaaacggttttatttatccccagctcaagaaaaaagatggtaagcaggaagagttaggaccgcttgatgaaatcacgccatttggtagaacctttctgaaagcagacacgtatcctgctgtgcaagagtgctttcttcgttcaatgagcgttgaacaatatccaacgcctgatggtatgcactatttttctccgttaagatggctcctggcaatcatgctggaacttgagcggcgaaccggttcttctgaattgagcagaatcgaattcgcactgtggggacataccactaatcccagtaataatttggatgaggttgttgataggattcttgatctgcgccaacgaagagctactgccccagccaagcgttcttttgataagaaagaaattgcagccagaggcgagaattacgataagaagcctgataatttcttggattatagcgatatgaatatgcggtatctccgtatttctggaattttccaaagaaaaggcagagggcttattattgtcccgacaaagcatgtgttggcagaaaaacttgcaaaagcgactgcaagtgctatgccgataatggagcagtataaaacactctgcaacggtgcgcctctgcctactgataacgcagatattgcaaagtctttgcttgacgatctgattaagcaaatgcgagagcggcacattttgtttgacatttctgatctcccactaaatactgccgcagaaatcaatattgcacgacagcggcttgagaatattcttgctcaaacagatgaaatccaatatgcaaatgatcagtgcaaccagtggcaggaaatcagagactacatgactctgctgattagaggcgggggcaagctggtatatgacgaagataacgccattgaggtacctaaggacgaaactcctgcctaccttgagtggacactttggcgagctgctttagccattgatcacatggttaataagccttatgaagtccgtggtttcaaattggattctgattttatgccagtttcagcagcgggcggcggcaagggtgatctgtactgcgagtttaatgatttcactattctaacggaagtcactatgtctacgtcctctcgtcaagaagctatggagggtgagcccgttcgccgtcatgtttcggatgcagttctgaaatatgctaagcctgtctacggaatgtttattgcagtgcgtattgacactaacactgccgagacatttcgacatggcatttggtatgcaaagggagatgtaaagcaacgtctggacatcgtacctttgacattggcacaattccagaagtattttgtcgcaatgtttgaggcagaaaaggcaaatcctggacagcttagagatttaatccttaaatgtgagtcaaggcgggatatattagaggcacctgcgtggaagcagtatattgatgcaacggtttccgacaaggtgactgagatcacaaatggagacgtagcacaaaatgcagatgaagcacccctcattcctgccggtgctattgttcaccatacaacgtttggtgtggggcaggttgtagcgatcgaggcacacttcccggagtgttccgcaacaatcgaattgccatatttacattctttgcctgatgatgtaaatttctgccctgacgggagaaatctggtgcatgatcgttttggagaaggaattgcatacaagtacgtaattgttttttcaaaagtcattatgaggttatcctacccgtcagcatttactgatggattgatgattgtggattaaacttacatattgaaaagcggtgaggtaatggaaaagatctgtaagatagtgtactttgacgaagactcggttaccgattatgttcaaatcgtagctggtggagaacttgaaaatacgactgaattattgaaatcaagggatgcacaggaagcgcaaagcgttcaagccaacggaaaagttggaattagtggaatttttaaggcgttgttaggctgggaggctggagcttctgcagatgtatctgctgggctatctttcaatagcagcaagatggtaaaaaatatcgttaagaacacgattttaacggactttctgaaaacaatcgaggatgtcagccaagggagaacgaattcacggcttcccaaaggcaccattaaacaatttaaaggatataaaattagtgcagtagaggactcgttgtcatacatggtaatggtatctccatatttaagtatgttaaaaagcggaagctccatccctgctggtgaattcaatattgctgtcgataaactcgacaatgcccttaggcacgccaaaggatattatgaatttgttggaacaaaaggaaggagccgtgtaatattacggttcaacattaactctttccgaaacagttataccattagtgatttgctaaaaatggacttgagcatttatgctataaaagttggtagaacttctctagagaatcttaatgtcaacaaagaactgggaatgaaagtttctttaattccaaaggataatccatcttacgaacccaatgcggatgctgaagaagccgctgccaccagtccaactttagatgtattcgatgtcttacttgcaggagttgaagcagatgactgatagaattgtaatattctatggttctaaaaaggattttgaggaattggtagcaacagagacgagcaaagaacaagttaccattccatttatggaacttattcagcactataatgcgcgattgcgtccaaatgaatctggcgtaagagaatctgcgcttagtcgcaatattgatgtagataattgcgttgtcagagctgatgattatggttccgttttagaacatgttctctctaattttgttaatgtggttacactcaatcatgacattggaaccttgtttgttcacaacccaccaagaaaagttagagattccttacgctctgcctatggtgatgatatagaatatttaggaacccagtatccggatttgtcaagagaaaagctaaaggaagtctattcaaatattgaaaaggacattttaggacaaagtaattgtaagaagcagatcatcagtggtatgtatcgcctgattgcaaaggcaaataacaagccagttgttttaatgttatatggcccctcaggagtcggcaaaaccgagagtgctaagagtataagtaaaacaatgggcggtgagcttttaagaatccagttctcaatgatgcagactacagaagcatacaattatgtatttggtgctgaacattcaaaaggaagttttgcaagggacatgatggcaagagagtcaaatgttattttaattgatgagtttgataaagttaatccagccttttataatgctttctatgaactgtttgacgaggggcgctatgttgatacaaattacgatgtaaacttaggacaagccatttttctactaacttgcaatttcggtagcgaggaagaaatcaaaaaaatcctaggcccagctatgttttcaaggataggatgttgcattgcatatgaagagctttctacagaacagaaacagaccattgttcataattggtatgaatctattctgtccgtccttaaagctgatgaaaaagaggaaattgaaaaaacagatattttggattggttcataaaaaacgccgaacgatatgacaatattcgcatcctgaaaacaaaattagagaatgccatatttgataggctgtcagaggtgtttatcatttcctaagcacgacaacagttaagcttcatagtattaagcaaatcccataggtttgaaaggagagcagaaaagtgtgagagttcctttgcaaacgccccatatgcgtgatatgacagcaaccacagttgatgttgtctctacttcttcttcaacagcaaacgcatctcctgttgtattacatcaaacggatatgcttagattcaaatttattccaagccttgtgaagaatgagaaagaaccgcagaaatccgtttcgggaaaacttctatacgagaaaaagcgaaaaaaggatgatgttttccctaccgacagcggtgatgtatcttccaaagtctcacgcggttctgttaaagctggcgactggatggaatttcagttggacactagtgaaacctatgaattataccatgggctagcacagctatatgcgttatacggcaatatgaaagacataccgtatggaacagctacttatactcgagttgataatgctttccgtcaattcttgtctataattcaaaatgatccttcagcagctcgaatgattggaaatgaggaaaattttgatctcgtcaaaacactgctaaggctgattactcaaaccgaatctcttgagtctctgaagaagagtcttatggagttgcaggacgataatttgcagcatctaacgacaacactgaatattgaaaaacttcaacgggttgccacactcatggcagacaacctcgataacaatagcgaagagttctggcaaactactgttttcaaggaaaaccagtgggttctggcgcaaatatttgcgtgcccttgcacaattttttctgataaagcctatgttggaggcaagggtgtagacaatagtggcggtaatttgtgtgacttcatatatcaaaatcgactatcacaaaatgtagcgctgattgaaatcaaaaccccttgtacagagataattggaaactcgtatcgcggcacttatagctttagtcacgaattgagcggtgcagtaaatcaggttttgaattaccgtgataatctcacaaaatcctactataccctatgtcaccaaagtgcttctcaatttgaggtgttatctcctaaatgcgttgttataataggcaaacttgcgtccatgaattcgacacaaattgcagcttttgagagctttcgcaatagcttaagtggagtacaaattctaacgtttgatgagctatatcagcgcgttatagatcttattgctattttgtccgaaacaccatctccaacgcagcatactcctaaactagaggacgagggtgacgaattcccattctaaccatattgccaattcttcaacatacatgatataatataaatatctcacacagcaaatttccgctattgatagcatcccctgatagctttttgatagcagaaagtcggataccccataggatggggataattggtatcaaatcaagccaaatggaatcaaacggtctatacaaaaaagtttagagtgcgtttccacttggcgagtgggaataacctcacgcatcaaaagagcgctctccccattccggggagagcgctctttttgatgcagggaattactcagcaaccacagtataccaaatgtcgccgttggtctgagtctgaggcacgaccttgtagccatcggccacgaagttgcgccggcaccctcagcggagttgttggaggggtcgaagttgataaatgtaccaccctgaatgatgaccttcgccgtaccattcttgtaagcgctgtccacacagttgatcagaaagttgtagccatacagatcgccgaatggctcgcaggcgaaggtaccgccgttgatgatgagggtaccctcctgaacctgcacagcagtaccgccgccgtaatagtagccgtcgttgatggtcacagcagcgcccttccggacgttgatgccatagccgccgttgacgccggtatcaatgccgccgttggtcagagcctccttcagttccgtaacgttcaccacagggtaagtggcgttctcgtcataggtgttgttgaagctgtcgctctccacggtgtcctaggtggcgtagacggtgatggcgatgccgtcaatagactcgttcatgtagtcgttaccggcccatcacggcccaagtggatccagcggccccagctccgggtcgtagggcaaacacaccacctcgtatcccccgctgggacggctccccggcaggagcagtccctcctcccccaaccagaaatcgccggggtgcaggaccagcccccgctcttgcgccgtctcccgcaggcagcggcgccacagcgcatggggagggaagcactctcccagtcctaccggcagaccatccgcccacacatcgccccggcagcggtacggccacggccccgtgagctccgtgcagatgctcacaccatgctccgtctcccgaacgatacggctgcggagggccgccgtagtcaccggcagcatcccgccctgttccaaagccctccgacatcgctccgccaactgcggcagcagcacccggcggccatagtccagcagccccctgccccacgctgcataataccggcagaagacccgccttccctcccaatggggcagctctgcctccactgtcagcagcggcagctcctcccaagtcagcacttggggcggaaaaacaggttcaacggtcacagccacagccagccctcctctcgtatcctaccctccactctatgcacccccggcaccgcaggtgcaaaaaagtttccgccgcccgtttactttcatacgttaccatgatacaatatgaaagtacatccagcagaaacggaggaatgttccatggcgcacaagaccaccatcgccaccaaggagaaaaacgagcggctgtaccgggccattctggctctggaaacggaggaggagtgctatgccttcttccaagacctgtgtaccattgccgagctgcgctccatggagcagcgctacgaggtagccaccctgctcagcgagggcatggtgtacagcgacatactggagcgcaccggcgcctccagcgccaccatcagtcgggtgaaccgggctctcctcaacgggaccggcggctacgtcagtgtgctgggcaagatgaaggaggacggtcatgagcagctatgaggggcttgcggcgtcctacgatgccctgaccaccgacgtaggctacgagaagcgggcggactttctggaaaagctcttccgccgcagccgtatccccgtccacacggtgctggatctggcctgcggcaccggcaccatgacgtggctgctgacagaccggggctatgagctcatcggcgtggatggctccgaggagatgctggccgccgccatggagaaaagcggacaggtggagggcatcccccccattttcctccatcagtccatgccccagctggatctttacggcacggtggatgccgccatctgctgtctggacagcctgaactatctcacccgccccgccgatgtgcagcgcaccttccggcggctgcacctgttcatcgcccccggcgggctgctggtgttcgacatcaataccgtggccaagctggcggcgctggatggacaggtctttctggacgagacggaggacacctactgcgtctggcgcacggagtatcaccggggactgtgtacctattacatggatctcttcgaccgccgccgggacggtgcatggcagcgggagctggagatccaccggcagcgggcctataccacagaggagctcaccggctggctgagagccgccgggttcaccgatatccgcacttggggcgacggaaagctgcgccgtcccacggaaaacgagcagcggatctatttttcctgtatcagagagtgaggtcattttcatgagcgatcatattttgcgtgctattacatccgacggcttggtgcaggccgccgctatcagcagccgggacctgacggagcgggcccgacagatccacaagaccctgccggtggccaccgccgccttgggccggacactggccggagcctccatgatgggcaacgccctgaagggccacggtgccagcctgaccctccagatcaagggcagcggccccttgggtaccattctggcggtatccgactccgacggcaacgtccgtggctacgtcaccaatcctcagacggagttgcccctgcgccccgacggcaagctggacgtgggtggggccgtgggacaggagggctccctgacggtcatcaaggacctccacatgaaggagccctatgtgggtaccgtgaacctgctgggaggcgagatcgccgaggacatcgccgcctacttcgtggagtccgagcagatccccaccgcctgcgctctgggggtgctcattgaccggaatcagagcgtcaaggccgccggtggctatctgatccagctgatgcccggcgccggggaggacaccatcgccaaggtggagggcggtatcatggccgccggcaacgtctccgccattctggaaaagaatcccgacccggaggccatgctgcggacggtgctgtcggacttcgaggtgaaggtgctggagcaggagcctgtggagtaccgctgcgggtgcagccgggaccgcatcgagcgggcgctgctgtcactgggtcgggacgaactctccgccattctggccgagcaaggctcctgcgacctgacgtgccaattctgcgaccgggtgtaccacttctccggcccggagctggaggggctgatccagagccttgagaaaaaagattgaaaaaatctgattttcctgttgacatggcggccggtttttagtataattatccttgccgttgcgatggtaagcccttccggcggcaaggacgggagcatagctcagctggttagagcacctgccttacaagcagggggtcactggttcgagtccagttgttcccaccatgatacggccaagtagttcagttggttagaacgccagcctgtcacgctggaggtcgtgggttcgagccccatcttggtcgccatatgcctctgtagctcagttggtagagcagcggactgaaaatccgcgtgtcgttggttcgactccgaccggaggcaccatgacgctgaaacatcggcgtcatctgcgggcgtagctcatctggtagagcgcgaccttgccaaggtcgaggtagcgagttcgagcctcgtcgcccgctccaaaaacagagaaaacggcgaacctcgccgttttctcttatccggtgacatagccaagtggtaaggcaagggtctgcaaaaccctcattccccagttcaaatctgggtgtcacctccatttgaacgaaacggtatagatgcgtctggcgaaaagtcaggcgcatcaaccgtttccgttcataaggaagtattttcttatgagagattggtcgtaacctctgttatggaggctgcggccttttctctttctatggtagatcacggccttgacgattctgcgatactccgcctgaacgggaatgataatcctgtttgcagcggccagcgcattgaccgtaagcatccccaacgagggctgacagtcaatcaggatatgggaatattgtcccttcagtgtgtccagatattgctgtaaaaccgtttcacggctcatggcgtttaccagagaaacctccataccggaaagctgaatatccgcaggcatcaggtcaacgccttctgcatgatgcagaataccttctccggggcgtataggctgatccatcagaattttgcccattgcatccgatagtgtaaatggcagcttgtctggttgcggatttcccaagctgattgtcaggcttccttgcgggtccccgtcgatcagaagtactttctttccgacctgtgccagacctattcccaagttcgcacaggttg

SEQ ID NO: 12421 - DNA, 209 bp, Unknown
  gut microbiota DNA sequence
ctggccaacgtcaccggcgtggagacccccatcatcaccatgctgggctgcggcgtggtaggtaccggtgctgccgagctggctgctgccttcggcaacgaggtacgtattctggacgtcaacatgaacactatgctggccgccaagaagacctcccccgccaacatcacctacatgatctccaaccgctccaatctggagaagtgcct

SEQ ID NO: 12422 - DNA, 27216 bp, Unknown
  gut microbiota DNA sequence
gacagcttcaacaatacctatgatgccaacgccgagtatccggcgatgccctatgtgacctctcacgaggccctgaacaccagtctgacgctggcggatatccccaccaacgaggctaccggcaagcatgatccggtggaagttgcgctgggcaacacggaagccggcgatatcgcttacagcgagcatagttccggctacaccggcaagggtgtgatgctgggcagcaccaagctgaacagctatgctgcggccccggcaaaggctggcgaatacacctttgtgttcaaaaacggcaccatcaacagcgccgccaagggctattcctccatcgacaatttgaaggatacttccgtctatatgctggttcccggcaacagcgatgtggtgttcgagaacatgaccttcaacggcgtggtgagcttcgatatccagatgtacacctctccgtggagctatctgcactccatcaccttcaagaactgcaccttcaacggtatcgtcgtgggctcctgcccggcggagaaggcaacctttgacggctgcaccttcaacaactacaccaatacgacctatgccaataactccaaccccatctggtggcgtgcaggcaccggctactggggtaccggcgcagatgagagtgtccactccctgaaggagtttaccttcgtgaacaacacagtcaccagcacccgtccggtaaagatcgaacgcatcggctggaactgcacggccgggatcacgattctggacaacacctttgacatcagcaagcaggccggagattccgagaccaagaatatggccatcaacatcggtcagagggataataccagcaagtttatcctgacggatgacggcaacaccatctccgccggcacggcgtctctgtatacggcggcgctgggcagcggatccaaccagtatgtggcggtttccggcagcaaggtgctggaccggaacggaaatgataaggtcatcacggccatggtctggaagaccaccaccggcgaaacctttgagatgaagaccatcgactgatctggtggggagcaaagaatagcaaagggggagagccgccgtaaggcggctctccccctttgacgcagttcctgccgctctttgcgaagacgattgtatccgaaaatggatacggaagcgggagacggaaatgtcgatgaagtggcacgtcattttgacaggaaagatgaccgacggccatggaaaatgatgccggaggaagtcagggttttttcatatgctgatattcctgtgaaactttgttacttctgccgaaatttttcttcggaaatctgctatttaccaaaaaaaccggggtgaaggtacaaattctgcaaaatgacaaaaaagttgatgtttgtgttgaaatgcagacggaactgtggtagaatcatagaaacatcggtgttcacagaaaggcaataaatgtacgcctactgtgtgtaccatgatctcagcggctgccggaggcggccctcggaaggagcaggcatggctgacaagaagaaaaaacaggctggccgccgtgcctatctcaacgattttcatcgggatcttaccggggcctatatctatgacggcagccatttccactttgccggggacggctggaagcaggtgctcctgcgtctgtgggcgctggggatcgtgctggtggtgctggtgctggcgggaggcttctccggcgaggccatggcccactgtgtgttccagatcctgccctatctcgtggaggtgggggccgtgggcagcgtcgtctgggcgctggtgcggctgacgtccggcggcgaaacgctgcgggcctacgtctacaaggccaccgttcaggcgctgccgggacgggctgtgctggtgatgtgcgccgccggggccggaatactgggaacggtgttgtgcatgatcgtccacggaacggcgggacggctggcggggctgctgctgtgccttctgctgaaggcggcgcttctggccggggcatggctgctgcggcgctatgtgcagaccctgccgtgggaggggccgccgaaggagacggcggactgatgcttcatgtgtgaacgtcggatagcgatatccgttttgttcaaatatatttaaggaggatcccaatgaaaaaagtaactcgtatccttgctcttgcgctttccgttgtgatgtgcctgagcttggtcgtcggatgcggcaagaaagatggcggcaattccggcgcaaaagacacgctggtcgtgggttattccccgttcagcagcaagttctcccccttcttctcagagactgcttacgatcaggatgtttacaccatgaccgcactcggcctgctcactagcgaccgtactggcgctatcgttgagaagggcatcaagggcgagacccgcagctacaatggcaccgactatacttactatggtcctgccgacatgaccgtcaccgagaaccccgacggcaccgtgtactatgatttcaccctgcgtgacgatctgaagttctccgatggcgagcccatcaccatcgacgacgtcatcttctccatgtacgttctgtgcgaccccacctatgacggtgccagcaccctgtacgctcagcccattcagggtatggccgagtaccgttccggtatgtccaccatgtccaagtatctgggcaagctgggtgagggcagcactgatttctccgtggttgacgaggccactcagaaggctttctgggatgccgtcaacgacggcggtgtgaagttcgctcaggagatcgtggactacatggtcgcgaacgccggcgttgccgagggcgatgtcaaggccgctgctgccggctggggcttcgatggtctggctgacgatgctaccgctaaggatctcttcctggccattgctgccaagtatgactggaacttctccgccatggaggctgagactgccggttccgctctgtccgatctgctgcctgcagatgtgtacgccgcctccaccaaggctgtcaccttcggtgagtccgctgccaacatcaccggtatccagaagaccggcgattacagcatgcgtgttgtgctcagcgaggtctccgctaccgccgtgtatcagctgggcgttgtgatcgctcctatgcactactatggtgagaaggacaagtacgattacgccaacaacaagttcggcttcgacaagggcgatctgtcccatgtccgttccgtcaccacccagcccatgggcgccggcccctacaagttcgttaagttcgagaacggtactgtgaacttcgaggccaacgattcctactatctgggcgctcccaagatcaagcacgtcaacttcctggagtctcaggagaccgataagctcaacggcgtcgtcaccggcaccattgatatcaccgatccttccttcagcgccgacaccgtgaacgctatccagcagcagaacagcaacggcgagctgaacggcgacaagatcaccgtcaacaccgtggataacctgggctacggctacatgggtatctcctctgtggccgtgaacgtgggcggcgatcccggttccaaggcctccaaggacctgcgtaagggtctggccactgtgtttgccgcttaccgtgagctgagcgtcgagtcctactatggcgagcgtgccagcgtgatcaactaccccatctccaacacctcctgggctgctcctcaggcaactgacgccggctatcaggtggctttctccgtggatgtcgatggcaagcccatctacacctccggcatgagcgccgatgacaagtatgccgccgccaagaccgctgctctgggcttcttccaggccgccggctataccgtcgagaacggcaagatcactgccgctcctgagggtgccaagatgcagtatgaggttcagatccccgccgacggtaccggcaaccacccctccttcatgatggtcaccgaggctaagaaggccctggctgagatcggtatggatatcgtggtcaccgacctgtccgatgctaccgctctgtgggatggcatccgggcccgtcaggtagatatgtggtgtgccgcttggaacgccactgtggatcctgatatgtatcagatctactacgccgacgttgccgacttcaacggcgacatgggcaatggctacaaccccatgggtggtcccgatcagggtaactccagctacatgtactgcgtcgctgacgaggagctggataacatgatcctggaggctcgtaagtctctggatcagtcctatcgtaagaccctgtacaaggcttgcctggacaccatcgttgactgggccaccgaggtgcctgtctatcagcgtcagaacgccatcatcttcagcaccgagcgtgtgaagatggagaccgtgctgcccgatatcaccaccttctacggctggctgaacggcatccagaacatggagctgaactaagctccgtgcttataacggtatccggtcggtcctgctgactgactgagcagacccggcgaaccggtggccactgcggtcaccggttcgccccggctgcatatcgggaagcgactttcaaaaaatatgcaggtcgctgcctgatgtgcagtgggctttgcggcatggcgcctgagcggcgccggcccgttgtatcatcagaacggaggttgaatttgtgcgaaaatatgttttgaaaagaatactgatttccattgtgatcctgttctttgtttcgttcatcatctatggcttgatgcgctgtctcccgacgtcctacatcgagagaatggcacagcagaaggccatggcgcccggctccaagagctatgaggagtggctggcccagctggaagagatgtatcatatgaacggcgggatcatttccggcttttttgcgtggctgggcgagatgttcactggcaacttcggtgacagctggctgtacacggtgccggtgctccagaagtttaacgagacggtgtggctgtccttcatcatgggcggtatcgccttcattctggagatcatcattgccatccccctgggcgtgctggctgccaccaagcagtacagcaggacggactatgccatctctgtttttgcgttggccggtatctccctgcctacgttcttctttgcgtccctgctgaagctggtcttttccgtgaagctgggctggttcgacctgtacggtctcatcggccgtaactaccagcagctgtctgcggccggtcagttttgggacaaggcacaccatctggtgctgcccattgtgacgctggtggtcatcagcgtcggttccctgatgcgctatacccgcaccaatatgctggaggtgctgaacgccgactacatccgtaccgcacgggccaagggcctgtccgagcggaaggtcatctatcaccacgccttccgcaacacgctgatcccgctggtcaccatcatcggcggcagtctgccgggtctgttttccggtgctctgatcaccgagaccctgttcggcatccccggcatcggcttgacctcgtataatgccatggtgggcggcgatatcccgttctccatgttctatctgacgtttttggcgatcctgaccctgctgggcaacctgatctccgacgtcctgtatgcggtggtcgatccccgtgtacgtatcgcttaagaaaggaggaaataaacgatggcagatcataacgagaatctgaaggatactttgaatgaagagatcgagcacgccgaccagaagccggcggaggagcactattctctgaacgacgaccgccgtgtgaaggtgctgtcccccggtatgttggtgaccaagcgcttcttccggaaccgtctggcggtgaccggtatggcgatcctcgtgttcatgtttgttttctcctttatcggcggactgatctccccctatgagcaggataagttcttctacgccgataagaccatccgccgggagtttgcggcggtcatcaagaatacggagttccgctattcttcggcggacgattccgtgttcggcctgcctgctcaggcgcaggctatgctggccatccaacagcagaaggacggctttacctaccgtgacaacagattcaccctgaccaaggaggcggaggacttttacagcgtctccgtaaatggtcaggtggtgggtcttgcctacaagagcgtggtgagtccctccgcttcggacgccaccctgtccttcgagttcacctatcaggccctgaaggcctatctcaccgatggtgcggataccttcacggcggacggcaagacctacaccgtggatgaaagcggcagcgtcatggacggcaccaccgaggtggcctatgtcagcccctacgtggtgcaggctctgatgccagacgtgttcctgtcccgtgacttcaaggataagctcatcgacaccatcaacgccggcggcgaaaagttcacctacaccgacgagtccctcatcgtggatgaggaacccgccaccgatgaggaggacggtaccaacagcgccatcacccccgacgacagtcaggtgcctgatgacacgccccagagcgctacggcggagtatgatatctccttcgacgctgccaccaacagctggtccgttctgcaggagcagaccagccgccagtacgataagtattccgctcccagcaaggagcacctgatgggtaccgacggatacggcatggatatgctgacccgcctgatgtacggcggccgtgtgtctctgatgatcggtttcatcgtgatcatcattgagaccgtcatcggcgttatcttcggcggcattgccggttatttcggcggctgggtggataacctcatcatgcgtgtggtggatatcttctactgcatcccctccatgcccatcatcatcattctgggcgccgccatggacgctcagcgtgtggatggctggctgcgaatgatatacctgatgctgatcctgggcttcctgggctgggccggtatcgcccgtctggtccgtggccagatcctgtccctgcgtgagcaggagttcatgacggccaccgaggcctgcggtatcagcgtctcccgccggatcttcaagcacctgatccccaacgtcattcctcagctgatcgtcaactgcaccatgggtcttggctccgtgatcatcaccgaggccaccctgtccttccttggtctgggcgtgaagttccccttcgcttcctggggcaacatcatcagcgacgtgaacaacacccacgtgctgaccaactactggtgggtgtggatccccgccggtctgctgcttctgctgacggttctggccttcaatctggccggcgacggcctgcgggatgcgttcgacccgaagatgaagcgctgagaaaggaggagcctgtatgtctaagaagaatgagaccggctatctgtccgctaaggaatcccggcgcatctcccgtgagaatcgccgcatcacagatcagctggaaaagcgccataagcgcaagaatgtgccggagtccgagtatctgactcagatgaaggatcccaacaacgcactggagatcgagaatctgcatacctacttcttctcggatgtgggtaccgtccgcgctgtggacggcgtctccttcgacgtccccatcggcaagaccgtgggcgtggtgggcgagtccggctgcggtaagtccgttaccagcctctccatcatgcagctgctgcagcggccgcagggccagatcgtggacggcgaaattcgtctgaacctcggcaacggcaagtgctacgacatcaccaagacccccacggagcggatgcagaatctgcggggcaactatatgtccatgatctttcaggagcccatgaccagcctgaacccggtgttccgcatcggcgctcagctggacgaggtcattgccctccacgacggcgagggcaagagcaaggaggagatcaaggaacgctccatccacctgctggagatggccggtatcgccaactgcgagggcgtgtacaatatgttcccccacgagctgtccggcggtatgcgccagcgtgtcatgatcgccatggccctgtcctgcaaccccaagctgatcatcgccgatgagccgaccacggctctggacgtgaccattcaggcccagatcctggatctgctgcggaacctgaagaacaagatcaattcctccatcatgctcatcacccacgatctgggcgttatcgcagagatggcggactacgtggtggtcatgtacgccggtcgtgtggtggagaagggtacggtggaggagatcttcgccaatcccgcccatccctataccatcggtctgatggcctctaagcccgtggtgggcaagaaggtggataagctgtactccatccccggcaaggtgcctaaccccatcaatatgccggactactgctacttcaaggatcgctgcgagatgcaggtggagaagtgcagcggcgagtatccccacatgatccagctctcccccactcatatggtcagctgctatcgttactttgacggaaaggtgggtgaataaccatggcacacgagaagaaagtcgttgaaacgccggtggagtatgatccccagtacattctgcaggtcaaggatctgaagaagcacttccccatcaagggcggtatgatcagcaagaccgtaggccatgtgaaggccgtggacggcgtcacctttaaccttaagcgcggcactaccatgggtctggtgggcgagtccggctgtggcaagaccaccaccggccgcaccatcctgcgtctggccggcgaaaagaccggcggtcaggtgctgtttaacggtaaggacgtgtatgccctctctgacaaggaaatgcgggatatgcgcacgaagatgcagatcatcttccaggatcccttctcctctctgcagccccgtatgcccgtgggcgagatcatcggcgaggcagtgcgtgagcacggtctggtgagcaaggaggagttcgatgattacatcgatcaggtcatggataactgtggcctgcagcccttccacaaggaccgctatcctcacgagttttccggcggtcagcggcagcgtatctgcattgcccgtgcgctggccctgaacccggagttcatcgtctgcgacgagcctgtgtcggctctggacgtgtccattcaggctcagatcatcaacctgctgaagaatctacaggaaaagtacaacctgacgtatctcttcatctcccacgatctatccgtggtggagtacatctccgacacggtgggcgtcatgtatctgggcaatctggtggagtacggcgctacggaggacatcttccgcaacccgctgcacccctacaccaaggccctgttctctgccatcccggtgccggatcccacggtaaagatggatcgtatcgtgctggagggctccattccctccccggccaatccgccggctggctgcaagttccatacccgctgcgccaactgcatggagaagtgcaagaccgaggtgcctcaccagcgtgagatcgagccgggccactatgtggtctgccatctgtacgacgaggcatgagcggcaagcgcaaggagtgggaggacgacggccggacggtagcggatatgtccggtttggaccgaccgaccctgttcggtcataaagagggagtctcccggaagaagcggcaggaggcgtccgacggcgactatgtgccgcccttgtcccgaggtgaccgatgggcgttcctgctgggtaccatgaaggcgtccctgctgatcgcactggcgtttctgggcggtcttggcctgtgtatctggctgttgacgctgcttctgcactgaaccacaccgtccgaaagggtgtgctgcttccggcagcgcaccctttttccataccatacgctgcggctgctctccgggagagcagccacccatgatgagaaaggaagaataagatgatctctgcaatgctgcaatacatccagcgcagccccgactgcttccacgccgtggaggagctgcgccagcgtctgctgcgggagggctacacggagctgcggcccggccggtggcagctgacggcaggagggaagtacttcaccaccaagaacggttcctctctgatggctttccgcatcccgcaggaggcccccgccggcttcctactgaccgccagtcactctgactccccctgcttccgtctgcgggatcatgcggagctgacgggggaatatatccgcctgtccgccgagcgctacggcggcatgatcaacgacagttggctggatcggcccctcagcgtggcgggccgggtactggtacgccgggagggcggactggaggcccgtctggtggatttgaagcgggatgtggccctgatcccccgtgtggccatccacctgaaccgggagaccaacagcggggtcaagtacgacccggcccgtgatctggtggccctgtacgccgccggaaccggcagcggcagcttctatcgggaggtggccagaacggcggactgcgccccggaggacgtggtagccggggatctggtgctgtacaacaaccagccggggaccgtctggggggcggagggcgagttcgtatcggccccccggctggacgatctggcctgtgtgtttgcctgcaccgagggctttctgacggcgcaggagcgggacatggtgccggtgctgtgcgtgtttgacaacgaggagatcggctccgagaccaagcagggggcggcctccgtattcctgccggagacgctggcggccatctcggaggcgctgggtctctccgccgccgaccaccgggcgctgctggcggacagcatgatgctctcctgtgacaacggccatgcccgccatcccaaccacccggagctggcggacaccaacgaggccccggcgctcaacggcggcgtggtggtgaagcactccccccgctacgccacggacggcgtgtctgccgccgtgtttacggagctctgccgccgggcagaggtgccggtgcagcactacgccaaccgtcccgatcagatgggcggggccacgctggggaacatcgccgacaccaagctgcccatccccacggtggacatcggcatggcccagctggccatgcactcctgcttcgagaccatgggcagccgggacgtggaggcctttgtccgggccgtgcgggcctgctatgagagcagcctgcgcttcacgccggagggcgtggcgctgcggtaacagggcagggaagcccacacttcccatgagaaaaccataaaacccacagggcggcgtagaaaaactctgcgccgccctgccacatataaaaacggggacttgcatctccggagctttcatggtaaaataccatgtcaatagaatacggatattgctaccgagtagcagattggaaagcattcgtttgcacatcgtcaggtcttagaagatgtgtatgcgggtgctgtttttttggaggtggatcttatgcggagaaagctgcttcgatacttttccagagccgagaggctcctgtggggcctgtcggcggcgtttatcgtcggatccttctgcgcctttgaccgggagaattatctgacgctggccgcctcgctgataggcgtcacgtcgcttatcttcaacgccaagggaaaccccatgggacaggtgctgatggtgctctttagcctgctgtacggcatcatctcctatgcctttgcctactacggcgagatgatcacctatctgggcatgaccatgccgatggcggtgcagccaacaaaaaccggcagacgccaggcgtctgccggttttttgaaagccatattctgcaaagctgcccatcagggcgtgacggcgcaggtgtgtcccagcgcctcatagctgtcgccgcagacctgccacgagccgtccgtctgccgccggagggtcagggtatgatccacggaggtccgtgtggcggcgatgacgccctgccgcaggtgatccacccgtaggatctcccgaagggtcacctgcaccgtctcgccgctctgctgcatgggggcaaagtaggcggggcggcactgtacatcgtaaatgacggcgtactcgtccacggcggcctccgccagagtctgtgcatcctcccgcaggggagcggtgcagcgatccggggtagcgggggttcgcccggccatgacggcggcccgcaggtccagataattctggatggcggcgaggatatcctccgacgggagggaggcggtgccgcagccactgaggtagccgcacagatcggactcctcgcagtcgtcgcccaccacctgccagccttgggcggtacggttcagggtcagatggtgcagagagccgtagccgaaggtatcgccggtggtctgggtgaggtcgctggaataattggcctccacccggagagaggcccacacctccaccgcatcctcgctgcggtaaatagggttcatgggatacacctgtacccgctgctccccccagatatagctggaccacaggaagccacgggtcagtgcctcctgacgcagggtgtccgtggtatagggctcctccggcagaggatcatcgggtcgggccagagcggtgcaaagcatggtggtataggagaggatggcctgctgctgttcctccgtcagggtctccgcctccccggccagctcacaggtaatgaccggctggaagggcgcacggcgcagggcctcgtcctccgccgtgggagtctggggcgtggaggggtcagagggagcggcaggggatgtaccgcagccgctgagagccgttatcagcagcagtaggacgcacagaagaagtgataggcggcggaacaaacggttcatgggatacctccttctttacaccagatgacgacaaattatgactataatgtataatatagactgcaatatgtcaagaaaaaacagagaatttcacaaaaagtgggcgctgcatagcagcgcccatcggcaggaaaattttcggcagcctcacacctcccggcgaaagacatggatatcgaagctgatggtgaccgccagctcctccagcgccgccagacgctgacagccggacttgggagttttccagtagtagggggtcatctggaacagggcgtggatgtcctcctgccccagcacccggatgcggtcccccacatggcgaatttcggcgtaggcgaagccttcgtagggagtctccttcacctcgttgggataggggtggtcatagagcacctgcttcagctcccacaggtgcttttccgacggcaccacatagagaaacgtgccgccgggccggagcgcccgccgaaattcctccagcgccagcggagagaagcagttgagcagcagatcgatggatcggtccgccaccggcaggtgataggaggaggccacggcgaactccacatccttttcccgcttggcggcccggcggaggatggccttggagatgtccgtccccgccatgcagggggccttcccggcgtcccgcagcgcccggtagacggcgctggtgtagtatccctcgccgcagccggtgtccagcaccgccggatgctccggggcatagtccagcgccagacggcacagggcatcccgcagggcggcgtagtagtccttgctgagaaagacactgcgggcggcggccatgcccttgtcgtcgccgggcattttggaatgcttgcggttggcgggcagcagatgggtgtagccctcacgggccacgtcatagctgtggcccgccggacagcagtagcgccccggctcccgctccagcgccgccccgcagatggggcagacgaacaggctcattgcccacgctcctttcggacggtgacgtcgtggatccactgtcccgtgcggatacgcagggcgcacagcggcaccttcagcagactctccgactggatggcggcggcgatccaccagtagtccgccttcagcaccagcgccagcagcgccgtcaggggcagggccatgcaccactgaggccccacgtccagcagggtggaccagaacacgtcgccgcccgcccgcagcacgccggtgacggcggagatagagtaggcgtggagggggatggacagaaagcccgtcaccgccagcgccgtggcgatggcggcggactcgccgtagagcttgaacagcgggaacaccaccggcacgaacagcgtcggcaccagcagcagagacagggccgtcagccccgtacccaccagcgccgtgaacaccaacagcgtccggctcaggtccatgacctcctgatggctgcggccctcaccgatggatttgccgattatcacggcggtggcggcacccagaccgaagcacaccaccaggaacaggcggttgaggttgcccatcacggcgttggccgccagcatctccacggagttgtcggtgtagcccaggatcaccgtcagcatactgttgccgagaccccatgccgtctcattgaggatcacaggggaggagtacttcacgaaccgccggagcatttcccagccggggcggaagaaggcccgccactggatgggcaggagcctgctgcggacggcacagaagctgcacacggcgaactctgtgatgcgggccaacagggtggccacggcggcaccctgaatgcccagcgcaggcaggccgcacttgccgaagatcagcaggtagttcagccccgtgttcagcaccgtggacatggcgaacagcttcatgccgaagccggcgtcctcggcgctgcgccgggcgctgacatacagggacgagagcatattgaacacataggagatgccgatgagcttcagatacggcgcacccagcaccgacagctcatggttattggacagcagatccatgatctccaccggccacaggtacagcaccgccgccagcaccaccgtcaggccggtacccagcatggccgccacgccaatggcacggctgatgtgctccatatcccgcttgccccagtactggctcaccaaaatgctcaggccgctctgcacgccgaacacaatggagatcagcaggaacaccggcacgttggcggtggtgacggcggccatctgggtgttgcccagccagctgaccatcagcgtgtccatcaggcccagcgtaaaggtgatgagattttgcagagcgatggggccggtcagaccccacagataccggtaaaagcccggttcacgtttcagacattgcagcatggttaacctcacagcatggaaaatctcgtatttttgtggcgcagcagcgcctcgtacagggcgtcgatgtcaccctccgtggtttccggcccgaagctgagccgcagcaccccggcggcggtccttttatccagcccaagggcggcatagccacggctggccttgccccggtgacaggcggagcctgcggacaggcagatgccctgactgcccagatcgttgatgacgttggcactggggtagcccaccagcgacaccgccagaatgtggggggcctcgccgccgcccaccggcaccacgccggggatgctcagcagccgctcccggcagtaggccttgatgcgggccatgtgggcaagcttttcctccagcccctcctgccgcagcgacacggccttggcaaagcccgctatctgggcggtggcctccgtgccggagcgcagaccctcctcctgcccgccgccggccagcaggggccgcaggttccgcaggtccggacggacgtacagagcgccgatccccttgggtccgccgatcttatgggcggacaggctcatcagatccacgccccaccccgccggagcgcagggaaccttcagaaagccctgcacggcgtcgcagtggaggagcgcacggctcccccgctccttcagcagccgggcgatatccgccacggggaagagacaccccgtctcgttgttcaccagcatcacggacaccagtaccgtgtcctcccgcagggcctccgccacctgtccggcggagatatgccccgtgcggtcgggcttgaggtaggtgacctcatacccctcctgttccagctggcggcagggctccagcacggcgctgtgctccacggcggtggtgatgatgtgccgccccgtgtgccggccctgccatgcggcggcccggatggcccagttgtccgactccgtgccgcaggaggtgaagtgcagggccgatggctggcaccccagtgccccggcgatggtgcggcgtgcctcctccaccagctccttggcctcccggcccagaggatactgggcggaggggttgccgaactgatggcgcagcacatcgtacatggtatccgccacagcctccggcaggggcgtggtggcggcgtggtccagatagatcatagcgcagacctcccgttttttcagaaaaaccgacgccggacaggggagaggggcaaagaccctcttgccaccggcggccggataccgtataatgtagacaaattcttattatatcggagaaaaccgcaaagtgcaaggagaatccccatgcgagttgctatttacaccctcggctgcaaggtcaaccaatacgagacgcaggccatggagcaggagcttcagcggcgtggccacacgctggtggactttgagtccccagcggacgcctacatcatcaacacctgctccgtcaccgccgtcagcgataaaaaatcccggcagatgatccgcagggccaagagccgcaatccccaggccgtggtggctgcctgcggctgctatgtgcagacccacaccccggaggctcaggagctgggcatcgacctcatcggcggcaccggcgaccggatggagtttctgaccctgctggagcaggcggcggaggaccaccgcagccgtgtggcggtggatgaggccctacgccgccgcaccttcgaggtgctgcccgccggaggcatggcagcccggacacgggccatgctgaaggtggaggacggctgcgtcaacttctgcacctattgcatcatcccctacgcacgggggccggtgcggtccctaccgctggaggaggcggtgcgccagacggagcagctgcggcgggagggctaccgggaggtggtctttaccggcatcgagatctcctcctggggacaggatttcaaggacggccgcagcctcatcgacctgctggaggcggtgtcgcaggcggcgggagagatgcgtctgcggctgggcagtctggagccccgcaccgtgacggaggatttctgccgccgggccgcccggctccccaacctctgcccccagttccacctgtccatgcagtccggctgtgacgccaccctgcggcgcatgaaccgccggtatgacaccgcccggttcctccggtctgtgaccctgctgcggcagtactttccccggcccgccatcaccacggacctgatctgcggcttccccggcgagacggaggaggaattttcccagacgctggccttcctgcgccgctgcgactttgcccagatgcacatcttcccctactccatccgccccggcacaaaggcggcggagatggagcaggttcccggcccggtgaaggaggagcgtgccgcccgtgcgtcggcggtggcggcggagctgcaccgtgcctatctgcagggctgcgtaggccagacttatcccgtgctcttcgagcagcgcaaggacggctgcgccgccggtcatgcccccaactatatgccggtggaggtgcagacacagggggattaccataacaccgttcgtcatgtgaagatcacaggtgtagtaaacgatatcctgatgggagaggtgacataacatggaacacttttttgcctatacgtcccggatgcggttcatctcccgctgggcgctgatgcgtaacagccagccggagaacattcaggagcacagccatcaggtggcagtgctggcccatgcgctggcggtgatccgcaaccgctgcttcggcggtcaggtggaccccggcacggtggcggtggcggccctgtaccacgacgccagcgagatcctcaccggggatctgcctacccccatcaagtactacaatcccgccatccgggatgcctacaagcaggtggagcacatcgcctgcggcaagctggtggggatgctgccgccggagctacagtcggactttgccgaggccctgacccccacagacccggaggtggaggagttggtgaaggcggcggacaagctgtctgcccacatcaaatgtctggaggagctgaaggccgggaatctggagttccgccgggcggcggagcagacagagcaggcgctggacgatttccatctgccggagctgacctatttccgggagcatttcctccccagcttccggctgacgctggatgagatggagtaaaatcaagcgcaggagagacggctcgtctcccctgcgcttgattcgttatgagccttgttcgccttgcgttctgcgtatggcggcaggcttttcgcagctgtgtcctctgaccaccccacagcgatcttctgccgtggcacggcatcacccatgctgcggcaccggccatgatatcccgccgaagcaggcaccacacatacagccctccgccaaaaagaaaagcaggcggaaagccacgcttcccgcctgtcaaggacacacgatcattatttgccagcggccacggacttgacctgcttgacctcacggccattgtaggtaccgcactccgggcacattctgtgaggcagatgcagcgcaccgcacttggtgcaggccaccagaccgggagtcgccagcttccacacggagctgcgtctcttgttgcgtctttgcttggatacttttcccttgggtactgccatgttgacacctccttggtcttaactgcctgagcagtaattgatagtatagagaagcgctttactccttctcctgcaggagactggccagcttggcaagcctcggatccacctgctttttacagcggcagggctcccggttgaggttcacgccgcagccggggcaaagacccttacagtcctcggagcaaagagttttcgtgtccatgtcgagaatgaacgcatctctggccagttccgccagatccacctcgtcgtgctccagcaggatgatctcgtcgctgtcctcctcctgcttctcctcggccagaacgcacgagtaagaaacggacttgggcgcatcgaattcctccatgcaccggtcacacacgcagtgcagcgtcgtatgcatctccagctggcacagcagaaccccggcctgattccgaatacggccttccacagtgaccggacgggtaatgggcatagcgccgccgaaatccagctgagacagatccatctcaaaccggacctcctgactggcgtcgggggtatgcagcagtcggtttacattcaatcgcatagtacacctcttaatgacacgaatagtattatagaggattgcacccggcttgtcaaacattttctgcgaaatattttgacaatttccgaaaatcaggtacaatagccttaaacagcatccatcaaaggaggaaacacgccatgcgggagctgaccatcgggaaaaatgacgccggacagcgggtggatcgcttcgtctccaaggccctgccgctgctgccgccggccctgctgcaaaagtacatccgcctcaagcgcatcaaggtcaacggaggccgggcccagcgggatcagcgcctgcaggagggggacgtgctgcaactatacatcaacgacgagttcttcgacaagcccagagaggataacctgttcctcaccctgttccgtcccagcctggatatcgtctacgaggacgagaatctgatgctgctgaacaagcgccccggtctggtggttcacgccgacgagacggagaaggtcaacaccctcatcaaccacattcaggcatacctctaccagaagcgggagtggaatccccggtgggagaacgccttcaccccggcgctgtgcaaccgcatcgaccgcaacaccggcggcatcgtcatcgccgccaaaaacgccgagaccctgcggatcatcaaccagaagatccgggatcgtgagatcgacaagcgctacctctgcatcaccgtgggtgcgccacggcccccgcagggggaggtatcctgcttcctgctgaaggacgaaaagaaaaagcaggtggccgtataccacaggcccgtccccggcggcaagaccgccgtcacccgctaccggacgctggagacccgtggggagctgtccctgctggaggtggagctgctgacgggccgcacccaccagatccgtgccaccatggcggacttgggctgccccctgctgggggacggcaagtacggcgacgggcaggtgaaccgccgctacggcgagacccggcaggctctgtattcctaccgcctgaccttcgactttcccacggacgccggcctgctgaattacctccggggccgcagctttcaggtggatagcgtccccttccgggaaaaatacttcggctgaccgccgccccggctgcccggcgcagccggggcttttttctgccattccccggaaatctccggcaaaaacgagtaaaattctccaccgtgcagaattttccttaaacagggaaaaatattcattgacatttcttcgctttttatatatagtgaatctgccaaatttcaacgagagatatcaggcctatccgcaaggcctccctttgaacagagaaaagaggtagatattatttaacgaacgggggaggataaatgtccaaagagttgattcgcctgcgggacctctgcatggcgtttgacgacgagctggttctcgatcacatcaatctgtatatcaacgattccgaattcctcacactgcttggccccagcggctgtggcaagaccacgacgctgcggatcattggcggcttcacgacgcccacgtcgggagacgtcacctttgacggtgtgaggatcaatgacgttccgccgcataagcggcagatcaacaccgtctttcagaagtatgccctgtttccccatctagatgtctttgaaaacatcgcctttggcttgcggatcgccaaggtgcctgccgacgagatcgagcagcgggtgacagagatgctgggcgtggtgagcctgaagggctttgagcaccggaggatccatcagctctccggcggccagcagcagcgtgtggccattgcccgtgcgctggtgaaccggcccaaggtgctgctgttggacgagccgctgggtgccttggacctgcgcctgcggaaggatatgcagatcgagctgaaacggatccagcagcagatgggcattacctttgtatacgttacccacgatcaggaggaggccctgaccatgtccgacaccgtggtggtgatggacaagggccgtatccagcagatcggcaccccggaggatatctacaacgagccgaagaacgccttcgtggcggattttatcggtgagagcaatattttgaacggcgtcatggtccgggacaaggtagtgaagatgtatggccgggagtttccctgcgtggacggcggcttcgcccccaacgagccggtggacgtggtcatccgtccggaggacatcgacatcgtccccgtggagcaggggcagctggtgggtaccgtcaccagcgtcaccttcaaggggatgcagtacgatatcattgtggacttccggggcttcaagtggctcattcagaccacggatcactccccggagggcgcccgcatcggcgtgaagatcgatcccgacggcttccacatcatgaaaaagagcgaatactccggccagttcggagattacagctcctactccgaggagtatgaggagctggcggacgcctctctggagacggacgaggaggagagcggggatgaagaataagctctcccggttcgccgtaccctatgaagtgtggatggcgatcttcgtggtggcccccattgtcattatggtggtctacgccttttcttccgccgacggcggctttacgctggataacttcgtgcagatggggggctatacggaggtgttcctccgttccttcaagctggccatcatcgccacggtgatctgtctgatcatcggctacccggtgtcctatctcatgagccgggagggcgcctcctttcagcggacggccatggtgctcattatgctgcccatgtggatgaacttcctgctgcggacctattcgtggatgaccattctggaaaacaacggtcttttgaaccagctgttccagaagatcggccttatcagcctctataaccacatctttggcaccaacttggagtatttccccatgatgaatacccagggggccgtggtgctgggcatggtgtataactatctgcccttcatgatcctgcccatctattccgtcatcatcaagctggaccactccctgctggaggccgcccgtgatctgggggccggcagcctgacggtgttccgccgggtgatcctgcccctgtccctgccgggcgtggtgtcgggcatcaccatggtgttcgtgccgtcggtgtccaccttcgccatcagccggatgctgggcggcggcacggagctgctgctgggcgacctcattgagcggcagtttctggggggcgcctataacccccagctgggcgctgccatttcgctggtgatgatgattatcgtgctggtgtgtatgctggtgatgaatcgcttcggtgagggcgaggaacaggcggtgaagctatgagccgcacccagaatcgctttggcgaccggctgctgatggcgctggtgttcctgtttctctatgcccccatcatcatcctgatcgtcttttccttcaacgccggcaccagctccagcgtgtggaagggcttctccctgaagtggtacgagtcccttctctccaaccggctcattatgaacagcgtctataccacgctgctggtgtcgctgctgtccaccatcgtggcgtccatcgccggcaccttcgccgccatcggcctgtacgccatgagccgccgccgtcgtgcggcggtgaacgccgtcaacaacatccccatgatgaatgcggatatcgtcaccggcgtcagcctgtgcctgctgttcgtggtgttcttcaacggctggggcgctttcgccgggtggatgaattcgtggcagtctttggtggtgctgccggagcgcctgaccatgggcttcggcacactgctgatcgcccatatctgcttcaatatcccctatgtgattttgtccgtggggcccaagctgcggcagatggaccgcaacctcatcgatgcggcgcaggatctgggctgcacgtggatgcaggccttctggcgtgtggtgatcccggagatcaagcccggtatcgtctccggcgctctgacggccttcaccatgtctgtggatgacttcatcatcagctacttcaccgccggtaccagctcctccacgctggccatgaccatctacggcatgaccaagaagcgggtcagcccggagatcaacgccatctccaccctgctgttcgtgacggtgctggtgctgctggccgtcgtgaacctgcgggagagccgtgccgaccaccgcctgaaggcggagcaccacaccgccccagcggccccccaccccaaccgcagcaagctccataagaccctgcgtcgtgtgggggcgggactggcagcctgcgtgctggtggtgacgctgatcgtcaccggccgctccgcccggtccgaccgggtggtgaacgtgtgctcctggggcgagtatatcgacgagagtctcatcacccagtttgaggaggagaccggcatccgggtcaactaccagacggcggagagcaacgaggctctgtactccctcatcaaaatgggcggcgccgacttcgatgtcatcgtcccctcggactatatgatcgcccggctcattgacgaggatatgctggcggagttggattacagccacatccccaactttgacctcattgccgatacctataagaacctcagctacgacccggagaacaagtacaccgttccctatacctggggtacgctgggcatcatctacaacaccaccatggtctctcagcccatcaccagctggagcgccatgttcgacccccagtacgccggacaggtgctgatgatcaacaactcccgtgacgctctggcggcggccctgctgtatctgggatacagcatcaataccaccgacgagagccagctggaggaggccttcgccctgctgaagcaggccaaggacagcggcgtgtatcaggccttcgttatggatgaggtgttccagaagatggagggcggcaatgccgccgtggccatgtactatgccggcgactacctgaccatgctggagaataatgaggatctggccttcgttgtcccggaggagggcagcaactggtttgtggatgccatgtgtatcctgaagagcagccagcatatgtccgaggcggaggagtggatcaacttcatcgcctctacaaaggccaatctggccaacatggactacatctggtatgcctcccccaacggtgaggcgctggaggagtacccggcctactatgaggaggtcaacgaggaaccgctggacccggagatctacgagatcatggccccctcggaggaggtgctccgtcgctgtgagatctatgagaatctccccgctgagaccctgcgcctgtacgaccgactctggacccgtctgggcgtgtaggggaagctgccaatgtaaaatatccggtcaggcgtattgacgtaaaatcgaatcagtcccccggccggatggacatccggccgggggactttaccggtcgtgacggagagcatccaatttgggaaaaacgcttgtcagtccgggaaaaatccggtataataatgcgtcaggaaagcgtcagatctctgtccactggacagagaaatgtcaagctgacggaagaattacagaacggagtggaaaaatatgaaagccatcgtgaccgtggtaggaaaagatcaggtgggcatcattgccggtgtgtgcggcacactggcccagcatggggtcaacgtgctggagatcagccagaccatcatggaggggtgctttaccatgatgatggtggtggatctggcagggtgccggggctccttcgagcagctgcggaccgacatcatcgcctacggcgaggcccgtgatctgtctctgcgtatccagcgggaggacatcttcgacgcaatgcacaagctgtaagagggggagccatgctgagtatacatcacatttttgataccatcgacatgatcgataagcgccatctggatatccgcaccatcaccatgggtatctccctgctggactgcgtcagtgaggatcccaagcgctgctgcgagaagatctatgataagatctgccgccgggcgcagcatctggtgcggactggcgaggagatccagggggagttcggtattcccatcgtcaacaagcgcatctccgtgacccccatggcgctggtggccggcggctgcaacacggaggactacgttccctttgcccacgctatggaccgggccgccaagacctgcggcgtggacttcatcggcggctactcggcgctggtgcagaagggctttgcccacggcgacgagctgctgctgcgggccattccacaggcactggcggagacggatatcgtctgctccagtgtcaacgtgggctccaccaaggcgggcatcaacatggacgccgtggcccgcatgggccgcatcatcaaggagacggcccatctgacccgtgacaccgacgggctgggctgcgccaagctggtggtgttctgcaacgccgtggaggataacccctttatggcaggggccttccatggggtgggtgaggccgacagcgtcatcaatgtgggcgtctccggccccggcgtggtacaccacgccttgcggtcctgcaaggaccagccctttgacgtggtggcggagaccatcaaaaagacggccttccagatcacccgtgtgggtcagatggtggccaccgaggcctcccggcggctggatactccctttggcattgtggatctgtctctggcgcccacccccgccatcggagacagcgtggcccggatcctggaggagatggggctgtccgtctgcggcacccacggcaccacggcggcgctggcgctgctgaacgacgccgtgaagaagggcggcgtcatggcgtcctctcatgtgggcggactgtccggcgcctttatcccggtgtcggaggacgagggcatgatcgccgccgctctggacggtaccctgacgctggataagctggaggccatgacctgcgtatgctccgtggggctggatatgatcgccgtgcccggcagcaccactgccgagaccatctccgccatcatcgctgacgaggcggcggtgggcatggtcaacagcaagaccaccgctgtccgtatcatccccgtggaggggaaggatgtgggtgacatggtggaactgggcggcctgttgggttctgcgccggtgatgccggtccatgaagccgccagcacagatttcatcgcccgtggcggccgcatccccgctccgctgcagagcctgaagaactgagaagcggcagatcgccgtgaaaaaggagccttgcgtgcgccaccatgtggcgctgtcggtagtcgaaatcataagaaaatgtaaaaaagccagtcagagatttgtgacgggcggataacgagggttttatgcaggatacggtgcagcctctgaaaaggggctgcaccgtgttctgctttatgcagaaaatttgaactgctgcgggttttggcgggtctcctgtacacggtcaaacagttcctcggagatgatcggctcctgcatattcggaatgatttgctgctcctctacggggttgtagatcttcttgtgaaccttgaagctgaccgttgtacttttgaagtttaccgcgcacccggtgtacggcctattttcaagaatgtgctttacagcttcgtctgcccatagatacggatttgccgggattgggttgcgggtggccctgcctgcgctggcataatatgccgtaggggggagaagttacaagccgttcataagtggacaaccacccgtgaacggcttgtatggaaactaaacccataaggaatccaagcaaattcatcttgccctgcgaagctctgtcaaatgcagatgatctgagaatacgaacatggctcacacgtagctttcgattccgaatatcagtccgtatctatatgaggacggaaatcgcagc

SEQ ID NO: 12423 - DNA, 1454 bp, Unknown
  gut microbiota DNA sequence
tactatacgattgtcttgatgaatgcggcaagtgcctcgcgctgatcctccttgagagccgcaacactattatctaattcactcttggcgttaggtgaatttgccgtatcgttctccgtaaagaactgcgccagtgtgattccgcaagcgtcacaaatcgcatttaccgttggcagggatggttgattatttcttttgaagatattgctgatcgttgtctgcgacaggccggattcctgcgctaatcgatatatagtccatccacgctcgaccatcagctgccggattcggttttgtgcattgaacatatataccacctactatgttattagtttacacctcatttgattatccttgtagaactcatcagtatggtatatggcaatcaaatgatgtgtactttgtggtgatatactatgcaattccggcgtattacccagagttagaactgcaaattgttttcctctcaggtttcaatgcaaatcacctctataaagcaaaatcccgcaaggcatggattatacaccgatgccttgcggtttctctgtacttacaaatatgttatttcagggaatggtcactcacgggtcagccgacgaatattgccgatgatgagcattaagtcatcgtcattcagctttcgcaattcttcaatggccgtttgcaggagtgcgggattttcttcggattcatcgaagaattggcttggtgtaatatcaaaatagttacagatttgaagaaactctgccataggtggcaacgatttgccagaggatatgttataaacatagcttctgctatgcccgagatcataactcatttgatattcagagacacccttttttaatctcagctgagtaattcgatcacgcacgaattgtgtgtccatatgatattcaccacctattttatgattattttaggtgatgaccgaagaaaaatgacccacgattttacgccgtttgccttggaggcatacatgggtttatgctataatacagaaaattatgttttttgctctgcggttcaagtcatttatcgaattgtgtttgtttatagcgtatcaaaagtgttttaacccgcattgcattagcttcttaaaaatccatattgatttttctgtccgacgtgctataatcggtatataccgaaaacaaagggggcgtatccatgccaagaccgccacggtgccgccggatttgtggcgtaccacaagttgataccttctgccccaacggatgcggggatgccgagccgatcctgctgacgctggacgagtacgaggccattcggttagttgacttggagcagcaaacccacgagcagtgtgccgcacaaatggacatttcccgctctaccgtgcaggagatttacgaaagcgcacggcgcaagatcgcagcgtgtcttgtccacgggaaaccgctgcacatcaccgggggaaactaccgtatctg

SEQ ID NO: 12424 - DNA, 169 bp, Unknown
  gut microbiota DNA sequence
tcattcggctggttgacctggagcagaaaacccacgagcaatgtgccgcacaaatggacatttcccgctctaccgtgcaggagatttacgaaagcgcacgacgcaagatcgcagcgtgtcttgtccacgggaaaccgctgcacatcaccgggggaaactaccgtatctg

SEQ ID NO: 12425 - DNA, 1385 bp, Unknown
  gut microbiota DNA sequence
ccacagaaaaatcaggcaaaaattgtaaaggagattccattatgaaaattgcagttacctatgaaaacggtcaaatttttcagcatttcggtcacactgaacagttcaagctttatgaagctgcggacggcaaaatcgttcatgcggaagttgttgataccaacggcagcggccacggcgcactggcaggcttcctgatgcagaacggcgtggacactttgatttgcggaggcatcggcggcggtgcgcaggcagctctggccgaggcgggtatcaagctctacggcggtgtcagcgggggcgctgatgcggcggtgagcgcattgctcagcggaaatctgggctacgatcccaatgttcactgtgaccaccatgaccatgcgcacggcgaagctggtcacacctgcggtgaccacggctgcggcaagcatagctgccactgatatggaacgcacactgacacaacttccgttctggtcatccttgaccgaacatgaaatggaaacgctacgccgaagtgcctttgtccgtcattatgaaaggggtgcattcgtacacagcagcgacaacgaatgtcttggaatgctgttcgtcctttccggcgagattcgcacctatcttctctccgaggaggggcgggaggtaacgctgttccgcctgtatccgggcgaattatgcgtgctttctgcctcctgtgtaatcagtcagatcacctttgatacgcaaatgaccgcgggaatggatacggaggttctggttatccccgcaaatgtcattgctgcgctcaaggggaaaaatctatatgtccgctgcttcctctatgagttggcaacgaagcggttctctgatgtgatgtgggcgatgcagcagatcatgttcaagggtttggatcggcggctggcagaatttcttcttgccgaagcggagcgtaccggctccgacacgatacgcatgacccatgagcagatcgcccagcacatcagctcggcgcgggaggcagtggcacgaatgctcaaaaacttctcagaggacggattggtggagttgaagcgcggcgcgatcacgctgcgtgatacagacagattgaatcacctaaaataaaaatatggttttttcacttggaaaaccacgaatctgtgctatactataagtggaaaaaactgaaaggagcatcgaccatgaaagaaacgaaatacgcaggtactcaaaccgaaaaaaatctgatggccgcctttgccggtgagtccgaggcacgcaacaagtacacctattttgcatccaaggccaagaaggaaggctacgagcagatcgcggcgttgttcctcaaaaccgctgataatgagaaggaacacgccaagctgtggttcaaagagctgaacggcatt

SEQ ID NO: 12426 - DNA, 50208 bp, Unknown
  gut microbiota DNA sequence
acacggaaaaattcaacaaaaaatgcaaaggagaatccattatgaaaattgcagtcacctatgaaaacggtcaaatttttcagcatttcggccacaccgaacagttcaagatttatgaagctgcggacggcaaaatcactcatgcggaagtcgttgacaccaatggcagtggtcacggcgcactggcaggcttcctgatgcagcacggtatagacactttgatctgcggaggcatcggcggcggtgcgcaggcagcactggccgaggcgggcatcaagctctacggcggtgtcagcggggacgctgacgcagcggtgagcgcattgctcagcggaaatctgggctacgatcccaatgttcactgtgaccaccatgaccacgagcacggcgaagctggtcacacctgcggtaaccacggctgcggtaagcatagctgccattgatatgaagcgcacactggctttgaagcgtgatcaggtcatcttggacgagcgcttcattcgatccggcaacgtgcagcggctctgcgccaagctgcaaaggctcaaaaccgatgaacggcaaggtcttcaagggcagtgtcgggcatcaggagcttgcggcgtgggttgaaggacttggactttaaggggcagacaaatcgggatttttggaggagaacttttgacatgcatattattcaaatagcaaatgatgaggataaaaagagaataaccagaaatatattggaagaactgcctgaatggtttggaatccctgaggcacgagaagaatatatctgcgacagcgcagggaaagtcttcttttgtgccatggaaaacgaaaaagatttgggatttttgtatctcaaagaaacgggaaaagataccgttgagcttgcggttatgggcgtactgaaagaataccatcgcaaaggaatcggaaaagcgctatttaagtgtgcaaaggatagcttgaaggaaagcggctattcatttattcaggtaaaaactgttgaaatggggaaatacgaagaatatgatcaaacaaatcagttctacatttctctgggctttaaggagttggaagtgttccctacgttatgggatgagtggaatccttgccagatttatgtgatgggaatatgacaacttccagtttaacgaacagaagatgatgattgcatgaagatcctatatgaactctcgtggctatggggaacgctgggcattgcgcttttggctgcggctgtctgcgtggcttgcgccgcgctgattggcagggcagcaaagcattggtacgatacctgtgggtgtatatatcgcaaaattaggtgcgaggtgaagtccggaaaaaactccgtttgagtcgatggaacagctcgtttcggcgcttgcacgattggaactggatgatgacctgtatgatgaatgggagggcgaatccatccatttctttgataatatctgcgattacggcgaagctcccggcaggtatgatcggatcggtgcagctggctggggagagattctggaaaatctcgacagtcattttgtgactgcagacgaatgaccttcttcaacgccgcctgccgggatgcttccggtatcggagtgtgcttcctcagtccaggattcttccgtcggtggagatggtcaccacctgccacggaataaattttccgctctgctgcaatgcggtctttgcggcgtgttccagcccgccgcagcaggggacctccatccgcacgatggtcacgctctggatgtcgttgctgcggatgatctccgtcagcttctcggcgtaatccacgccgtccagcttcgggcagcccaccagcgtgatatgccccttgatgaaccgctcatggaaggcggcgtaggcgtaggccgtgcagtcggcggcaatgagcagcttggccccgtcaaaatacggcgcccgcaccgggaccagcttgatctgcaccggccactgggacagccggctgaccggttcggcgcagacggtctccgcctgccgggtctccgtgtgccggatgcttctggactggctccccggacatccgcagggcaggggagtaccctccttccgcatcttttcctgcatcttcttctgcttattggccagcaccgcctgctcgtcataggcggctgcctcccgctccacaaaggagatggccccggtgggacaggcaggcagacagtcccccagcccgtcgcagtagtcgtcccgcatcagttgggccttgccctctaccatggcgatggccccctcgtgacaggcctcggcgcaggcgccgcagccgttgcatttctcccggtcgatttcaatgatccttcttttcatgatcgtgcctccttgtttttttgacctgattatagtagaataaaatcaacaagtcggttgaattttcaacgaaagaggattttttatgaaagaatttttcccggtgctccgttcttctcagcttttctccggtgtctcggaggaggaactcaccgccatgctcacctgtctgggagcagaaaagcggagctttcccaaggaggcctttctgctgcgctccggagacacggcggagtccatcggtctggtgctgtccggcagcgtgctggtcattcaggaggatatctggggcaaccgcaatatcctctccaaggcggggccgggccagaccttcgctgccgcctatgcctgcgctcccggctcggtgctgaacgtcagcgtggtggcggagacgcccgtcacggtgctgctcatgaacgtcaagcgcatcctgaacgtctgcccctccgcctgcacccaccacagccggatcatccgcaacctgctgggggagctggcggaaaagaacctgcgctttggcgaaaagctcacccacatgggccagcgcaccacacgggccaagctcatgtcctacttctccgccgaggcccagcggctgggaacgtatgagtttgatgtccccttctcccgtcagcagctggcggattatctggcggtggagcgcagcggcctgtcgctggagctggggaaaatgaaaaaggacggccttctggatttccataaaagccatttcgtcctgaaggtatagttttttaccggggcttccccacaagcgtatgtctcttttcctgcatggatatgctgaagccccccagcgtaggctctgcctccgctgggggtcacattttccgattgcagcagcccatcatggggagcttacgcatccagctcctccagtgcagcacgaatgcgggcgtactcctgccggacggggatcagcagctcacgggcctgctgggggatggtgtctgcgccccgcagcgcctccgtcagctgggaacaggcagcagccaatttggtcagactcagattcagggcaatgcccttcagggtgtgtacggcccggaaggcatcgttggcctgcccgtcggccatggccttctccagcagcatcatgctgccgtcacggggcagcatccgcaggaatttccccacgaacatctcattctgcaggcgctccatggcgtcctcatagttgccgtccacggccacgtaaaattcattcagcttcattggcatcctcctcatagaccaccacacagtcctttttgattttggcttcataaagggcggtatccgcctgtaagatcaggtcccgcacccggccctgcccgtggacgccgcccacgctgatggtcaggtgcagctcgggaaattccggcagcgccagctcccgcacggcgcagcacagaacctccagcttctggtgcagcacggcacggggcagactctgaaacagcagaaaaaattcgtcgccgccgtagcgcaccagtgcatcgctgctccgcagcagggagcgcatcgtctgggccacgcgatacagggcggcatctccggcggcgtggccgaagcggtcattgacctgcttgaaattgtccacgtcgatcatagccacagcatattcgccgctgagctcccgcagctgctcgtcatagtagcgccgattaaagacttgggtggccgagtccatgtatacctgccggttccgcatcagcagttggttcagcaggtgctcctcctgtccgccggggccattgtccagccggatgggatttatgcactccagtgaatacggggtcccgtccacctcgatgcagacggcgatgatgtagtacatatccttgccgatggactccaccttgttttgtatctgccgggtacgcacggcatcctgcgagatacaccgctcacagcgttgctttttgcaccacatggcatagcagtagtcgttctcccggacgctgggtccgtccggccccggtgtcacctgcatacagatgccgggatccaccagccgcaccgtctcgaacagtggctgataggtgtggaacagatgggacagctgatggtgagtgatgcggatcacgccgttgctggccgatatcggcagggtaggctgcgacagggtctgaggcgtttcggcgtgctgtatctccgcccgcagctgctcgatgcactggctgcggtcctcaatgtcggtgactttccccagcagagcggcgcagcgcctctgcttccgggcagaccacgtgatctgcaccgatagctgacaccggcgcagtcgcccccgcagccgcaatttcgtggtcagatccagccgtgtttcctccagcgtcaggccctccaactgccgtttaaggccctctgtcagctccttgcccagatacatctgtaacgtcgggctttgcagcggctccaacatcaccgacggcaaacccgtctgctccgccagtccacgggacaggtgcagggaggagggctgggcagtatagtcgaaccacagctcatcgctgagggaggtaaagaagtcctgcttggcgtaggcatcctccagctgctgggtcatccgtgcggcggccagatcctgtcctttatacagctcctccaccacccgccgcaggggcgccaccgtctgcccggcgtccttcatgccctgcttggcagtgtcggacacgtcgtccagacagcgcagcagcaggggattgtagctgccgcactcgccgttgtggatcatttcaacggccttctcgtgggaaaaagcctgcttgtagctgcgcttgctggtcagggcatcataggcgtccgccagcgacaccacctgtgcggcgatggggatgtgatccccggccagtccgtcgggatacccctcgccgttccagcgctcatggtgccaccggcagatctcaatggcgtacttcaccagcttctcgttgcggtgcatgggcagctccgacaggatctgcgcccccagcttggtgtgggtcttgatgatggcgaactcctcgtccgtcagcttgccgggcttttgcaggatatcctccggcaccagcagcttcccgatatcgtgcaggcccgacgctgtgcagatgaggttcacatcctccggggtcagggagtattgcgccgtcaccgccatcagccgccgcagcagaagccctgtcaggtactccacgccggacatatggccgccgccctcgccgttgcggtattccacggcgaagttcaggatggacagcatcacctcgctgctcttctcctgccggtagacccggctggtgaggatgtccatcatctcctgcctccgggtgtggagcaggatggtgttgatgatgcgctgccgcaccaccgtggcggagaaggggcggttgatgtagtccaccgcccccagctcaaaggcccggtcgatgtagccgctgcccgtctcggcggagatcatcaccgtcggcacatcctccagccactggcgctgcttcatctcctccagcacctgaaaaccgtccatctccggcataacgatgtccagcagcagagccgacaggtccttgcgatagatctgcaatgcggcgagagcctccttgccgtcggagacctccatgatctcgaaatcctgctccagcatattggccagaatggcccggttcatctccgaatcgtctgcgatcagcagcttttttcgttccatagtatcctcctgcgggtccgccgccccaagggacgggtatccgtaaaacattcagctcattatacaccgcaatgtctggaaaaggcaatggtttcttccagaaaataacagggaaaaacgaaaaaggacaaaagcttccggtttcccgcctgaggaaaacgccaaggggaagccaacggtcagaaagcgggccgccgtccctctggacggcggcccgctttctgaccgtttatctgacgaaaagagcttgcgcggcagatgtttttacttaccccaccagcttgaacagcagcaccacggctcccagcaccaccagcaccacaccggtggcccggttcagggtcttgggcgcagccttgttggcgaacacggcggcgatgcgggcccacagcagggtaaacaccacgcacagcgcaaataccgtccagtccggcgctccgccgatggcgaagtgggacacagcaccggtgagagcggtaaaggtcatgatgaatacgctggtgccaacggcagtcttcagctcataccccagcacggaggtgaggatcagcagcatcatcatgccgccgccggctccgacgaagccgcagatgaagccgacgatcacgccgcacaccaccgactgcaccgcccgcttcttggcgctgacgctctgcatggcctccttggtggtcatcaccggccggacgatgaacttcacacccagcaggaaggtcattaccacggaaaagctccccatggtggccgaggggacgatactggcgatgtagctgcccaccacggtaaaggccagcacgctggccatcatgatcagcccattgcgaatgtccagattcttgttcttcccgtaggtataggcggatacggcgctggccagcacgtccgaggacagggcgatgcccaccgccagatacgggtccatgcccagaaaggtgatgagcatgggactgatgacggcggcggcgctcatcccggcgaagccggtgccaaggccggcccccatcccggcgaaaaagcagacgagaacagtaatcaaaatgtgcatggaaacctcccaaattgcgaaacatacaagcgatacgccccattgtaaagcactccccggcaaagtcaacggggaagattttccggtgtattagaaaatagacaaaacctacttctgcgaagaattactccccggcggttccgccggggagaagcacgtcaaaccttgtaaatggtgtcctgcttgccgaaggcgttcagggcctgcaccacggtgctctcggactcctgcgtgtagggcagcagcaccagcatgggctggtggaaggtcagtacgatgacctcctggctgatgatgcagcagtcccactgctcccatgtgaactgctcggtgtggtcggaggcgttccactcccggataccggaggcggtgaaggtgacggtgccgtcgggacggttgtccttccggaactgcgtccaggacttgcgatagcccatgcggcctgcttgataggtccagaaggtcaccagcgacatcaccagacacaggaagaacagcaccttcagcttggcataaaaggcccagaccaacacggcggccagcaccgtcagcaccgcaaaggcgatgcactggaacagcaggcggcggcaggtctccgtgaagggcttgaccttgacggtcccgccccgcttcaggatgctgcggcggcccgccagcccctgagccacgtcaaacagccttgccggatcctccggcaggtgatagtgcagctcaaaaaactgggacatggcgcttaaccctgctgcagcgcctgctccagcgctgtggccagctgatcgggacaggaggtgggcttgaagccgcactggatgcccctcatccggcggatggcctcctgagcgtccatgcccaccaccagacggctgatgccctgcagattgccgttgcagccgccctctacccggacggcctgaatggtgtggtcgtcgttcagctccaccgtcatcttccgggaacagacgcccttggggatatacgtataggtcatagtgaaaaactcctttgtgaattggtatctgaacatcttattttagcagaattcgcagaaaactgcaagccctctcagctgttgcgggaacatttttcggcgtcgatggccagcaccaccatcagggcgcacagcccatcccgcccgtcggccacgtcgatgacgtaggtatccgtccagtggagcagttccttggagatggcggccacctgccgctgcccgtctgtgatcccgtactcccagcccatgaagtccccctccacctgccagccgttgaagtccagcgtaaacagcgggcgcacgatggtgaactccttgcagatggtgccgatgcaggcgtctcccagatacaggtcgaacttcggcaggaacgtcagtacccgctgcttcaccgtggcgatgtgccgcccgtctgcgtccagaatgtgcagacagtgaccccaggccagctgcccctccaccgtatacaccacatcgccggtgtcgtagtcatagatatcgtagctgtcaaaccacgagaacaagcgctgcttgaaatagagcttcatgtgtcgcacctccttatatgacctcagtatactgcagtaccacctgaaacacaagagtgtatagcccgctctccaccggcgcagactaaggcggaagaaaaggaggcgcagccatgaacacagaacccaccaagcccgcacaagaggaagaggaggacagccgggtccgccagatcgtggaccttggctcctccgtggtgaccaacgaccacggcaccgtccactgcctcaccgtcatcggccagatcgagggccacgggcaggccccttccggcaccaagaccaccaaatatgaacacgtcctgcccctactggcctccatcgaggagtctcaggaggtggacggcctgttggtgctgctgcacaccatgggcggcgacgtggaggcggggctggccatcgcagagatgatcgccggcatgaccaagcccacggtgacgctggtattgggcggcggccactccatcggcatcccgctggcggtggccggcaaggtgacgctgatggccccctcggcctctatgaccatccaccccatccggatgtccggtttgatgatcgccgctcctcagacctaccactatttcgagcgcctgcaggaccgtatcacccgctttgtggcggctcactcccatatcaccgaggagcgcttccgccagctgatgctctccagcggcgatatggccaacgacgtgggcagcatcgtctacggggaggaggccgtggccgagggccttatggaccgggtggggactctctccgatgcgctgaacgccctgtaccggcagatggagcagtgaccccgcaagcgctgcaccatgcagctgcccgcagccccagccgccgcagccacaggccgcagcggcccgcagcgcctgcggcctttgacacctgtacgccgtttcgccccaacacaaaaaaggcggggccggacaacttgtccggccccgctttttgctgcgtattcgtgtgcgcttatttcttctcgccgtgccgcacggcgtgggcgcagatggcggcaaaggtctcgtcgctgatgtcgtgctcgatcttgcaggcgtcctcctccgccaccttggggtccacccccagagtgatgaggaagcgggtcagagtgtggtgccggtccagcatactggcggcaatggccatgccggagtccgtcagggtgatgaacccctcccggtccatggtgatatagccgttctcccgcagacgcttggtggcgtagctgacactgggcttggtgacacccaaatgctccgccacatcgatggaacggatatagccgtgctcctgctgcatcatcagcatggactccagatagtcctgagaggatttctgtatcttcatggcaaactgcaccaacctttttcgggtatttcttataggttaacacagactaaccaaaaatgcaaggagagaaaaaaattttccaaatccccttgacaaagttggttagagcggttaaacttagtcgatggttagggtaacttaactttaattttggcacagaggttagcgggtgctaaccgtttggttgggaggaatgatgtgatgatgcctttggcactggccaaccctggcgaggagaatctcattcggaaggtgggcggaagcccggaagtaaagaagcatctggaggatctgggctttgtagccggcggtacggctacggtagtggctacgctgggcggcaatatcatcgtgaagatcaaggaatcccgtatcgccatcagtgaagagatggcacggaagatcatgatttgacaaaaaaggagagaaaagtatgaaaacactgcgtgaggtcaagatcggcgagaccgtcaaggtggtaaagctccacggcgagggccctgtcaagcgccgcatcatggacatgggcatcacccgcggcaccgaggtattcgtccgcaaggtagcccctctgggcgatcccatggaggtcaccgtccgtggctatgagctgagcctgcgaaaggccgacaccgagatgatcgaggtcgagtaagtgtcccgttgcggatggagcgaacccggccttcataggccctgatttttgttagtgataagttagagaaatcaaaccaaaaggagcaagcatcaatggagaagcagatcaaaattgccctggcgggcaacccgaactgcggtaagaccacgctgttcaatgcgttgacgggctcgaaccagtttgttggtaactggcccggtgttaccgtggagaagaaggaaggcaagctgaagaagcacgaggatgtggtcatcatggacctgcccggcatctactccctgtctccctacacgctggaggaggtggtggcccgtaactacctgatcggtgagcggcccgacgccatcctcaacatcatcgacggcaccaatctggagcgtaacctctacctgaccacccagcttaccgagctgggcatccccgtggtcatcgccatcaacatgatggacgtggtccgcaagaacggcgaccagatcaacaccaaggagctgtcccgtgagctgggctgcccggtggtggagatctccgccctgaagggtaccggtgtcatggaggccgccgaggccgccgtggaggctgccaagaacggcaagaccatccccatgcacaccttctccggtcccgtggagcataccattgcccacatcgaggaggccgccgtacataccatgcccgaggaacagcagcgctggtacgccatcaagatcttcgagcgtgacgacaaggtgctggaaaagctcagcatccccgccgacgtgatgcagcacatcgagacggacattcaggccgccgagaaggagctggatgacgatgccgagagcatcatcaccaacgagcgctatgtctacatcgctgagcttatcaagggctgctacaagcagaagcgcaagggtcagctttccgcctccgataagatcgaccagatcgtcaccaaccgctggctgggcctgcccatcttcgctctggtgatgttccttgtgtactggatcgccatggtggccgtgggcgcccccgctaccgactgggccaacgacggcctgttcggcgacggctggcacctgctgggtatcggctccaaggcctataacgaggtcaacgacgagtacaccgcctccctgcaggctgtggaggcctttctgggcatcgagatcgatcccgaggccgatgactttgatccctctgccgtcaccgctcagatgaacggcttcaccgccagcagcaacgccaccgccaccgtggacgtggaggatgaggagacgctggccatcaacaccatgaccgcctactacgacgccatccccgagggtgccgacaagaaaagcaccgtgggtgtcacctatgtggatgccgtggcctacctcaacaagaacggctttgacgcccccgatcccgccgactacggcgtgtgggtccccggcgtgcctgttctggtggagagcggtctggagtctgccggcgcagccgattggctcagcggcctgatccttgacggtatcgtggccggtgtcggcgccgtgctgggcttcgttccccagatgctggtgctgttcctgatgctggccttcctggaggcctgcggctatatggcccgtatcgccttcgttctggaccgtgtgttccgcaagttcggcctgtccggtaagtccttcatccccatgctcatcggcgtgggctgcggcgtacccggcatcatggcctcccgtaccatcgagaatgagcgtgaccgccgcatgaccatcatgaccaccacgttcatcccctgcggcgccaaggtccccttcatcgccatgatcgccggcgccatcttcggcggcagcgcatgggtgtccacctccgcttacttcatcggcatggccgccatcatcatctccggcatcatgctgaaaaagaccaagatgttcgccggcgaccccgctcccttcgtcatggagctgcccgcctaccattggcccactctgggcaacgtcctgcgctccatgtgggagcgtggctggtccttcatcaagaaggccggtaccatcatcctgctgtccaccattttcgtgtggttcaccacctacttcggctgggtggacggcaccttccgtatgctggatgagtccgagatcgactcctccattctggctgccatcggcggcgccatctgctggatcttcaagcccctgggctggggcaactggcaggcgaccgtggcctccatcactggtctggtggctaaggagaacatcgtgggtacgctgggtatcctgtatggcggcggcgacggcaccgtgtaccagaatattgcacaggccttcaccggcatcaccggttacagcttcctggtatttaacctcctgtgcgctccctgcttcgccgccatcggcgccatcaagcgtgagatgaacaaccacaagtggacttggtttgccatcggttatcagtgcggcttcgcctatctcgtcggcctgatgatcaaccagttcggcaacgccttcaccggcagcctgaacatcatcggcctgatcgctgctctggctgcgctggccctgatcgtctatatgctggtccgcccctacaaggaggccaccaagctcagcgccaaggtgtaagcagccgatccatcttttcacatcggtacgcaaggccagcggttccgtctccttcgggagacgggacccacgccgccctatcgggccggtgttccaacattttccaagtatttttgaaaaggagtgagtttccatgctgcaatggatcagcgagaatgtaggcaccattttgatttgtatgggactgatcgtcatcgtagcgttgatcgtccggagcctgatccggcagaagaagcaggggaagtcctcctgcggggccggatgcgcccactgcgccatgcatggccagtgccataaggactgacgggcgcagaaaatggcataaggggagggacacggaagcaccccgtgtccctttctgccccttcgcagacccggaaaatgtcatccaaatgacaacaaagaggctcttgcccataggcgagagcctctttgttgccctgacagaaggggaaaatagacgcatcgtcggtcgctaccatgcagcgttgccggagcggagatacgtccggacaggggaggagcgtatccccctccatagcgccctcaagggggcatcgtattttgcacggcaaacacttcttcttacccaccgccctctgaacaaaaggctggcccccgctgcgtgcgggggccagcctttttagcttatgcgcttatgcctttacaggctgtgcgtcgggaggttttcccttatccccggcgcttcttgccaaccagcagggccgcaccggccatggccgtgatccccatcagggagacccacagcaccagacggctctcgtcgccggtggcgggcttggtgggatcggcgggctgatcgggcttgccgggattcacaggctccagctcagcgccgcaggtatcgcacttgccgtccttgtccgcatccgtatggccggtggcggggagtacacgggtctccgtctcaccgcaggggcaggtgcgggtctccacgccgtcctcggtgcaggtggcgggagtggtgacgacccactcaccgaactggtgggtgtgggcggtgcagatgatgtcggcacggttgctgatgcggatacggggcgccatagcggtgccgtcggccagcacgaaggtgttgtcgtaggaggccagacctgtggcggagatctcgcagcccggctccaggttctttacctcatcgttggggcagatgtaaccgtcgatgaacacacgggataccacaccggcgctgtcacgaaccagaatggtctgcaccaggccgttggccatctcgatgcccaccacatagcccttcagggtgatgagttggcccagcacggagccgtcgttgacctgggtggaggtgacctctctgggggtcacggcctcaccctcgcccagcttgacgatgtcggtgacggccagctggtgctcaccctgataggagctggtggtgccggacacacgcacccggtcgccgatcttgaagtcaccggccacggggaagcagttgatgccgccggtctcgtcctgcacgtagatgcagtcgaagaaggccgtctccttgtcatagccggaggcgttggaggtgaccacgccctcgatggtgtacttgtagccgtcctcggtctgggcctgcacctcggcgatgggcgtgatctgcacggggttgatgagccgcagcagattctcgcagatcttgtagttggagtagttcttctcggagccgttgtcgctgatgctggcctgcacctcaaagttggacatgaaggccgcaccggagaccaccaccatgccacggccctccagctgctcggtggccatgaccatcaggcggctgtcgttttcggcaaaggcatacttgggcgtaccggcgccgcccagaccgtcctgatccacgtccacggagtaggtggtggcatggccatacaccacgggggacacggcagcgggcagcgtggaggtggcgttgccgcttgcgtccacggcatagatggacgcaccgccgtagtggctgaagcgctcggtgtagagcttgtcatagggatggtcgggatcgacctccacgccgtccatcagggggttgtccatgttgtaggagctgaagtacagccgccacttatccacgccgtcggcggcgctgcgaacgtcgtcataggtggcgtcgtcgctgatgcggaggctggagcccagggccgccagcacctcattctgggtggctgccatgtgcttgatggcggggttgctctgaatgacgtcgtagttctcgtagttgtcggaccagcccgccagaatgacggtgcctccggctgcgttgaaggcgtcgatggccgccagctcgtcagcactgtacgtcttgggatcggcctgagcggcctccagacggcggctgggagcggtgaggatcagagccttgaacttgggattgccacaggcggcgatgagctcctcgctggagttcagctgcacggtccggacgctgtacttagcggccagattgctgaagttgcccatggaatccttatagttgcccgccacatactcgttgtagtgggaggcgtcgatgccgatgtacaccagtgcatccgcattgagcacatccagatcgatggtcttggtgaaggtgtactccttgccgttctgctccaccacggcggtgacctgaacggtgaacacacgggcggcggtgggggtgtagtggaaggagacatccagcgtgctgctcttgcccagcgtgtagcccttgtcgccctcgcccttatccacgccgatgacggtgccgccgatggtgtaggtcagggacttgatggtggcatcggtgtcctcgctgttgaagagggtggtggtcagggtcagctcctcgtcggtgacgggagtggcggtgccgcagaccatgttggagatgcccagcttcaggctctcacccacccacacgggggaggtgaccgccagatcgccgtccccctcggtgacacggatgaaatagtagctgtaatccggatccagcgtcacggacaggctgccctgattcagctcggcggggtcggaccaggtgtggaccactttgccggagttgaccaccacctccaccttggagatggagtcgctcttgtcgggatcgttgacggtgacctcaagattcagcttctcggggacctcggtgatacgggagcccatcatctgaccgttgacggtgtagcccagctccaggttcttatcctcggtggcgtacatccgcagggcccggatggcctcgtagatgcccttttcggtgaagttgtcggtgaggataacgtcacgggcgtcgttggcattgccccagcggcccttgtggttgtcctggttgttggtgggagccaggtgccagcccttatccagcgccatgatgtactgctcatagctgggatagtagccgccggcgccgatctggccctcgccgttacccacctccaccatatacatacggctgtcaatgacgggattccagtaggagaagtcactgaagttaccgaaggtggtgccgggatggttgaactggctgatggagtccacaccctcggcctgactcagcagagcgtagtaggccttcataccggcgtcgtcggtcttgttgttgagggtggtgttgttgcgggagaccacgccgggggtgttgaaggtgttgatgtggccggggccgccggaccatgtcatctcgaagccgcccagcgccaccatggaaccggcgttctcggcgttgaaggcatcgatggtgctcttataggtgctccagctgtggttggcgtcggagtccttcaccagagaggtgtcatacagagcgccctccacgttagcattggtcttggagtcgaagtagttggagtggtcggtgaaggccacgaactgcacgttggcgctggcggggatgctcttgatgtagtccagcgcagaggtcagcgtaccggagccgtcggaatactgggtgtggctgtggagctgaccgaagtacagctgatactgagtcttgcccacggtgaagaaccagttgaagctggcctccttgccgtcggcacgcttggcggtgaccaccacctccgtgcggccgtcggtgaggtcggcagcgggcgtgtaggtgacacgaccatcggcatacacagcatccacagtcttgccgttcaccgtcatggtgatggtgggctccgtcccggcattggccagcgccacagagatggcgggccgcttgtcgctgccggtctgagcaccccgcatgggcgtgggatcggagaacaccggctcgtccttcacggggatctccaccgtgcgggtgatggccttgccctgattgtccacgccgctgatggttacggtgagtttgtcgcccgtcaccttctccacggggatggtgacggtgtaaacaccctcctcctcggtgacagtcagggcctcgcccgccagcgtggcggtcatgtcgcccttgacaccgaagggagcatccacggtgaagctaaaggtgtaggcctgccccacataggcgtcatacaggtggtcgatgaccacggcgggcatattcacgatgccgccggtcaactccgtcccctccgccacgggatagaaggagaaggagtagatggtgtagtccagatcaccggtggagctgtacatactgtacaccttgaagctgtcgctgaagtactccagccactggctgtggcccttatacttggcggtgcggctctccatttcgtagccgcccacgttgccggagcactcccggaccagccagtcggcgtcctcactggcggtggggaaatagaaggcgttgttgccggtgccgttggcacacagatagccgtaggtgtcgttgcggaagcgatagtactcgccgctgcgctccacggtaaagaccacggcgccgttggagcagacagccttgccgttggcaatggtggcggccgccttgttgatggcggggctgtcggtgttgtcattttgctccgccagaaccgcctcagcgttctggttgtagatgaccacctcatcgccggcctgaggcagcttaccggggatgggaggcgtcacatgggtgacatagtcgctgctggcgccgttgcggagctgataggtgccgttgtaggcggagcagcaggcatacagggccgtgacgtcggcctcagtagtattggcgggcagcggcacacccttgaagagcttggtgctgccggtggcgtcggtgacgggggtgctgccggaagcgttgtaggtacccagtgtcacgtccttgatgtagacgtactcactgagatagtcggcgcccatctgggagacggtgatctcctgtgcggggatggcctccacaccggcctttaccacctccatggcaggggactgcatctgaggcacgccgccgtagaggctaacggtgccggtgaccttcaccacgtcgcctaccttatagttggcgtggttggcgtaatcatagatctggaagccgtagatctcaccgccgatgacgtcctccagaatgatggaactgatgctggcagcgccgttataggcgttgccgtagtgatacaccacctgacccaccacggagacattttcggtcttggtggtgatggccccggcctccttgacggtgagcgtcccgtcggggatcatgccgtccgtgatggggtcattgacggaaccggcggcccggatctcgtcggcaacggtattccgcagctgcagggtgccgttgttggtgcctacggcggcggtaacatctaccttgtcacccacggcaaaggcccagctgtctccgttcttgggcaaaactgccttatagagctggatggtcttaccgtcggcatccttgaaggtgacgttggggttggcgtactgaccgttgttgtcgtagatctcagtgatctccagccccttcagctgcacataggtacacacatcgtcggcggtcagagcggcgatggtggtgggcttggcgtccagcgccaggccgctggacttgacgaaggtgccgctgcccagctgcgccatgcccctgaactcggcccgcttgccggtgccgatgatggtgtcgcccagagcgatctcatcggtcttggcggccagccgcagacagatagcgccggtggcgtcctgcagatagtagttctggccgtccaccagcgtcacaacgcccttgacggtgaactcggtgtcggtggcgccctccagcgccgtgcggataggtacggtggcgggctcctccggatcaggctccgtggtggcgtccacgtactgcttctcctgcgtcagcttgtagaaggtcatgccgaagtccgcttccttcagccggtcagtgctggtgcagtaggcggagaactcggtgaacttggcgaagtattccaggtagaccttgccgtactgcccggtgacgccgctgccggagaggtagtaggaggcgttctcggcattgcaggtctccacatcccagcgagtggtgccgttggcggccacgttgagatggaacttgccattattttcacccagcgtcagggtcttgccgtcctgggtgaaggtataggtgccgtcatcgttggcggtgacatcccagaccagcgcatccatggcgttggcggtgagcacatccttttccaccgtggcggccacgggggtcaggtagtaattgcccatcacggtggagctgacggcaaagccgttgccggcgttgaaaatgaccaccttgtcgccaccggtgagggcagcggtcttgacgtacttgtccaccagacgataggccttgtaggtgaacacgacctcctgactgtcggtcatgccgtccttcacagccttgacggtgatggtgcaggaggcggtgatggtcacagggccggtgtagtcctgataggcgccgtcatccaccttgtaccgcagggtggcatccgccgtcttgcaggcaaaggccacggtgtcgcccaccttcacatcgccggaggcggtaccggtgggggcagctacctgctccagcccgccgcccagcttatagagggtgaagtggcaggggtagccgccgggagacttggtgatagtggcgtccttgtaagccctgaacttgttctgggcgctggcgttgctggccagcttgaccgtgtcatcgccctgtccggcgaaggtaaaggtcccgtcggtggcatcgaaatccacggcccaccggtagctgccgcttttaatgccattgttgttgccgcctttgggagcaatggccttgccgttggcgtcactgagaatggtaccattcttgcccacggtcagcgtccagacgccgcccgtgggatcaatgacctgatcgttggcagctgtcacggccactgccgtgacccatgtgccgtccagcacaccgggggcgtagccgttgttggctaccatcacatactcgccggtgaccagttcatcggcggacgtgaccttggtgtaggtctttgtcgctgattcgtctgccagaactgctgtgggcagcagcgagagcagcatcatcagcgacagcagcacggacatgatccgactgctgagtcctctcttcttcaatgaaatccctcctgttcaatattacacgtttacacggcggcctgcttctgtccttccgtccccccggagatagtacaaagccgcctgacccgcatccggcgggcagacgaccttccacaagctatcctgttattggcacggaggtgacgtcaaaggttccgaccggccgggacaggcagactgtgggggataccgttgagcgaaaacaaacctttcgtgtatcgtgctgccggtcaaaaccgtgtacgccgtttttggccgtacataccgcctttgaccgatggtaacagtctatcataaagccgcccaaatggctacccctttttcaatgattttgttagaaacgtgcaataagtttgtataatatctgcaaagtctattgacagatgtagctgactagtgaacactattgacatcaggggcggaagttgctatgctgtaaccaaatatcattgacggaggaaacgcccatgaagcggaagaaggggaatgcggaccggctgacagccggggcctggtggagcaggaaccggtggagctgcgtcattctggcggcggcgctggtgctgttcatcgtcgtgcggatggcggctgtgacctttgagcagccccagccccgaggggatgaatatgccgagtacgagaccggcgtcgttacggatatcctgtcggacaataccgaggcggataccgtggctgacggcggctatcgaggggagcagctgctgctggcgcaggtgcgctccggtcagtacaagggcgagaccatgcaggtgtataactatgtggggccgctgtacggccagcccctgaaggtggggcagcgggcggtgctgctgatctccacttatagcgacggcagccataccgccacggtgtacgagtatgaccgggcggtgggtctggcggtgaccgtgggcctgttcctgctggcaacggtgctggtgggcggcaaggtgggagccaagtctctggtggcgctggcagtgacgctggtgtgcctgttctggatcctgatccccctgctgatgaagggagcgcccactctgctgacggtgtttctggtgtgcgcctacatcaccgtggtgacgatggtgatcttgggcggcgtgtgccgcaagacggtgtgtgctgcgctgggtacggtggccggtacggcgctggcgctgctgttcggcctgctgtctcagagccttctgcggatcgacggcctgcggctgacggatgtggaaccgctgctgcagctgcggcagacgggtacgcccttgggcctgcggggcctgctggtggcgggggtagtcatcagtgcgctgggcgccgtgatggacgtggccatgagcatctcctctgcgctgacggaggtacataccgtggccccggaccgggacggccgggctctgttccgctccggtatgaatatcggccgggatatggtgggtaccatgaccaacaccctgatcctggcatttttgggcagcggcctgtccttcatcatctatctgtattcgctggggctggatccccggcagctcatcagctccccctatatggccacggaggtcatcagcggcatcgccagcagcatcggcgtcattctggcggtccccctgacggcgctcatcacctcgttcattttggtgaaggataaaaaaccgaaggccccctgcggatcgaaaccggaggataagaagcttcccaaagaggttcaataagggaggcaccaccggcggctggacaaaaaggcgtccaatgctggacaaaagctggacaaaaaccgggacgctccaaggtcagaaaatggggcagtaactggacaaaaccggcggatgcaggccgaaaaaacgacagcgcaaaaaccaaaagggataaaagcagccctctctgagatccaaaaacggaacaccggcagagaaaaaacttccaggaaccggactgctatcgattccgaaaaagagaaaataccggcatatgatcggcaccgaaaagaagcaggagccgagatgatagcagcgccgggaaaaggcgggatccatgccgatgacagagtcggaaacgggggaatatcgggccgatcaaagaagccggagaagtgcaaaagccggtccggcagcggtgccgaaagcgcaggtaccggaacgatagcagagccgtgagagcgaaaatacggagcaatgacaacgctgaaaatacgaataccggcagaatagaaaaacagcaaaaaacaggcgggggaggcaattttgccttccccgcctgcttgccgccggatgcggctgtacaggaggagagctcacctgcttgcggcgcagggaggaatgacctatacacctcccagtatatacgagatccggagaaatagcaatgatttttcggaaaaattttcctgatgggagcatgaattttttgaatatttcgcatggggaaaatactgaggtgcagaagggtcacagagccgctccggatttttcgattctggcagcgtggcggcatcagggaaaagtggcagcaaaaatcgaatcgtatcagaagatgaaacggtatcgagaaaatcaggaagcagcgggaaatcaggcgacggcggagaagccgggtggattcggaaaagcaaaaggcggagggggaccctactgggtcccccctccgcctttacagaaagagagatgcgctatttcaaggggccttgccgccgaaggggctacgccaccaaggggctacgccgccaaggggctacgccgccaaggggctacgccgccaaggggctacgccgccgaagggctttgctaccaaggggctttgccgccaaggggctgtgccgccaaggggctgtgccgccaagggcttttatcgcctaagaggagcgctgcgaaggggggaatcaggcccggggcgtcttaccggccaccagaacggctccggccagaacggccacggtcatgaggctcagccacagacccatggcggctccgtcagcggtgttggggctgtcggtgccgttattgccggtattgccgccgctgttggcgttgggatcggcggcgccgcagacggtacacttgccgtccttgtagctgtggccggcggcggggatgacctcgccggtctcgccggtctcgccggtctcgccgcagacggtgcagaccttatcgccggtgtagccgggctcggtgcaggtggcgtccttggcgtttttcaccacggtgctgtgaccggtggcgggcagcgtctcggtagacagtacctcatcgcagtcatcgcagatgacggtgacagagccgtcctcggtacaggtggcaggggtctcggtgcgggtggtgtggtcgtgatcgcaggtgacctccacggcgatgagggtgtagtcaccggtgttcagcaacgcccgcaccatgccggtgccggtgtgcagcgcggtgacatgcccactcgcatccacggagaggatgctctcatccagactggcatagttcacagggttcagctccggaatcaccacgccggactcgtccagcagggtcaggtactgcgtgaggtccgcgccttggcccagcttcagatgaatggtatcctgggtggcctgaataccgtcgtaccgcttgggtaccacagtgacgaagcactggacggtatcctgggtggtgctggtggcggtggcggtgatgacggcattgccgggatttctggcgtccacaaaggcgcactcatcgggcagatcacggttggaggtggcacggatcacggggttggtcaggtccaccgcattgggatcgctgttggtaaaggtgatgatctgatcgtcgctggtggcggcggtatccgtggcgtggataccgtcacggccggcacccacgatgccctgcttgccctgcaggaagatgcggttgctgcgggcctggatccagccgtggtacagctccacagagcctgggtacgggcccacatggacggtgaaggaggcggtcatgccctgatactcggcggtgacggtgacgtcgccggacttgccgtccttattggccaccagtgtggtcttgctgtactcatccaagtcggcaatggtgggatcggagacactccagatgaggccgtcggtgccgtaggcgttgtgcttgccggagagggcaaagccgtagggctccagatacacgccgggcaggtcgatggtggaatcgaagtacatggtggtggtcatctcatcgaagtccagacgcagaccggtgtaggtcagctgatcgctgacgcccaccacgcaggagacggaggcaccgttggcggtagtggcggtgacggtggtgacgccgggggccttggcagtgaccagaccgttctcgtccacggaggccacgtcgtcgttgctgctggtccaagtgagagcggcctcggtatcggtgtcgaagaccaacagctgctgctgttcaccggtgaacaggaaggcggtggtatcggacagggacagggtggtgccctcgaaggtgtcgggcagctgcaccagataggcggcgtagttgtagccccagtcggacagctggacatacaggagcttgccggcgtagtcggtgacatccacggacacagcgtcggaggtgacatcgggcatatccgccagacccacgttcttgtgcaggagcttctcggaactggtgctgatggtgccgtcgtcattggccacgaagatctcggtatccagatacagatgctcgtcggagacctgcatccccaaggtggtgcggccgtcggcgccagtgctcagggtcacacggccctgatccagctggggagcctgagtatcgatgtacacagggaaggtcagggtatcccggacattgcggctctcgtgatcggtgacgggatcggcggtgatggtgtagtagtactggccgtcaggcagggcgctgccctcgttgtccgtgccgtaccaggcgtcaggagccatatcctgatacatggtggcgggaatggggccgccctgagaggacacatagatggtcttggggacgttggtaacggcgtcgctccagacctcctgcccgtcggcgttggtgacggtgaagtgcagggcggaggcgctgcgcatctggctgacgttgacaagttccacgccgtccatataggtatcgccgttgggggagatggtgatatgcccggccttcagggaggttttctctgccccgtccatggtcacggacagattggcgcccagacgataggcaaagctgctggtgaagtatgcgcccagctcggtagagagctggctgtaaggcacggtatcctcattgagcatagtggcgtagtccagcataccgggggcggaccagtcgccgtagtaggccaggaaggggatggacagatctgcgctgccatccttggcggtgagcaccacgaaaccctccacatagatgccgttttcataggcggcgtccagcttgcccttctggctctgggagagggagacgctgaccttcacgtcgccggtggccccggcagccagcgtcacggtcttgtcgccggaaacggtgacatccagcgcctcatcgtggctgctcatgtaggtcttgccgtcctgctccagcacggcgggggacatggcgatgacggacacgtcatactgggcggtgtccttgcccatgtttcgggcgtggaaggtcaggccgtagctgccgttcttggcaacatcgtcccccagatccagcacgggcttggtgtcgccgtactggtcggcatcggtgtagagtaccacatcgctggaggtggcggcggacaggtcaatgaggccgctgccctgcagacggggggagtaggggagcttcgtctccgggtcaacgaccggggaggcagtggacatcatcaggttctccgtcatggaggcggcatcatagctgccggtccagttctcggccatgtaggacttcaccagaacgctggcaccggccacataggggctggccatggaggtgccgctcatggaggcgtaatcacccttgccctcgatggtggggatggaggagtcatcgggatgttcggtgtcattattgtacaccagaataccgatggcgttcttccacagggcgttctggatcttggtgacgaaggtgatgggctcgccgttttcgtcggtaccgccgcgctgcaccacagcgatcttgccggtgacgtcgatgccctcgtagtcggaatcggcgccgtaaccgggaaccatgacatagtcatagggggcggccagatcgtcagatacgtcaccgtatatcttcaggagagaaacgtaggagtccaggcccaggaaggaggtctggctgtcagtataggtgttcttctcgtcgcccagcagcacatagttggcgtagatctcctgaccctccacgctggcgatggacaggttggcggggtacacggagggggcggccaccaccacgctgttgtcggggtccccggtgaggggagcgtcggtaccgtagctgttcatatagctggaggaggtctcgttgccggcggcagtgatgaccataatgccggcggcatccagcttgttgtacacgtcgttgatgagggcgtcctcgtccacggtgaagccgccgtaggagcccagactcaggttcacggcgtccacgcccagacggccggcatcctccagagccgccagaatggtgatcgtggcggcgcccgtgccgctgtcgtcaaagaccttcatggggatgacctgagcgtcgggagccacaccggagaaggtgacggcgccctcgccgtccacggcatagccggcggagatgccggccacatgggtgccgtgctccagatttgctgcatcccacttgctgccgggggccacctgagcgtccttaccggcgtagtcaaaggcgaaggggatcttggcgctgagatacacatcgtcggcggtgacaccgggcatcagggcctcggcgttgaggtcggccgcctgcagaataccgctgacgtagtccttggtgaatttggcgtctgccgaggcgttggtaaaggcgggatgggcggtatccagcccggtatccagcacggcgatggtcatgcccttaccggtgaactgattggtggccagcgccacctgcagggcctgcgtatcggcctgctccacggtgggcagggtgtaggagcctgccacgaaggcacggctgacgcccttggcggcggtcttttcggctgcggcgatgccgggggtcagagactgggccgccagcacggcggcagcgggctcatcgtccagctccaccagaatatccaccacttcattggggtcctgaggctgggcggtcatctgctgggtggtgttgcccatggtctgggacaggtcggcgggggtgacggaacgaaccgtcaggcgctttgcgtttctgccgccgaggcgggcaggatacatgacagcgccagcacggcggccatgcacagggagagtatcctctttttcatttgcaagcttcctttctttcatagagtgtgcagggacaagagactatgggccggggcatcctcctctcgactttcacgaacatcaaaacgtttctatattcatgggcgcatcatagcgccggaatcgaaatttttcaatgggtaaatgcataaaagatcagacctcggggaggtctgatcttttcggatggagttgtgcgtcctttggctacaaaagaaggcggcggatatcgtccaccatggactcgatggcctccggggccagactgcaccgcaggcggctgccgtccttggcgatacggatgaattcgtcccgcaccagcacgttcaggtggtgggaaacggtgccttgggagatgcccagctccttggccagctcctgcccgctgcggtcctgctccttcagcagcttcaggatatccagacggctcttgtcacccagcgttttcaggcaggccagcagatgctcgtcgttggcggcgtatttctccgtcaggcgcagaatgagccagtacagcaccccggcgatgacggtgatgtggtcgtcgccggtgaggaagcgcatggagttgaaggacatgacgcagagcagaaaggtgatgctctggtcggacagcgtctgggactgggcaaaggcgctcataagacggggggtgttctcccgtgtctgctccagacactgccgcagcagacggtccgtctccggcgtctgcatcacttgtgccagcagggcggcggactgctccacgatgcggcaggcggtgcgctcgtactcctccagatgggcgtacagcgtcagcagccgccaccggtcggcagggggcaggcgggtgaggtccatgtagtcgatgaggtcgcagatggtgtccagctgctgcggcggggggagggggtcctcctgatactggcccacggcggagatgatgtcccgcagccgctgctggggtgtgtggcctgtatatttataagctttttcgccgccggggcgaacataatcccagaccagaaaccatgccagacaggtgttgctgccggagagaggagtgaacaggaattgcagcgtctcctcgtcctctgacaggtgctccagcaggtactcctctgcggcggcgatatggcgcacctgcggcaccagctcccgctccgggatgccgtaggtgtcgcagatgcggacggcctctgtgacggcggtgcagtatttttcctccgtgggggtgtagtggcgctccaaggccaccaaggcctctacgccgtatgcattggcctcctgatagatgaaacccataaaatcctccagaaaatttgatggagatagaaacgttttaattattctgcaatgtattgtacccccacttctggcgctgcgtcaagcatagggacttcctctgagggcataggctggcagaagaggagggatctgtatgctgtctgcggcgttgctactgctgtccaacagcctgtttttgtccctgcgtctgacggggaatcccggttcgttcccccggccgctgccgccggaggaggagcgggcgtgtctggagcggtgggcgcagggggatctggaggctcggaaccggctggtggagcacaatctccggctggtggcccacatcattaagaaatactatacacaggcggacaatcaggaggatctgatctccatcggcaccattggactcatcaaggccgtcaacaccttccgggcagaccggggcatcaagctggctacttatgcgtcgaggtgtattgaaaatgagatcctcatgtacttccgctcccagcggaagctgcagggggaggtgtccctgtccgacgccatcgatacggataaggaggggggctcgctgtatctgctggacgtggtgggggccgacgacaccatgctgtcggacctgcaggaccgggaggagcagctgctgctgcggcgcttggtgcgggactgcctgacggagcgggaggcggacatcatccggaggcggtacggactggaggggcatccgccccaaacccagcggcaggtggcggcggtatacggcatcagccgcagttatgtctcccgcatcgagaaacgggcgctggagaagctggaaaaggagctgcgaaaggggtaggaggatagcgaaagggcttgtctttggggcgggaacatggtaagatgataaaaaacacctatgcggcagcctgtggaaatgagcggagacaacatgagaaagtttttcagaggaatatgcggcgtactggcgacgcttttgaccctgtgcatcctattgatggcggcggggctcatgggggtgcgagccttcggcatcacgccttatgtggtgccggcggacatggaggggcttccgtggtccgccggggcgctgctgtacgtgcggcaggagcagccggagacgctgcagccgggggacaccatcgcctacgtcacggacagtgacctatcgctggaggggggcgtcatcggttccgtggacacagagcggcgcttcttctatgtggagggagccccggtctactgggacaatgtgctggggcagcccttgtggggcatcgatgggctgggctatgtgtccggctatatcagccggccgccgggactgtatctggtgctgggggctgctgtggtgctggcgctgctgtgcatcttccccctgcgacgccgaaagggagagaaaacggaagaatcccccaccgggagacgtatggtaacgaatgcgggagagaaaactcccaccgaatcggcgcaggctgcggcgatggaggaggaagcccccaccttgacggaaaagcctgcgtctgcggaggtatctgagcctgtgaaggtgcctaagcctgcggtagagataccgaaacctgagcctgtgccggaagcgcctgagcctgcggcggaggtacagcggcctgcagagaccgggcggcggcagacctccggcaagcgggacgaggcggtggcccgtcacggcggcaagcgccttcggcgctgatggaatcgagcaaaagaaggaccgaagggctttgcccttcggtccctcttttggaagggggcgttattggggcgtatcggacggggtctcgccggggcggtcagtcagcaccagctgcacctgacgccgccgcaggaataccgtcagccagcaaaccgccatgacgatcaagccgcagatggtcatgcagagccgatagtccagcacctcgcccaaagcaccgatggccagcgacagcaccgctcccgccgccgtgcagagcatggactcataggcattgagccgggcccgcagccggtcggggatgtagcgctgcaccgccgcctgccggatggtggcactctggatgcccagaaagccgcagacggctcggttcaccagcatcaggggatacggcagccacagaaggcaggtgtccatcagttcgtaggtctgatacaccccgaacaggaagccgaatcgctttcgctccggcagggagtagcggtagcggacggcgccgccgatggtgcgcccggcaaactccgccacggagaagaaggagtacatggcggtggtgaagcccggcgctgtgcgaaagaaggcgatgagcaggggagaatagcccatggccatgccgtgggtgacggccatgtactcatagaggccgtggaggccgtgctcctgccgaagataggcggcggcctcccggatgtcccgccaccaggttttcagggacagcagcggctcttgatcccggcggctctcctgcacatggatgcggttttcgatgagggcggccagcaccgacagtgcgccttggatcagcagcagccgtcccacgcctaaggtgtcgtacagcagcgccgccagcggcatcatgaggaccttcagaatgggatagagcatggcggagacggtgtaggcccgctcctcctgtccctccggcagcagcagggggtagaagctgttgtaggccagctcatcgaaggctgcaaggcacgataccagcagggaaaaggccagataggcggtgtaggagaaggcactgtgcagcaggaacagtcccgccccggcgtagcacaagccgttgagcaggtcgccccacaccagaaagggcttgcggggcaggcggtccatcatgggggcgacgaccagcggcagcagcaccatggggatcagctgaatggccaccaccagcgccgaggccagagtgctgcctgtctcgtcaaagaccagaaaggacagggcgaattgactgatgatgccgccggcagcgcccagcgtcgtggcggcggtgatgcgggtaaaattccgtgtccagagagtttgtttcatagcgttcacctcactgctatgattatcccacagctgcttacaaaagaaaagggggtcatcgtgggaaagttattcccgtgatgaccctcttaatggggcaaaaatgctattttacaggaaactcctccaacaggcggcaggcttgacggtactgacggttggccttgtaccacgccagcacccacggcaggtggaagcgggtgaagcccataggatatgtgtctcgcagacgctggaagcaatccagaagttgggtgccgtaggtatcgtcgtggaggtagtccgggtgctccagccgatagcgcaccagcgccagcatccgctgctccatttcgccggaggccataggctccgcctgctggacggcggtcagcgcctgctcccgatggcccaactgctcgtggcagatggccagtttgtgcaggtccagaaagccggggcgggggagggaggcaaagtagggcagggccttttccggttgacccagctccagttgagtggaggcaacattgtagcggagggcagacaagctgccggtatccctcaaggcttctgccagacgctccgctacagagtagtgggtcagcatctcctccatgcggcccagatccgagtagcagttgcccatccacgcccggcaggacagcatcaggtaggggtagccggcgtccgatgccgagcggtaggcgtcccgcagcacctcgatggcggcggtgtattcgccctcggcgtagaggaactctccgtagtgggcagccagcagcggcagcggctccagccgcaccgcctcctcccatcggccttgcaggcctcgctgtaaggccagctgccgggtggagagaaagggctcccactccaccggcagagggcgcatctcgtcggcgtaaaaggcatccagcagcagggcatccgctgccagcggactggatgcaagaatctcccgccggggctgcaccagctgttcatagagggaatcgaaattcgggctgccggagagcagggccttccagcagggcgctaagccctccggctccggagtccagacaagacccagccggtgcagcagcagctccgtcacctccggggagggggcggccttgccctgctcgattttggacagataggagggggcgcagatgccacggcacagaccttcctgactccagtcccgctgaaggcgggcctgccggatcagcagtccggcgatgtcgccgcccctcatccgatgaggtcccgcacaatggcgccggccagcaggataccggcggtggaggggacccatggcacactggccgggacgctgcggcggccgggggagggggcctccagctgggtggtggcggcgggctgctccgggctgaacaccaccttcaggtggcggatgccacggctgcgcagttctttccgcatgacacgggccagcgggcagccgctggtctgagagatatccgttacccgcagcagggtggggtccagcttgttgccggtccccagcgccgacaggatggggatacttcggtccatggcctgctggatcagatccagcttgcaggttaccagatcgatgcagtcggcaatgtagtcatatcgggcggagaagaaatcctcccgatgggcggcgtcgtaggtggcgcagatggggtggatgacggcgctgggggagatgtcccggcaacggcgggcggtgacctccgccttggactggcccacggtggagtggagggcgcagagctggcggttgatgttggtgacgctgacggtgtcctgatccaccagcgtcagctcacctacgccggagcgggccaggatctcggcggcatagctgcccacgccgcccagaccgaacacggccacatgggcgttttgcaggcgctccagcgccggctggcccagcaccatctcggtgcgcaaaaactgttcgtgcataaataggctcctttgcttccagacggtatcaaaaaagaccggccgaggccggtctttttcggaaattcatcaggcgaggtacttcataccggaggcctcggtggcggtgatatccttcacgagatcgttgttccactgggtgtagtcggcgttcttcatggcgttgcggacctgcacctgccaatagggggcgtcggtacccacaaagtatatgacatggtagccggtgtagctgccctcgttgtagacgatgccggtgtcgccgggctgacgggactcgtcgaagcaccagtcattgaactcggtgaccatctggcccttgtacacctgcgtatacagaccgccgttggtgttggagccggtgtcggaggacagctcgttggccagctcggcaaagctatcctcggtgcgggcgccctcctcccacttcttcagagcggcctcggcggcctccttctgctcggccttgcgggcgtccagcttctcctgatagtcgtcagccttgctgtccagatcggaggtatccaccttgaacagaatgtggcgcacgtccacggtgttgtagtcgttgcggccgcggctgtggaacaggaccacatagtagttgtcgccgctctcgatgagggtcagatcaccctcctgacgctcctcgttgaacacccactcggtgacggcgtcgccgctgtaggtaccggtgggacggtcggtgtaggtgccgttatcgtagttgccggcggccttctccatcagaagaccgttgcggacagcctccagagcggcgttggcattggcggaggcagcctccttggcggcggcgttctcctcgtcggtgggcttcacggtgttgccgtcggcatccttggtggagtcggcagtacccttgaagtagatgtactcgtagtcggccacgtcgaagttgttcttgtgctcgttatagtaggtctccacttcctcgtcggtgtaggtgaggctgtcgatgtagtcctgctgatagtgggaggccagaagggtgtccttcaggatgctcttgaaggtggacatcgtcatgttattgccgtacatcagcttcaggtaagcgctggtggagtagccggccttcttggcgtaggtggagaaggtctccacggtgcggtccacttccttctgcatatcgtcgttgaaggtcatgcccttctcggcggcgcccttcttcagcatggtcagctgaatgagactcttcttggcggcgtcacggaagtaggcgtcccaggtcatgtcctcgctgacacgcaacatcatcttggcggtgtcgttcaggctctgctgagacagggaggtattcttgtcaatgccgtagagactggcatacttggagttgacgatactgttataggcattgtgatagtagtagctgacctcggcggcggaataggactcgccctccaccgtgacggcggtggtgccacgctggatgatgttggagttccacaccaccagaccaatggcgaccaccacaaaggcgatggcgatgatggcatagagccggttggagcggcgctccttggcctgctcctgagcttgacgggcagtcttggggtctgcgacgccgctggcggcgacctcctgccggttcttcttttctcttgatgcgctcatagttgtttcatcctctcaaaataggggtcattacgacccgacttcgtaaagttaatcgttattatacaggaaatctgtctgctgtgcaagggggaaacggaaattatccggccataggccgaaaaagcggtcagctccggaggcattccggagctgaccgggcttttaccagttgtcccgccgggcgtgggggccaagttataacctgcaccgtttcagcaggtgggttgtctccagcgtgcttcaccgcttccaacttccagccgcagacggcagccgggaggcctgcgatccacatactgatccgacatcccctataacaaaatgtgaggataaaaaagacccgtcacatccctgcgggacctcgcctttcggcgatggtcttattataacagacctgcgggaaaaataaaaggggttttcgcagaaacggtcaggaattttcttcctcgtcggccagcagctgttccatgaacagctcgtagatcttctccagctccgcttcgtcatccagcgtgctgagcagctcctcgctgttttccatgacggatttcaggatcaccagaccatagtcctcggattcctcgtccgcctcgtcctccacggcggggaagaaggccatataggtctgcccctcgtactccagtgcgtccacatactccagctcgatatcgttgccgtcctcgtcggtgagggtgataaagctggggccaaactcatcgctcatgagaaaatacctcctgcataggttgatgtccccctactataacggatttccacagaaattgcaagagggcggcgctgccgatttccgcacaaaaattggaaaagcagcacaaaacggaacctatgtgccgggtcaaaggatacggtgattgcattttttgcgcaaaaaggtatttttatcagttgacaggtgtggtaaaataactcttatattggtttagtatgtgctttttgccgcagccgggaccttccggagcagggcggcagggagaagccgtataaaaagcctgaggccgcccgtcggcggccggaacaacgaaacagaaagtgaggtgcgctgtccatgaaagaacactccaacgaccgtgataaggcagagcagagcgcccatcagaggaaaaaccgagggaagggacgggccaagagggtctggggcgtcatcggcaccatcgtgctggtgggcgtgctgaccatggccatttttgtggggatcttcatgacctacatcaataagtccctgaagggccacgtagaggtggatatgtccgaatatgaccggaaggtatccacggagctgtaccgtctggggacggacggcgagacatgggagatgtatcagacgctgttcagcgatgaaaaccgcatctgggtggatatcggggacatccccgagtatttgcaggaggccaccatcgccatcgaggacaagcgcttcaagacccaccacggggtggactggaaggggaccctgcgggccattaccagtaccctgaccggcagcggcacacagggcggctccaccatcacccagcagctgctgaaaaacgtcaccggcgacaatcaggggacggtgaagcggaaggtcacggagatctaccgggcgctggcgctggagaaggattactccaagtcccagatcctggagatgtatctcaacaccatctatctgggagagcagtgctacggcgtgcagacggctgcccggatgtacttccacaaggatgtgaaggacctgacgctggcggagtgtgcctgtctcatcggcatcaccaacaatccctccatgtatgatcctctgctcagcgactgggcccgtgagaacaaccgggagcggcagctgaccatcctgggcgagatgctcggtcaggagaagatcgatcaggccacctacgatgccgccgtggcggaggaggtccagttcagcgacgggtatacgaatctcggcaatttcaccgagcctacggaggatcaggagaccccggagaagcccaccgtgcagtctaccgccaacaactcctattatacggatcaggtcatctccgatgtggcggcggcgctggtggagaagctggggctggaggacgatgcacccgacgagaacggcaacgtccgtacggcacaggagaaggccgtcagcaagatttacagcagcggctataagatctatacgctgcaggacagcaagctccagtccattgcggagagcgtttttgaaaacagcgatctggtggagtatactgacgactacggcaagcccttgcaggcggctatcacgctggtgaataattccaccggcaacgtggtggctatggtgggcggtctgggcgccaagacggtggatcgtggctggaactgggccacggagccccggcagtgcggttctgctaccaagcccatctccgactatgccccggcgctggacgacggtaccatcaccgctgcctccgctatcgacgactatcccgtccgggatttgagtggctacggcgcatggcccaagaactcccactccggcttctacggcttgaccaccgtgtggacggcgctggtggagtctctgaatacctgcgccgtgcgggtcaatgaaagctacggctcggcggcctcctataattatatggtggagaagctgggcttcaccaccctgacccagcgggacagtcagcagtccggtaacatgggcctgggcggttacgacgtgggtgtcaccacggaggagatggctgcggcctatgccgccatcgccaacgacggtgtatacaccaagccccggacatggctgcgggtggaggactccgaggggaatgtcgtcatggagaacgagacctccgcccacagcgccatgaaggagactaccgcctatctactgcgggatatactggagagcgttatcaccagcggtaccggtacggaggcatacttctccggcatgaccatcgccggtaaaaccggtaccacggatgacaaccgggaccgttattttgtgggcttcagcccctactactgcgctgcggtatggacgggctatgagtccaacgatgagctgtcctacggtatgggcaacggctcggcgcagctgtggaagcaggtgatgcgggagatccacgccgatctggaggacaagggcttcgacagctgcaccggtctgacgcaggtgacggtgtgctccgacagcggcctgctggccacggatgcctgcaccaaggatctgcggggcagccgggtccgcaccgtgacggtggcggcggatacggctcccacggcgacctgtaacgttcacaagatggtggattattgcaccgaggggaagcatattgccacccagtactgccccaaggacaaggtgaagcaggtggcggtgctggactggaaccgggcgctgttcaacgatatcaaggccagggaccatgagtacctgttgaaggtgctggacggctccgctacgcccaacgatcccaaggatgatatctgcccggcgcaccagaaggccatcacaccggtgacacctaccgaccccaccaaaccgacgacccccaccaaaccgacgacccccacggatccgacagatcccaccacgccggataccggcggtgctgaggactccggcggcgttggggactccggcggcgttagaggcggcggcagctggtggaaacgaccgtaagtagagaaacgaaaatgcagcctgtgagcggtgctcacaggctgcattcttgcgaagcggtgaaaaagaaggggtatggctcggccgtaccccttcttttcttgcataatagggagatcagaagctgcggatgatatccacgatctcggtgccgatgcgcttctgagcctccacggtggcagcgccgatgtggggcgtgcaggacaccatgggatggctgtacagagcggcgttggcagtgggctcgtcggcgtagacgtccagaccggcggcccgcaccttgctggactccagagcagccagcagggcatcctcgtccacgttggcaccacgggaggtgttgatgatgaccacgccgtccttcatcttggcgatggtatcggcgttgatgaggggagcgccgggtgcggcgggagcgtggagggagatgaagtcagactgggccagcagttcctccagcgtcacataggggatgccgaatttggcctccacctccggacggcgggtggtgctgtaagcgacgacgttcatgccgatggccttggccatgacgcccagatgctgaccgatgcggccgaagccgatgatgcccagagtcttgccctgcagctcgatgcccttgccgtaggccttcttctcccacttgccctcacgcatggtgtgaccggcgatggagatatagcgggtgcaggcgaacatatggcccatggccagctccgccacggactgggaggaggcaccgggggtgttgcggacggcaatgccgttctcctcggcgtacttgacgtcgatgttgtccacacccacgccgccacggatgatgagcttcagcttgccgcccttggcctcgtcgatgtggttggcacggaccttggtcttggagcggaccaccacggcgtcaaagtcccgcagggcggcgcccagctgatccggctcatagaactgctccaccacctcgtggcccagctcacgcagctgcgccatggcggccttgtccataccgtctgtaataagaatacgcatagtaatattctccttcgatgatacgttttgttgtcggaatgtggcgatttgtccggttttccggacctgcgtcccgagagacggacgttacgcctgatgctcagcctcgaacttggtgaggaactctaccagagcctccacaccctccttgggcatggcgttatagatggaggcccggagaccacccacggacttgtggcccttcaggttatcgaagccggcctccttggaggcggccaccacggcggcatccagatccttgtcgccggtgacgaaggggacgttcatgaggctgcgatcctgaggcaccacggcacccttgaagagcttggaggaatccaggaagtcatacagcaccttggccttttcaatgttgcgcttctccatctcctccagaccgcccatgttcagcaggtacttgaataccttgccgcagcagtagatggcccagcagttgggggtgttgtacatggagccgttgtcggcgtgggtcttgtacatcaggtagatgggggtcttggggtccagatcgtcacgaatcagatcctcacggatgatgaccacggccatgccggcggggcccacgttcttctgcacaccggcccagatcaggccgtagtcagagacgttgcaggggcgggagaggaacatggaggactggtcggacaccagcacatggcccttggtgttgggcagcttgttccaggtggtgccgttgatggtctcgttttcgcagatgtagacataatcgcagtcgtcggggatgtccagatcgctgcaatcggggatgtaggagaagttcttatccttggaggaggcgatgacgtccacctcgccgaacttcttggcctcggcaatggccttcttggaccatgcgccggtctccacatagcaggccttaccgttcttcatgaggttcatggccaccatggcgaactgcacggtgccgccgccctgaatgaacaggaccttgtagttgtcggggatgtgcatcagcttgcgcaggtcggcctcggcctcgtcggcgatctgctggaacaccttggagcggtggctcatctccatgacgcacataccgctgccacgatagttcatcatctcgtcccggatctcctccagcacgggctccggcatcatagcgggaccggcggagaaattgaatgtacgaccgtatttcatctggtggttcctcctttttccattcaagcgttgttttccttgtttttgccagttacccacattataatgcatcccgtcgtgagaatcaacagggaaaaataaaaaatgtgagatgggctgaaagattttcagcttgacaaaaatttcgtagggcggcagcggcggcgattgacaggcgccgcaggaaatgatataacagacaggatataaagatactgtaaaaaagcggagggacgggacatggaacggctgaaggagcgggtggcccacatcggacaatatgcggtgacgctgctgaaatggatggtactgggcggcgtcatcggactggtgggcgggatcattggctccctgttccacatcggcgtggacaccgccacacagatgcgtctggcccatccgtgggtgctgtacctgatgccggtggggggccttgccatcgtggggctgtaccggctcaccaaaacggaggggaagggtaccaacgacatcatcgcctccgtccacttcggggagcaggtgccggggctgctggtgccggtgatcttcgtgtccacggtcatcacccacctgtgcggcggcagcgccggacgtgagggcgctgccctgcagatcggcggcggcatcggctatcaggcggggcggctgctgcgtctgggggagaaggatttgccgttggccaccctgtgcggcatgagcggcgtgttcgccgccctgttcggcacacccctgacggccacggtgtttgcgctggaggtcatcagcgtgggcgtactgtactatgccggactggtgccgtgcctgacggcggctttgacgggctatctggtgtcggtgctcatgggggtgccgcccacccggttcacggtgacggttccggggctggaggtgcggaccatgctgctggtgatggtgctggcgctgctgtgcgccgtggtgagcatcctgttctgccgggggctccacggggtggagcatctgctgaagcggacgctgaaaaacccctatctgcgggtggcggtgggagcagcggtgctcatcggcttgacgctgcttaccaatggcgactacaacggcgcaggcatggaggtcatcggtcgggccatcgccggacaggcggatccgtgggcatgggtgtggaagctgctctttaccgccatcaccatcgggtgtggcttcaagggcggcgaggtggtgccctccttcttcgtgggagccgccttcggctgcgtggcggcgggctggctgggtctcccggcgggcttcggggccgctatggggctggtgtcggtgttctgcggggcggtgaactgcccgctggcctccatcatcctcagtgtggagctgtttggctccggcgatctgctgtatttcgccatggcctgctccatcagctatctgatctccggctactgtgggctgtacagcagccagaccatcctctactccaagctgcgggcggagttcatcaacgtccggacccacgagtaaaggtacataagaatacgcctgccggggcatactgagagaaaatcagtgcttcgggaggcgtgttttttatggaggatatcctgcagcaggggggacagatcgccctgacggcgctggggtcgctggcggccctgtttctgctgaccaagctctccggcaacaagcaggtgtcccagatgaacctgtttgactatgtgatgggcattaccatcggctccatcgccgccgaaatggcctcggagctggaatcgcccctgcggcctctttgggccatggtggtgtacgggctggctgcgtggggcatcgccctgctgaccaacaagtctatccgggtacggcggttcatcaccggtaagccgctgatcctcatggacagcggcgtcatctaccggaaaaacctgcggcgagcccggatggatctcaacgaatttctcatgtactgccgggtatcggggtattttgacctcaaccagatccagaccgccattttagagcacaacggcacggtgacgtttctgccggcggccatgcagcggccggtgacgccggcggacctgtccatgcagccccagcaggagctgctccagaccccggtggtgcaagacggccgggtgctgccggagaatctgcggaaggcgggaagggacggcgtgtggctggagcggaagctgcgggagaagggatatcacggcccggaggaggtgctgctggccatggcagccaccggcgatcagctgacggtataccccatggagaccaagaaggaagccagagaaatgccgtaaaatcagcaggatattgcgtatgatacgcaatatcctgctgattttatcgtagctgcccggccagatggccgctggaccatgcccattgcagattgtagccgccgcagtcgccgtccacatccagcacctcgccgcaggcgtacaggccggggaccagacggctttggagggtgtggggatcgaactcgtcggtacggagccctccggcagtgacctgtgcctgatcgaagccgcaggtgccggtgacgggcaggtcaaagcacttgcaggtgtgggccagcgccgccagtgcctcctccggggcgtctgccagggggagggagggggagagcccggcgtacttggccgccatctggctcagacggctgtggagtgcgccggtgaaggcctgtccgcaggtgaattcccgattgcggagcgccagtgcctgccggcggcgtagccatgcggcggtgtctgtctctgactgctccggccacagatccagcgacagggtcacgtcctcaccaatggcatagcgggagatctcgaagatggcggggccgctgacgccgtactcggtgaagagaatttctccgtggttctccgccagcacctcccggccccggcgcagagtgatgcgggcggtggttttcacgcccttcagggagcggggataggtgggatcggtcttgagctgcaccagtgccggggtcagcgccgtgcggtgatggcccagccccttggccagccgatagccgtccagcacgccgcccaccttgctgccggcggcgccgcctgcggccagaatgacgcagtccatgccccggaggacctcgccgctctccagcgtcacggtaaagccctgcccccggcactttagggaggtgacggggtcaccggtccgcagggtcagccgatccggctgtccctccagcgccagacgcagcacatccagcacggaattggcggtgttggagcggggatacagcttgccgtcgggctcctccaccgtgacaaggcccaactggtggaaaaagcgcagtgtttccgccaccgggaaggcctccagcgcagggcggcagaagtccgggtcggctccgtggtagtgagccggggaggcatggcggttggagaggttgcaccggccgttgccggtggacagcagcttgcggcctacccggccctgccgctccagcagcgtcacccggttccgggggtcggagagggccgtcagcgccgccatcaggccggaggccccgccgccgatgatgcagacctcactcatggcgctgtgcctccagccgcttgcgggtgagatagccctccagcatcagggacgccgccacggcgtccaccacctttttgcgctttttggcgttctttccattgttaaataggatgttgtgggcatccaccgtggtgcgccgctcgtcccacagggtcacggggaggcccgctgcctgccgcagtgtctcagcaaaggcggcggccttctcggcacggggacccacggtgccgtccatgttcttgggatagcccagcaccagctccgtgaccccgtgctccgggagcagccggaggatctcctgtaccaccacctccgccttgcggctgtcgatgacggtggtgaagcccgccagcgtgccggtgacgtcggagatggcgatgccggtgtgggcgtcgccgtaatcaatggccatgatcttcattctcacatacctcgcagggtgaatttttctctatcatacacaacttttccctccggcgcaaccggtggcagagaaaaaaacggagaagggggagaaaagcgccgttttcatgaaaaatcttctccttttcgtgaaaaaacgccttgacggagggacttgcctgtgttagaatagtccttacctgtggacatgggctttcttttcatgcgttttttcgcttctgacgcagaaaagaggctgcgcccttcagggaggcaagcggcggtccggcggggccggagccgtcaatctaataaggaggtgccgttagatgcgagtgaagatcactttgagatgcaatgagtgcaagcagagaaactacaacacgatgaagaacaagaagaacaaccctgaccgtcttgaaatgaacaagtattgccccttctgcagaaagcatacggtccataccgaaaccaagtaattggaaggagaaacagcgatggcagaggaaaagaaagtcaagaaggatcacggcaagtggttccgtgaaatgagaagcgaactgatgaaggtggtatggcccagcgccaagaccacggccaagaacaccggcactgtgctgctgtgctctctgggtgtgggcgcctgcatctggatctttgacggcgtggctgtgctggccgtcaagacgctgatcggcctgtttacgcactaaggagcggagcatggctgataacgcaaaatggtatgtcatccacacctattccggctatgaaaatgcggtgaaggcggccattgaaaagtccgtggtgaaccgcaatatgtccgacatggtcctgaagatggagatccctatggagaccgtcaccgaggtcaccgagtcgggtgtcatgaaggaagtggagcgcaaggtattccccggttacgtcctcattaagatgatcttgacagatgacacctggcatctgatccgcaacatccgtggcgtcaccggcttcgtaggagaggccaacaaggccatccccctgacggaggaggaggtcgctgcactgggcgtggaaaagcacgagatcgtggtgctgtacaacgtgggcgataccgtgaagatcacggacggccctctggccagcttcatgggtaccgtggaggagatcgacgccgacaagaacaaggttcgtgtggtggtctccatgttcgggagagagactcccgtagagctggagctcgatcaggtcgaggtcgtccagccctgagtgcgtcggacgcacacaggccggagcatcccctccggcgcaagtgggagagacgctgtgcgtctcgccaagagcaggtccggtatttgaccggctgctaccacatttttatgaaggaggtgcctctttatggcacagaaagtcgttggttatgtaaaactgcagatccctgcaggcaaggcaacccccgcaccccccgttggccccgctctgggtcagcacggcgtgaacatcgccgctttcaccaaggagttcaacgagcgcaccaagaatgacatgggtctcatcatccccgtggtcatcaccgtgtacgccgatcgctctttcaccttcatcaccaagacccccccggctgcggtgctgatcaagaaggagtgcaacatcgagtccggctccggtgtgcctaacaagaccaaggtggccaccatctccaaggcctccattcagaagatcgctgagctgaagatgcgtgatctgaacgctgcttctctggaagctgccatgagcatgatcgccggcaccgcccgttctatgggcgtcgtcgtgggcgaataaggagggtgtaagagatgtttagaggtaagaagtataaagacagtgcaaagcagatcgaccgtgggaccctgtacgatcccaaggagggtctggagctggtatgcaagaccgcttccgccaagttcgacgagaccgtcgagctgcacgtgaagctgggcgttgactcccgtcacgccgatcagcaggttcgtggcgccatcgtgctgcccaacggtaccggcaagaccgcccgtgtgctggtgttcgccaagggcgacaaggccgacgctgcccgtgaggccggcgccgatttcgtgggcgatatggacatggtggagaagatccagaaggagaactggttcgacttcgacgtggtggtcgcttcccccgacatgatgggtgttgtgggccgtctgggtaagctgctgggccccaagggcctgatgccctcccccaaggccggcaccgtcactcccgacgtggccaaggccgtgaaggaggtcaaggccggtaaggtggagtatcgtctggacaagaccaacatcatccactgccccatcggcaaggtgtccttcggcgctgacaagctgtatgagaactattctgctctcatcggcgccatcatcaaggccaagcccgccgctgccaagggccagtatatcaagtcctgcgtggctgccgccaccatgggccccggcgtgaagatgaacgccaacaagcagatctgacgctgcaccgggccgattcgacccgaaacgcttcaatatcttcggtagggtgcttgacaaagcgcccggccgctggtataatatttgatgcgttccaaagacagcaggtggcgcaagccgtaagtcctgccgaggatggcaaatcgattttgattgcttacaccgtccttgtgtccttggatacagggacggtttcctttttttgaacgcaccgacaatttttccggaggtgaaatcaaagaatgcccaacgcaaaagttctgtctgagaagcaggccgtcgtggcggcgctgaccgagaagctgcagaacgcagctgccggtgtcatcgttgattacaagggcatcacggtggcagaggataccactctgcgtacccagtgccgtgagaacaacattgactacgctgtcgtcaagaacaccctgctgcgctttgctttcaacaatgtgggcctgaacgagctggacgatcagctcaacggcgccacgtctctggccgtgtgcatggatgaccccgtcgctccggcccgtgtgatcgcagagttcgcaaagaaactcaacggcaagttcgagatcaagggcggcttcatggacggcaaggtcgtctccctggagaccgtcaatgctctggctgccatccccgctctgcccgtgctgcaggctcaggttctgggtaccatgctggctcccatttccgctctggcctgcgtgctgaagcaaattgcagagaagcagggcgctcccgctgaggaagccgctgccgagtaatgagacgtttcgtctcgacccctatctaaaaaatatcttacaattaggaggcttatcaaaatgtccgagaaagttactgctatgatcgaagaaatcaagggcctgaccgttctggagctcagcgagctggttcacgctctggaggaggagttcggcgtttccgccgctgccatggctgctcctgctgccggcgctgctgctcccgctgctgaggagaagaccgacttcgacgtcattctgaccggcttcgatgccgctcagaagatcaaggtcatcaaggtcatccgtgaggtcatgggtctgggtctggccgaggccaaggctgccgtcgagggcgctcccaccaccatgaaggagggtctgtccaaggaggatgccgaggctctgaagaagcaggtcgaggaagtcggcggcaaggtcgagctgaagtaagtaattcttcatatggaaaagagcgttccgcagggaacgctctttttttgtcgcctcgctccggtttggcctgagctgcacggagcatcggcccgacgttccacagatgaaattttttccacgctgactatccaacgctccgccacattggggcgtgttttcatgtggagagatggctgacatcggggaataaaaggagcctgcatggagtttttcgcgaattttttgacgctgcggggggagtattatgcgctggtactggtggcctgcgccgagctggtggcgactggagatgaaaaaggacgagagcaagcgcatggacattgacgattttcttgaaacggtacggcgatacacggacgcgaccaccattacaaagcggatggttgcagagctgatcgaccacattgaggtgtaccacgccgaaaagcaggacggcgttaccaatcagcgtgtcgtgatctgctacaactgcatcggtgcctttgatgtgccggatcgccggaaaatcccggaggcgacattatcatggaaaaaagaaaaggcgtagcactcagctacgccccggaacgccttgcagtatgaactttgtgggaaataaaaaagcagagtgtccattacaggatactcagatcctataaggacactctgcatgtcttttgttgccgaaaaagatacagcccg

SEQ ID NO: 12427 - DNA, 837 bp, Unknown
  gut microbiota DNA sequence
atgctgtccccggccacattttcgaacatcagcatctctccgaacacgctgcctgtgggcagatgctccagaatggtacgtcccccctgccggtcaatgcgctggatgacggcgctgccggcggtcagaagccccagctctccccggccctcgctgatgtcataaatcacggtgtcggcccggaagcgctcctcccggacgccgaagcacacccgcatctgctctacctcatcggggctgatgcccgcaaggatcggtatgttctccacaggggacctcctttcctgctgccgccatgcggcgatcccgccgcccgccgatgatcacatagatgatgacataggcgatggcgcccaccaccagggccgccaccacatcgatgaaggcgtgctgcttgacaaagagtgtggagcagatgatgatgacgccccatatgtctgcgaaagtgcgccatccggtgcgccgcagtcccggcgtccggtgaacggcatagagggcgtccagcacccccagcacatggacgctgggcagcacattggtgttggtgtccagattgtaggtgttctggaggagccacgtgcagaagttgtggtgctccatcaccgccgggcgcaggtcctgtccgttgggtaccagcgcacagaagatggtggcaaacccgaaggtcaacatgatgctccacatataccgccggaagccctcggcatccttgacgatcaggtaaaggcccagcgccagcagaagaaagccccatgagtcatagggaatgacaaagtactcgcagaaggggatgtattcatcgataaaggtctgggtggcccaatagttgtcggtgat

SEQ ID NO: 12428 - DNA, 1638 bp, Unknown
  gut microbiota DNA sequence
aatgtctatgaaaaaatatcagaagcaggtgctctccctgttagccggagccgttctgggttatttgttatattaccatttcttcatggacgtgattttgttgattgctcatgagggtttcctgtatatgataattaacatagctatgttgctcctgtccatcgttggctgtgccgccatcatctatctgcttctggaaaaacgggtcagtaggtggatgctggtgctgctgagcgtcacctacttcatagcgctgttcatcatcctgttctgccgccaccgggtggggcgcatcgccattctggatccgttggtggggctctcgcagctgggagactgggagatgctgatgcagagcctgctgaacctcctgatgttcctgcccatgggctttttcttccggaaccggaagccatggcaggtgctgctgggggcattgggcatctcgctcttcatcgaggggatgcagtacctcaccatgcgggggatgttcgacacgctggatatccttctgtacattctgggcatcagtctgggagcgctgctgttccggctgctgcgcctgaaaatcgagtaaccaaaggagcatttcatggagattctggttctttccgattcccacggcaaggtagatcacatggtccgggccgtggagcagttccatccccggcaggtgctgcatctgggggactgcgtccgggacgctcaggcgctggagcggcaattcccccagctgccggtgaccatggttcccggcaactgcgactggggccagaccggagagccggagcgcctgctggagatagagggcgtccgcatcctcatgctgcacggccacacccgccacgtcaagtcctcccccatggctgctgtctacgccgccagagagtacggggccgacgtgctgctgttcggccacacccacgtccctctggtggactacgacggcgccctgtgggtgatgaatcccggcgccgccggggactacacccgtcccacctgtggtcttctcaccatccgggagggggccgtcatctgctccgtgcagaatatttctctggggaggtaagcatcatgcgctatatcggctgtcatctctcctcctcggtgggctttgccgccatgggacggacggcgctgtccatcggcgccaacacctttcagttcttcacccgcaatccacggggcagccgggccaagcctgtggacccggcggacgtagccgcctatctggcgctggcggcgaaggcggggctggggaccattctggcccacgccccctataccatcaacccctgctccaaggatgagcgcaccagagagttcgcccggctgacgctggccgatgacctgcggcggatggaatatctgccggggaatctctataacttccaccccggcagccacaccggtcaggggctggagaccggcatcacccagatcgcagacaccctcaacgccatcctcaccccggcgatgcacaccaccgtcctgctggagaccatgtccggcaagggaacggaggtgggcagccgcttcgaggaactgcgggagattctggaccgggtgacgctgacggagcagatgggggtctgtctggatacctgccacgtctccgacgccggatacgacgtggcc

SEQ ID NO: 12429 - DNA, 9981 bp, Unknown
  gut microbiota DNA sequence
ttcggtgttccgggactatagggtcaagattgaattcaacatcaatgtagagcagttcctgaacggtatcgacagcatcgacgaatgcgatactacctatgaactgcctatggcgcaataagctctcaccctcgccacgatcacggcgaggggtacatatcgtaaaggtatgtccagttgacaacatataccttctatgctatactgcaacttgtctctcatcaattgccggagcgggacattcaagccctttcccaagccatcagggggtgcatacccgatggttcgggagagcgcttgaatggcattcaagaggtcagcggttcgatcccgcttatctccaccaacaacagaccgtaaggccaacgccttacggtcttgttctatctacggttcagatacacctccccgcttcccacaacaattaaatcaagtacacaattggcgcccattttcaatgcgaagatgggcacttttttattttatcaacgaaggagaaaacagatatgaacaaccacagtaaagatttacaaactcgctacctcagagaaacggcaatacagattccattatgtcggcacagacagaagtctgtatgtgtttgaagcacccatcgatatgctgtccttcatcaccctttatccggagaactggcagcggcacagctatgtagcctgttgcggcacatccattcagccggtattgcagatgttggaacaagcgccgcagctcggcaccattctgctctgcctcgataatgatgaagccggtcatcaggccagccgccggatgcgggagcagttggaaatgcgctattccgtggagcgcctgatcccggaaaacaaagactggaatgacgatctgaccctgagcgcggaaaatgctcagggtttttctatgaatgaaatgaggtgaaatgttgaacgcaagtgtctggatcctgattgcagcgggagcggcgatgtttcttgttatcggcgggctgtccatgatgtcccaccactatacccttggcaatatcaaatcccgcactgtgggcgatgggcagcacggtacagcccgatgggccaccgacaaggaaatcaggcagacctatgcccatgtgcccttcaaggtcagagaatggcgcagagggcagaatctccccatggagcagggcgtgatcctcggctgcaaaggaaaaccgcaggagctcaccgcactggtggacagcaatgacattcactgccttatgatcggcgccagcggtattggcaagaccgctttcttcctgtatcccaatctggaatatgcctgcgcctccggtatgagctggctggcgctggacagcaagggtgacctggcccgcaattacggcacgattgcaaagaactgctacgaatacaatgtatctgttatagacctgcgcaatccgccccgttcagacggcaacaacctgctgacactggtcaaccgctacatggatatcgcaaggaaagatcccaagaacctggcggctcgagctaaggcagagaaatacgctaagatccttgccaaaaccattatcaatccggatggcgatgacagcaatcgcggacagaacgcctttttctatgatgcggcggaggggctgctcacttcggtcattctgatactggcggagtttctgccgccggataaggagcatccacaggagcgccggcacatcgtctctgtcttcaagctggtgcaggatctgctggaacccagcaaagtaaagggcaagagtcacttccagctcctgatgggcaagctgccgcctgaccacaaggccagatggtttgcgggtgctgcactcaacagcgcagagcaggccatggcctctgtcatgtccacggtactttctcgtctcaatgcatttctggactcggaactggagcaggtgctttgcttcgacagcgccatcgatgcagagaagtttgcttctgaaaagtctgccatctttctcattcttccggaggaggacaccaccaaaaacttcatggcgggcttgatgattcaaaatctgagccgtgaactgtttgctgtggcggatgaaaacggagggaagctgcaaaaccgtgtggtactgtattgtgatgagttcggcactatgcctcccttcgatgtccttccgctgttctccgcaggccgttcccgccgcctgacgctggtgccgatcattcagtccttagcgcagcttgaaaaaaactacggaaatgaaggaagcgaaattattcaggacaactgccaggacaccatcttcggcggcttcgcacccaacagccagacggcggaggtgctgtccaaggcgctcggaaaccgcaccgttctgtctggatcggtgagccgtgggaagaacgaccccagccagagtctgcaaatgatggagcgtccactgctgacgccagatgagctgaagtctattcccaaggggaattttattgtccaaaagacgggacagcatcccatgcgtacccgcctgcggctttttctggaatggggtatctccttcgaggagccttatattgttccggagcgggtagatcgtgcggtagcttatgcaaaccgtgaggatctggagcgaaatcttccgcaatcaagcaaggcggagaatgcggatatgcgtggagcctatgccgtttccggacgcggcggcattgcccatgagcctgctgcagataagccccggcgcaggggcggcaagcagatgaaaacttacggtgaggaggatctatgagttactttggaacaatttacgccgacaccgaactgccctccagagcgagggcagtttatatgtatctgcgtgaccgtgcagacagcgagggaaaatgctggccaggaatcaagacgattgcgtccgacatgcgattgtcacgctccacggtcaaacgggcattgacggatctggagcaacatggatacctgcaaaagatcccacgctaccgtgacaatgggagcagcacatccaacctgtattccatgcagtaagtccgtaaaaaagcgcagtcctccgccaagggaggactgcgcccatttgctgaacccaggggaggttcatgatggacctcccaggaggactcactttatcggagatttaatacagagaaagaacggcagactaagttgcattttttggaaatacatctctgttttttcgactgcaaagggaaggataacaggcgggcaaacggctgacttagaagagcagcactccaatgtggtaaacgatacaggctatcaacagcgacgcaagggtgtagaatacaccgattttggccgtccagcgaacggaatgggcctctcttgccgtggccgccagtgcgctgacgcagggcatattgaagctgatggcgaagataaaggccagaccttccgccttggtgaaattggcggccagaatttcggagatgccgccggccgctgcggcagaaaccttcgcgccgaagatggaactcacaaggctgccgccagcgccgtaaagcgtattcaaaacgcccagcagggactctttggagatggcagatgcgcagaaggcgagaaacgcctgccatttcaggccgaagaacctggttaccggatcgatcacaacgccgactttgtagagaatgctgctttctacgcttccgccaaagccgtaggtcagtacgaagaacacgatagacaccagcgagatgacccgcagagcccggaggaaaatgtccagtgtgcgctgaaaggtcacatagaggatattgcggaaggcgggcttgtggtagggcggcagctccataatgaggcccacccgttcctccttgggggcaagggatttgccgaacactctgtagacgatccacatcatcaggaacataaacaggaagatggacaccattgccagaaagccgctggtactgctgaaaagcgtaatggcaatcgtgggcacgaccgacagtgtagctgaacaggggacggcccagctcatggcaatggccagcacccgctgcccccagttgtccacgacacgggtacctgtggtacctgcgatggtgcagccgagccccataaagaaaggcatgatcgctttgccttgcaggccgactttggacatggtgcggtcaaacaggaaggagaggcgggccagataaccggtttcctccatcagattgaagccaagggtgatgcccagcacgaaggacgccatcatcagtgcgaaaaacagcacattgatcagcacatcacaaatcagggaaatcagcagcccatggacatgaatctgttccattccggagcgcagaacatcgctcagcggcgtcagtactgccgatgcgatacccgatacaacaccggagaagatcatcgacagcaggaaaatcagcaggatgatgccgaaagccagcagctttccccgaacgggagaaagcgccagacgatcgaacttactgaatgcctgctttgcggttttgtctgccgtcagtacgccgttcagcaggccgtcgatgtagtctgttttctctttggcggattccatggcttgtcccgtaatcacaggcttttgcgcaagtgcggcttctatcgtctcatagagagttcgataatcctttttccggatggcagacataggcaccaccgggatgcccaatttgcgggacagcgcctcggtatcaatggtaataccctggcctttcgccacatccatcatgttcagcaccagaatcgcaggaacctgcattcctacgaaatcggccagcatataaaggctgcgcttcagctgggaggcatctgccatgaccagcgccagatccgcattgccggaggcgatgtagtccagggtgatgatttcttcgtcagagccggcggagagcgaatagctgcccggcaggtcggccacgatcattttctgagacgcgatttgtcaaggtgtgtttctgcaaaaaattcagatgcttcaagattgcagttgcattcctcccaaagcggctgtcttgcgacaccttttatttcacattttattccaatgattaacaagaggcacccttttatattgggtgcctctctatgaccttttatttcgtttggattgcccataactcaatatagctacaatggccgtcggagcctgactgaatttcattcccgcttatcatttgggtgatagtcacacatgcccaaatgttccgatatcaaaatagtcccggattcgattgattgttcgctccgaccatgtgccatattcaataatctccccgttctcaaaaaacaggtaataatcgcagcatttttcaaccaactccgggtcatgggtgataacaagctgcgtttttccggcttcggccagcgcattgatgttctgcgcaacacgctccatatttcgatagtccagaccgcttgtcggctcgtcgtacagtatcagttccttctttgcagccagcgcaccggcgatggccagtcgctgcttttgcccaccggatagtgccataggatgagtatctttgcaatctgcaaggttcatccggcgcagtgcgtcctctgcaacagctgttttttcttctttggataaagacagcccgagcgtaacatcttctaaagcgctttctgaaaacaattgatgattcacatcctgaaaaaccataaaggacagttttcgcaactctcgcccgcggtatgttctatttccatcgtatatttgtaccttgcattttgtcaatccacacaggcactttgcaaaggtactctttccggcaccgttgtttccgagcactgctacgactgcgccttttggaatttcaagttttgggacatggattgaaaaatccttcccatttgcatattgaaattcggaaatcgtatagtgtgcatcggtcagtgttactcctgcttttatgggggcaaagccggaaaaactgcgcagcccacggcttcgaaattcctctggtgatctgctccaaaattcggcggcattaatatcttccgcaatttccccctctcgaaaaataagcacacggtctatgagatcctttgtccaccaaagccggtgttcggcaatcaaaattgttttcccggaatctttccacttcctgataatttttttcagttcgcggatcgcaccgatatccagattagaggtaggctcatccaatataaagattggtggctcaagcatactgacgcaggcgcaggcaatcttttgtttttcgccgccggacaactgagacacatttttcccgagcagcttttccatgtgaaaatcctgcaccgttttttcaaaacgactgaatatctccgatttttccatgccgatattttcgcaggcaaatacgatctctgtgtcggtaagaagcgtataaaattgtgattttgggttctgaaatacagaacctaccgtttccgctaactcgtgaagctgaatgcctgccgtacttattttgttaacgaacacttgtccgtccatttttccgtcgtaatagcaggggatcaagccattgatcagccttccaaaggtcgttttcccgctcccggattctccgcacagcaagaccacctgtccttttggaacagtaacgctgacattttttaaggaactttccgattctgcagtctcatagaaaaaatctacattctttatctcgatcatattacaatcccagcacctttgaaataatgaaaagcatgattacgacagcgcagaaaacaaacgctatgatatcctgcgcatggaatccgctccggcacacatttgtccgcttattcggcgcatccaggcctcttgtcatggctgaggcggacaattcgtttcccacctgaaccagttctgtcaaaagaggcaccatccggtattccagcatttcagaaggatgcgccagagttccaattcctctcagccgcaaagcatcccggataaactgatactcctcgcgtatagttgggaaaaaccggaacatcacagataccggaaccgagaacttctttgaaatatggaaaccatccatcgcggcgatgaactcactcacagacgtagacgacagcagtacattgaacatggcgagaccgggaagcatttgcgtgaatattgaggcaattgcagcagacataatattcaggaaaggcgcgtcatactgtcggaggacaaccggaaggaataggcagattccgtaggcaagaatataccctgttgccgttctgtatttcttcaagatcagaaacgagaagaatgggagcgctgagaggacaggaaggacaaaacgcataactcctgtgtaattgcaggaaaacatgataaaagaagtcaaaaggcacaaaataagttttgtcctcgcatccagatagagttgccgggaggttggtttttgcccaaacagtacgcttttcatcaaattataccgcttttggcaaagtgctttttcagcacggcttttccaatgtatccgccgattatgccaccaataaaagcagaaatggccaccaatggtaccgtataaccgtgagaaaagtaacccgacataatatccatgtattcctgcccatagtatgcagccttttctgcaaattgcgcttccgtcataagggcaaaactgagtacattggcgtttgcccctacgctgcaaatcgcatagctgagaatcgcagcaaaaacgcttttgtggtgtttcgctttcaaaataaactccgcagccactgcgcagagcgttccgccgatcagactgtagaaaccgacgcctgcgagcgtgaggatcacgccatagatgatataggtaataagcaccatgccgaatttcttgatcttcgagaagtagagcatcatggggatgcccagcacaagcgaacttacaaatgggatcatcatgttgacgattggaatgaatcccattgctgccgcaatcaatagattcagtataaaatagacagcggtaaatatgccgatattgatcaggtcttttccgttcaacctgtttgttttttccttgttcatccgaaaaacctccatttcatgttctgaccttccagatcaggctttcattttgcagggtataaagcctatgatagagtccgttttctttcatgagcgcatcatgcgttccttcttccgcgacattgccctgctccagcacgacgattttatcacagcctgccacggtgcgcagtttgtgggcgataatgagcaccgttttattttcaatcagtcggctgattgcctgctggattcttgtttcattttccgggtctatactggccgtgctttcatcgagcagaatcaccggcgcatttttcagaaacgccctggcaatggaaagtcgctgccgctcgccgccggaaagcgtttttccgttttcgccgatcaaggtttgatagccatcgggaagacgcgctataaattcatcgcaggctgccagttttgctgctgcataaacttcttcttccgttgcatcctctttgccgattttgatgttattgtaaatcgtatcgttgaacagtacgacatcctgaaaaacaatggaatagtttttaagaagctgttccggtgcgatttttcgcagatcttctcctccaatcgataccgttccgcttttcacgtcccaaaatcttgccgcaagacgggcaagcgtacttttgccggaaccggatggaccgaccaatgcggttatttcgccctgctttgcagtgaaggaaacatcgtgcaggacttcttcgttattataggcgaagctgacatggtcaaaccgaatatcaaagctgctgacgctcacattctcgctgccgccctgctcgggttcttccagcagctttgtcactcgtcccgcgcccaccagagacgcgatgaaatcgccaagatgctcacaagcacttgtcagtggttcatagatacgcaccgcagcatacagaaaaatcagaaacttgaacaggctgatttcccctgcggcaagcattcccgatccgaagataataacaagcccaagcccaatgcgcataacattgtaagaaacggaaatggacaaaccggccagcagctcatatagcacaagcccaggaatgatacgcttgatttttttattgagtccctgctgataatcctccatcgcttcggtggtacgcagcagctttatgttttcaaggtactcctgcaatcctgcgctgacgctcagctttttatttcggttctttttatttgtgccctctgatatcttccttgacagcgacatgacgagtattacgacaggcaggcaggcggcaagatagagggcaagccgccaatcgtacacgaacagcatgagcagggaaacaattcctgtgatcatgccgccaatcaactcagctgcggtctgcgacaagacatgagacatcgtctgaacatcgtccataataacgcccgtcacatcgctcaaatctcgcatccccaaaaaggacagcggcagtcttctcagtttgtccgcgagctccattcgcagtttgtattcttcctgcccggaggttagatactccttgtgatatgcaaccttataggttacaaacattacagccagaattaccgcaagtgccagcgcatagggaagcagcgagatctttgcttcgctgtcagcgtaatacagcgtgatcattttctcacttgccatggcaagcaggattacaggcagcagtgcggcaaggttgaacagggcaagccatatgccagcctgaacgatcgcttttgagccttctttgctcagatgaaatatcttaccgaatatcatgactgtcctccaattctccacgatacgcttctctcgtactcatgatacattccggcgtatacgccttgttgctgcatcagggcttcatgtgtcccctgttcgacgatccgtcccttctgaagcacaattatctggtcagcatggacgatggtttgcagccggtgtgcgatcatcagcaccgttttgccttttagaagcacatccagtgcttactgaatcaagtattcgttttctgcatccgcaaaagctgtagcctcatccagcagcacgataggcgcat

SEQ ID NO: 12430 - DNA, 1364 bp, Unknown
  gut microbiota DNA sequence
gaagggaactggtctgatggatcacctgataggcgccctcatagtcccgctccacgatcttggcgatgaactccgggatgcggacgttgacggggcagccgttgacgcagggatggttcttgcagttcaggcagcgggccgcctcgtccagagcctgctcctcggtgtagcccagagccacctcgaggaaattcttattccggacattggggtcctgagagggcatttcgttcttatccaaacgcatattgatctttgcagccatcttactttacctcctgcttgaacagattgcagacttcctcgtgcttatgcacctcgaaatcatgatacatctggttgcgcttgacagccagatcccagtccaccagctgaccgtcgaagtcggggccatccacgcaggcgaacttggtctcgccgcccacggtcagacggcagccgccgcacataccggtaccgtcgatcatgatggggctcatggagacggtggtgggtacgccgtagggggccgtggtcttgcagacgaacttcatcatgaccatggggccgatggcaaagatctcatcatactgattgccggcgtccagcagctccttcagtgcctcggtcacaagacccttctggccataggagccgtcgtcggtgcagaccttcatcacggaggatacggccttgaacttatcctccaagatcaccacgtccttgctcttgaagcccactaccgcgtggacctcagcgccgcagtcgtggaacttcttcagaacggggtaggcaatggcgcagcccacgccgccgccgacaacgcagacctttttcttaccctcggtctcggtgggcttgcccagaggacccacaaagtcatgcagataatcgccctgctgcttgtggctcagcttctcggtggttgcgcccacggtctgcacgatgatggtgacggtccccttctcacggtcatagtcgtggatcgtgatggggatacgctcgccgttctcgtccacacgcagaatgatgaactgaccgggctgggccttcttggccaccatgggtgcctcgatctcgtacaggatcacagtgggcttcagcgcttccttcgttacgatacgatacatggatgttccttctttcctcaaaagtcatggcttgctacgttccatgggcacacacggaactcctcacccgtgtgtgctcaccttatcttatcacatccgcccatggttcgtcaaatatttccttgcactttccctttttcatgcaagggcatggtgcagcgtcacctgtccccggtcgatatccaccagatgctcctccttcattttccgcagctcccgcatcatggcactgcggtcggcggagatatagtccgc

SEQ ID NO: 12431 - DNA, 377 bp, Unknown
  gut microbiota DNA sequence
gcgcgcacgcggtttaccatttttcagagtcttttctctggggttctcaaaccacgccagttccttgatcttcagaccggtgaaggtatccatgagccgctgggcaatctcccggtgggtaaatactccgcagtcccaggagcccatcagccatgtctgtataaagtcgcccaccttgctgccaggagcaggcggcccatagacgctctcgtccgcccacatgacctccatcttttcacattgatctggccgggggcaggattgcttgttgccataacgatacatgatattcacatagccatagtcttcgccggttcggtcatgaccgacggcttccactttataggcagttatggacattgcagttccacctcctg

SEQ ID NO: 12432 - DNA, 38370 bp, Unknown
  gut microbiota DNA sequence
caccataaggtggagggactgttgttctaaaaaacgctttccaagaaaagcttactcctgatcgcagttggggcagtggccattctcatccagatgagcgccgcagcgggtgcagaagctgggcgccacgggagccgcctgctcagcgggctggaagggagtcgaccgctgggcgggagccgcaggagccacgggcgttaccggagcagcgggcttagcgggctgggtacggtgcagctccggcacggcgaacaggtcggcgtcggcgctgcgctcgttctggtttttcagcttgcggttgatggagatgacgttcttcagcagcaggaccgccatcatcagcagctcatagcacagacgtaccgcaatggggcccagcaccatcagcaggatgccgtagccgcccagccagtgacggccggtccaagtctccggagccatgaacagcatgaagaagccgcacagaatgacgtaggccgtcacgaagatgtacagagcctgcaggatcttctccacgatcaggaacttaaagttcacagcgtcgtggaggaacttgccgaagcggcccagcttctcccgcttgctctccggtacgatcatcacaaaagctaccaccgtagcggcgatagcgaggatcgtggcgatgatgccgaaagcacccaggttgatgttcagatagttcatagctaccatcctttcgtttcatatgattttctctgttgcccttcgtcgaaagctgtcgaagtgcgggagtatcgtatcacgaaaggggaagcttgtcaacatccgaccaaagtggacagaggcaggacggatatccacttgacaaatggtcccaaaatgggtatattatgtaccagtcaagtgaacatcttccaccttgggggagtaattccacttcgcagcctgcggagtgaggcagtttcgtcaaaccggcgttcaggcgcccggactgctttgaaagaatgagactcatgcgtgggcttcggcctgcgcatgagtttttttgttacgccgggtgggtaaaatggagatgggggaggacccccgaagaaggagtggttggatgcaaaaggaatacacccaaacaaaggaacaggtgctggagggcctgcggacagaccggcagggcctttcggcgcaggaggcggagaagcgccttcgggagcacggagagaatcgcctgaaggaggcggagaagctgaccttgtttcagcggttcgtgcagcagctgaaggaccccatgctgctgatcctgctggcggcggcagcggtgtccgccgtgaccaatatcctgtcccacgagagctttacggaggtcatcatcatcctgctggtggtgctgctgaacgccattctgggcgtggtgcaggagagcaaggcggaggccgccattgaagccctccagactatgactgccgccacctgcaaggtgctgcgggacgggcagcaggtgactatggagagccgcctgctggtgcccggcgacgtggtgctgctggaggcgggcgacgccgtcccggcggacgggcgcattttggagagcgcctccatgaagatcgaggaggcagccctcaccggcgagagcgtccccgtcagcaaattcacagagcccctcgccggggaacaagtgtcgctgggcgaccggaagaacatggcctacatgggctcggcggtggtatacggccggggccgcatggtggtcaccgccacgggcatggacacggagatgggcaagatcgccggtgtgctggcccagacggagcaggaggagacgcccctgcagcgcaagctgacccagctgggcagcaccctgtccaagatggtgctggccatttgcgtgttcatctttgtatttgacctgctggtggcgggttccctgacactggagagcgtgttggagaccttcatggtggcggtgtcgctggcggtggccgccattccggagggccttgccacggtggtgacggtggtgctctccatcggtgtcaccaagatgagccagcacaacgctgtgatccgccgcctgacggcggtggagacgctgggctgcacgcaggtcatctgttccgataagaccggcaccctcacccagaataaaatgacggtggtggagcacaccggcccggagggactgctgggtaccgctatgaccctctgcaacgacgccgtggagaatcccgacggcacggtgcagggcgagcccacggaggcggcgctggtgcgcttcggcgtggacagcgggctggataagaaccggctggagcaggagcagccccgtgcggcggaggctcccttcgactcctcccggaagatgatgtccaccatccaccgcatggataacggcttcattcagtacaccaagggcgcaccggatgaggtgctgcgccgctgcacccggtatgaggagagcggccaaatgctgcccatgaccgaggagaagcggcaggaaattctggctcagaacaaggccatggcggataaggccctgcgtgtgctggcggcggccatccgcctgtgggagggcggcctgcccaaggacgacagcccggagtatctggagcaagatttgtgcttcgtgggtctggcgggcatgatcgacccggtgcgtccggaggtgaaggccgccatccagcagtgccgcacggcaggcatccggccggtgatgatcaccggcgaccacaaggataccgccgtggccatcgccaaggagttggggatattggacgatccctcgcaggccgttaccggcagcgctctggacagcctcagcgacgaggagctggccaaggaggtggagaagtacagcgtgtacgcccgtgtacagccggagcataaggtccgcatcgttaacgcatggcgcaagcggggggccgtgacggctatgaccggcgacggcgtcaacgacgccccgtctatcaagtccgccgacatcggtgtgggcatgggcatcaccggcaccgacgtcaccaagaatgtggcggatatggtgctggccgacgacaactttgccaccatcgtgggcgctgtaggcgagggccgccgtatctacgacaatatccgcaaggccatccagttcctgctggcctccaatatgagcgaggtgctgggcgtgttcgtggctacgctgctgggctttaccctgatgaacccggtgcatctgctgttcatcaaccttatcaccgactgcttcccggcgctggcactgggcctggagcgggaggagccggacgtgatggagcggccgccccgtccctctgatgacggcattttcgccggtggtctgggctgggacatcgcctatcagggcatcctcattaccgttatcacattggtctcctacatcatcggccactgcatggaggtggggtatttcgaaatgcccaagggcgtctccgacgacggcatgaccatggccttcctgaccatgagtatgtgcgagatcttccacagcttcaatatgcgctctcagcggcgcagcgtgttcagcctgcccagtcacaacaaggtgctgtggttggccatgatcggcagtctgctgctgaccaccgtggtgctggaggtacccttcatcgccaacgccttcggatttacgccggtgagctggacggagtacgggattgcgctgggtctggcggtgctggtgatccccgtggtggagatcgtaaaagcctgccagcgggcccatggccggagaaagaaacagctttaagcctgtcaaatcgcatccgccggggcggcttttgccgccccggcgctctgtcagaaccctataaaatgccgggtcaccgcccggcgtttttctttctgcgggaatttgcgcggcggcgaaaagtgtggtacaatcacttattatgacaaatccctcggaaggaggcgtgaacgtatggaggatgaacggatggagcagaaccggcagccggaaaagacagatgtggtgttcttttccccggagatgctgcggttggcggatcagcaccggcgggagcagcaggagcggctggagaactgccgtcaggcggcccagaatggtgactgcgccgcagcggtgcagatgggactgcattatttttacggcaccggcggcgtgaagaaggacccggacaaggcctttgcatggttcagccgcacggagccggacgaccccacggctctttactggctggcggtgtgccatgacaacggcaccggcgtggagcgtgacccggtgcgggcctttgagctgtttcaggagagtgccaagctgggctatctgccggcggtgtgcgatctgggcgtgtgctacgaaaacgggcagggaacggagaaggatctggaccgggccatccagtgctaccgccatgcggcggaggagggctatgcacagggacagtgcaatctgggagccatgtactacttcggcgtgggggtggagaaggactatgggcaggcggcccggctcttcacccaagcggcggagcagcaacatccacgggcgcagttcctgctgggcctgtgctatgagttcggcaacggcgtggagcaggacgctaaaaaggcggcgcttctgtatcaggaggccgggaagggcggcagcgccgagggcctgtgtgctctgggcgtgctgcaccacgccggaaagggcgtggagaaggacgatcgccgtgcggcggagctgtttcgtcaggcagcggagctgggcctgcccagagcgcagctgttcctgggtcactgctacgacgacggcatgggggtggatcagtcgccgcctcaggcggtggagtggttccgtcaggcggcgcagacgggctatcccgacgccgtgatgcagctggggctgtgctatctgtacggtcacgggacagcgaccgacgagaagcaggcggcggagctctttcagcaggccgcctcggcggggaacatccgggccatgaacgagctggggctgtgctatgaggcgggccgtggcgtggagaaggatatccaccgtgcagcggagctgtaccgtcaggcggcgcagtccggtatggcggcggctcagtgtaatctgggcgtgctgtaccgggagggcctcggcgtagagcaggacgaccgcaaggcggcggccctgttccgggcatcggcaggacagggctttgcccgtggacagttcctgctggggctgcacttggaggacggccggggcatcgatcggaatgaaaagcaggcggcgcaggagtaccgccgtgcggcgggacagaactatcccaacggcatggcggcgctggcccggtgctatgagcacggcgtcgggctggagcgcaacccctatctggcggcggatctctatgaccgggcggcccgccggggccatgtgagggcggcctatgccctggggaatatgctgctctccggcgacgccatcgggcaggatccggcccgtgcgctggagctgtaccagcaggcggcacaggctggacacatgggcgctctgcggcaggcgggccggtgctatcagaaggggaagggctgccaaaaggacgaggccaaggcttttgactgcttccggcgcagcgccgagggcggagacggcccggcagcggtggcgctgggatactgctaccaaaagggcagcggctgcccggtagacgacgcccaagcggctcactggtacgaggaggcggcccgtcggggcctgccgctggggcagtacgatctgggctgcctatatgaggcgggacagggcgttccacgggaccggaggaaggcactggagctgtaccgtcaggcggcacaggaggtcccggaggcccgtcaggcggtccggcggctggaaaagaccggcagaacccaacgaatcgccggctgggcgctggtgacctacgccatactcatgggagccgggctctgggagggcagcgccggtgaccggatcatctggctggcggtggcggcctttccggcgatggccggagggtgctgcctgcactacggtcgccgtcttgcaccgccgctgagtaggatcgggcggatcgccctgacggttttaggggccgtgctggccttcctctttgtggtgggggtcgtggcgctgctggacccggcggaggcagtggacggcgccagcgtgtggctcaccggctgcgccggtgtcggtgcggcagccctgctgctgagcggcctgcggaagccttgtacataaaacggcgcagcgggggcgtgtaccagacggtacacgcccccgctgcatatgagaaagagagagactcgaagaaagcttcgttatttcatcgatcaatgacggccgaagaagtagtcgtacaggtcgctgtacccatttccgctgtagccgttattgccgttattgtagttgttgtcgccgctctggctgctgtctgcggtgtcgtcggtggtttggggctgtgcgtcgaaggtcagctgggtggtgatctccttgccgtcacgcagaacggtgagggtcacggtatccccggccttgaagcccttcttggcggcggacagatcctccatggaggtgatctgagtgtcgttgagcttggtgatgacgtcgcccagcttcagccctgccttgtccccggcaccatcgtcctccacggagtagacgaacacgccctcggtggcgttgatcttatactgtgccgccatctgctgggtcatggtgccggcggtgatggccatgtaggccttattgccgacggagccgttctccatgatgtccttgatgatggactgcacatcgttgatgggaatggcgaagcccaacccctccaccgtggtattggcgtagctggagtacttggcggacacgatgcccaccacctcgccgtacaggttcatcagggggccgccggagttgccggggttaatggaggcgtccacctggatcatgttgaagggggtgccctccacgttgatggcacggttcacgcaggatacgatgccctgactcatggagaaggtcagctcacccagagggttgccgatggccatcacggtgtcgcccacgttgacgtcggtggaactgcccagagtcacagccggcagatccttggcatcgattttcagcacagccacatcgtagtcgctgtcgctgcccaccagcgtggcaggataggtgtcgccgttatagagggtgacgttgatggagctggcgttggctaccacgtgctgattggtgacgatatagccgtcggcggtgtagatgaagccgctgccggaggaagcggactcggtctgctggccgaagatgttggtggagacggcggagcagttgatggagaccacactgttgaccgtggaggcgtacacctcggcgggactcatcagcgtctgtccgtccaccttcttgacgttgacggtagtggcggtgcggttgctctgctgcacggtggtcttaccggtgcggctgccgttctgggccagaatggcgccgccgaagccgcaggctgcgctgataacggcacagctgaggatcagggccaccacacgacctacaccgccgtggtgcttcttgggctgcaccggggtgtctgtcaccaccggctcggcggcgggctccacggaggacccggccgcagactctgtatgagattctgcgttgggatcacgatagctgaagtgatacaggttgttctcgtcatgaaactcgttggacatatgaaaaacctccttttgggatattgcccatggcggggaactgtgctatgatgtttagcaccgttccgtttctttgtctattatcatacccggaaagcttaatgtaagctttaagaaacggatttttctttgaacattttgtaaaggaggtgccgccgtgctgaagctggagggcttgaagctgaccccggaggagaaggaggcggccctgcaccggaaggcagcccggctgctgcgtatcccggaggaggatgtgctgtcggtgcaggtgctgcgccgctccatcgacgcacgggaggagctgcatctggtgtacaccgtggcggcggaggtgcggcaggagaagcaggtgctgcgccgctgccgggaccggcgggtcagccggtacgccccggagcggtacgctttgccggagatattgtctccgccggaggtgccgccggtggtggtgggcgccgggccgggcggcctgtttgcggcgctggtgctggcccgatgcggcctgcgccccattttgctggaacggggacaggataccgttacccgccagcgggacgtggagaccttctggcgcaccggcgtgctggacccggagtccaacgtacaattcggagaggggggagccggggccttctccgacgggaagctgaacaccggcactaaggatctgcgccaccggtggatcttagaggaactggtgcgatgcggtgcgccggagagtattctgacggatgccaagccccatgtggggacggatatgctgcacatcgcactgaaaaacctgcggcaggagctgctgtcgctgggggcgcaggtgcgcttcggccaccggctggagggactggagagccgggatggcgtcctgacggggctgcacgtccggacaggggaggggacgtaccgtctgccggtgcgggcggtggtgctggcgccgggccatagcgcacgggataccttccaaatgctgtacgaggccggggttcccatggaggccaagccctttgccgtgggggtccgcatcgagcaccgccagcgggacatggacgccgcccagtaccggcagtatgcgggtcatccgtgcctgccggcctccacctataaattgtcgtgccatacggcggcgggccgtggcgtgttctccttctgcgtctgccccggcggacaggtggtggcggcagcctcggagccggggcgtgtggtgaccaacggcatgagccactacgcccgcagcggcgagaacatcaacggcgggatgctggtgagcgtcacaccggaggacttcggcacggatcatcccctggcgggggtggcgtggcagcggcagctggaggcggcggccttccggctgggaggcggcggatttttggccccctgccaacgggtggaggactttctggcccatcgcccctccacggggccgggagcggtgctgcccagctatcgtcccggcgtcacgtggtgtgacctccatgactgcctgccgtcgttcctcacggaggctatggaggaggcgctgcccctgctggagcggaagctccggggctacgcccagccggatgcccttttgacggcggtggagacccgctcctcctcgccggtacgcatcctgcgggatgagagcggacaaagtgcgctgcgggggctgtacccctgcggcgaaggggcgggctatgccggcggcatcctgtccgccgcagcggacggtatgcgctgcgcagaaaaaatctgggaggtatattcatgatgagaaagcttgcagtggtggcggattatctggacgacagccaccgtacccatatcgaaaagatggccggggacgccggcttcaccgtggattatttcaccgagggccacctgcctcaggatcgggcaggggagtatgaggtgatctacggcaccgtcccccccaaggagctgaaggccgccacggccctgcggtggttctgctgctcctatgccggtatggatcagtggaaggacgatgccctgtaccacagcccggaggtgatgctctctaactcctccggagcctacggcgtgaccatcagtgagcacatggtcatggtgacgctgatgctgctgcggcagatgcccaccgtgcaggagtggatgcgccgccacgattggagcaacgagaagccccccatgcgctccgtctgcggcagccgcgtcacggtgctaggcaccggcgatatcggcacctcctttgcccgccgggtgaaggccatgggagccaagaccgtggtgggcgtctcccgcagcggccgccatgtggacgatgcctacgacgccatgtacaccacggcgcagctggatcaggtgctgccggagacggaaattctggccatggccctgcccggcacggcggagacggagggcatcctctcccgcagccgcatcgccctgctgcccaaggaggcggtggtggtgaacgtgggccgcggcaccgccgtcgatcaggacgctctgatggaggccctgaacgccggccggctggccggtgcggcgctggatgtggtgcgcccggagcctctgcctccggagcatcccctgtggaacaccaaaaacctcctgctgacgcctcatctctccggcttcatgtcgctgggcatcacacgggatacggcggtggccctcttctgcgaggattttgagaactacatcgccggccggcccctgaagcggctggtggaccgccgcaagggctattgataacgggatatagaagtatataggaacagggcctaccgctatgcggcaggccctgttcctttgtgccgccccgaagggcttcctgttacagactataccgcagcgtgcggtacagccgctgggtacaccgtgccagcgttcgggataccgtggacttgctgatccccagctcctgtgcgatgtccgtgacccgtttgccctgggtgaagtgcatccgcagcagctgccgctgccggggcgtcaactcctcctccaccgccaagggcagattcaccagcagacgccggatctgctggcggttgtcctcctgctgtccctgctgccacagctgcaggctggcgatatccagcgggtcatagcggccggagccgtcagatacggtatgccgcatagcggtggcaccccctgtcatagtagtgggcggtgtgatacgccagctcacgggcctgccgccgcaggggcatcagctcccggatgcgccgctgcagacacagcacctcctccgggtccggggccgtcagcgcccgctgatgcagctgccggatgcgctcgccgatagcgtcggcgctggcggcatagtcgtgggacatttcctgcaaggtcatagaacttcctccttccgatctccccatgttcctcctatgtacggcgaaaaaattcgccgggaacgcaaaaatactgttgacaaacgggccttcatctggtagtatagattcgctggtcaaatgctggtgtagctcagctggtagagcagctgatttgtaatcagcaggtcgggggttcgaatccgtccaccagctccaatttgatatgggggatttcccgagtggccaaaggggacagactgtaaatctgctggcaatgccttcggtggttcgaatccaccatcccccaccaaaccgacgagtcttttacgagactcgtcggttttctttttgtccgagagccgatgccgtcttccgacggggcgcaggaacgatcctccggcccagcggttctaaataccagtagctttggatatgatacccttgtgatgccagtattcttgtgactgaattaagactatcacaagaatcttgttatgtcaagagggaattaacaagtttcttgttaaaatgccttgacagaaaacaagaaatatggtagcatcacagtgaaaccgtcgaaagaagtcgaaggagggcgtgaccatgagctttggcgatcagctgaagaagcgccgggaagagctgggcctgtcccgctcggagctggcggaccggctgggggtatcccggtcggcggtgggcaattatgagaccggcgtcagcgctcccaaggaggaggtgctgctgcggctgttcgatgcccttcatgtggagcccaactatctgtatcgggatgcctaccggggcgggggagagggggtcagcgacgaggagcggagcctgctggagaagtaccgacggttgggcctctccgggcgccagaccctccacaccgtggcggatgcgctggggaccatgcagcaggagctgcaggccgccgccccggagcctgcgccccgtgtcatcccgctgtattgctccccggctgcagcgggctatgccgccccggtattcggggaggattatgagcccttgcccgtcaccggtgaggtccccacaggggcggagttggcggtgcggatccagggcgactccatggagccctatatccacgacggcgcggtggtgtacgtgaaccatgaccccctgcgggcgggagacgtgggcatcttctgcgtggacggcgatatgctctgtaagcagtactaccgggacccgctgggggtggtgtatctgttcagcctcaaccgccgccgggcggatgcggacgtgatcctgccccccagcagcggccgcagcctcacctgcttcggccgggtgatgctccacggcttgcctataccggaataaaaaagacccgtcggaaaaccaatggctttccgacgggtacttttttcccgctctcacaaaataaagccgccgtcgcaggtcagcacctgcccggtgatgaagtccgccttgtccgaggccagaaaggccacggcgtgggcgatgtcctccggcgttcccaagcggcccatgggagtttcctgcgccagctgaggcagtatctcagcgggcagggcatccagcatatccgtgcggatgacgcccggcgccacgcagttcacccggatgtgggtgggggccagctccgccgccagagatcgggtcaggccgatgagggccgccttggtgcaggagtaggtgacctcgcagctggcgccccgcagtccccagatggaggaggtgttgatgatgcacccctcgtggtggtgcagcatggcgggaagcaccgcctgaatggcgtggtaggcgccgtctacgttgacggagaagtagcggtgccacagctcatcggtgatgtcctgaaatagggcctgtcccgccacaccggcgttgttcaccagcagcgctaccgggccgaaggcatcctccacctgccggaccatggtattcacctgttcccggcaggccacatccgcctgcaccgccatcacccggcagccctccccggtgagctgttccaccagtgaccgggcgcagtcctccctctcccgatagttgatacatacggcccagccctgccgggccagttccgtggccacggcccggccgatgccacgggaggagcccgtgaccagtgcgattttctccatgaagtgttcctccttgtgcgcctacgatgttctttgacagcagtataacaaaaacttttcagattggcaagaaaagtgttgacaaacgggggactttccggtagaatacctttgttcgcacggttagctcagctggtagagcacatgcttgacgtgcatggggtcacaggttcgagtcctgtaccgtgcaccacacgtcaaagtcccggaatcactacggttccggggctttcgttattttgacgaacttggtgtttggaagaatctcccaaatcacctgaaaagttacaaaaattgtagatcgctcaccgcaaaaaaacaggcggccctgatatattgggccgcctgtttttgcatatccggatgcttaaaaatccgtcctgcacatgagataatccagcgtcacaccgtatacatcggtaaagcggcccgcccaagttatgtgactgcaatcgaagctgcgcaaagcctttgtctctatgtcgtgttcgctggatgtgtgatggttagaataattatataaaatgtaattgtatactgtccaacaaatggggtgcagttcagatcacccggtgccctttttatccccgaagggctggaaaaacccatcgtgagaaaattttcgcaccctgcctgccgaagtacctccgctccgtgaggattttgtatcacacccgaaaaactgccaaattgtaccatttgcccacatgacttgaaagacactccgctgctctgcgcagtttccacgaaaaagtcgacagaatcattctgcaatacaggactacaagcagcataaacggacgaactttgttaaataatagttaatatatacgacgagataagttttttgattgttaaactttagtcaactttacggttgcaatttttttattacggagatagaataatatcaacatacgatgtgtgttgttccgccacgggcggcattcaagatgtaaggagaaaaagtatgttcaagagattcaccaacgcttgcgtgcgtgttgtgaaccgctggctgccggatgcattcctgtttgccgtcatcctgaccttcgtggtctatgtggcagccatgttcgccaccggcatgggtcccatcaaggtgctggctgcatggggcaattccgacggcttctggggtctgctggccttttccatgcagatggctctggtgctggtgctgggttccgccatggcttccgccaagccctgtaagaaggtgctgcggaaggccgctggtctgtgccacaataatatgcaggctatcgtcatcaccaccatggtctccaccgtgtgctgctggctcaactggggcttcggcctggtggccggtgcgctgctggccaaggaggtggccaagcgggtccccaccgtggactatcccctgctgatcgcctccgcctattccggcttcgtcatctggcacgccggtctctccggttccattcccctgacgctggtcaccggcgccaagttcggtgaggtcacctatcaggccgccatcaccgagaccatcttccaccccatgaacatcatcatgtgcgccgtggtgctgctggccatgcccttcatcaactacgccatgcaccctgaccgggagcgtgccgtcaccatcgatcccaccctgctggtggaggacgaggataagacctacgagatcaacacccccgctgagaagctggagcattccaagatcctgtggggcatcctgtgcctggcctttctggtgtatatcatctactacttcgtcaccaacggctttacgctgggcctgaacatcgtgaacatgatcttcatgttcctcggtattctgctccacggcgacctgcgccgctatgtggacgctgtggcggaagccgccggcagcgcctccggtgtgctgctgcagttccccttctatgccggtatcatgggtatgatggtggtgcagaatgaggccggtgtgtctctggcaggcgtcatctcccagttcttcgtgaacatctccaacaacgtcaccttccccatgctgtccttcctggcagccggtatcgtgaacttcttcgttccctccggcggcggccagtgggccgtgcagggccccatcatgatgcctgccggtgcagagctgggcatcggcgccggccgtaccgctatggccatcgcttggggcgaccagtggaccaacatgatccagcccttctgggcgctgcccgctctgggtatcgccaagctgtctgcccgtgacatcatgggctatctggtggtggtcctgctgttcgtgggtctggtagcctgcttgggcttcctggcctggggccttctgttctgatatcttcctatcttttccatactcctcaaagcaaaagaggctgggtgtccacccagcctcttttgctgtttcgattttacttcacccagcccatcagctgcacgaagttccagatgagcttgcagccatagaaaatgatcacaccgccgcacaccttattgatgatgttcagcatcttctcgttgaacttgctgcccagcagcgatacgatggtggagagacttagaaaccagatcaccgacgcactgccgaagccgaagataaagggcagatcgcccccggtgggcaggctggcccggaaggcccccagcatcatggtgccgtcgatgatggcctgcggattgaaccacgtcaccacgaaggcggtggtgaacagcttccacaccggcacgtttacatccttgccgccctccagcgatgccttggaccgcagcagcccgataccgatccagatgacgatgagactgcccagccccagaatgaccttctgcaaccacggcaaagcctgcatcagagcgcctgcccctaaaaagcaggagacgcccagcgagacgtcccacagaatcacgatcagcgccgtcagatagacccggctgcgcttctgagtcagggcgctgttgatgacaaacagattctgcaagccaatgggggccacatacgccaatcccatggtcagtccctgcaaatagatgttcatagtggtgattttctcctttttggttatttactccggttttgctacctgctataatgataacacattctccccaaagcgcaagagcgcagataaagctgagcaggtaaggaggaactgaccgtgtcccattatgactgcccctgtatggagaaatgtcccctgcactacgccatgtccctcatcggcggcaagtggaaggtgcagatcctgtgctccgtcaccaacgccgggaccatccgctacaatgccctgcggggcaagctggatggtatcagcaacaccgtgctggcctcggctctgcgggagctggagcgggacggattgatcctgcgccgggagtatctggaggtgccggtgcgggtggagtacgcccccaccgaggactgccgccgcctgctgcccattctggaacagctgtctgactgggcggaggctcggatgcccgccgatgaatccacaacgaaaaaggaggaaccgcaatgaccatccaagaagcactggaaaagctgcaaggctatgagaaagccacctttgccctgaaccacgcaacgggccttatgtactacgatggcgccaccattgcccccaaggggacgacggagctgcggggcagcaccctgggtgagctctcccgcatgggctatgagctcaccaccgctccggagacgatggagatgctccgcacccttatggaaaaccgtgaggagctggaacccatcacccgccggaaggcggaggagctgtggcgtgactacgaccgcacccaccgtgttccggtggcggaatacgtagcctatcaggagctgtccgccaagtccgacgccgtgtggcacgaggccaaggagaagaatgacttcgccctcttcgagccctatctccagcagatgttcgacgccagccgccgcatggccggctactgggagccggagaaggacccctacgagaccatgctctccacctttgagcgtggcctgacggtggcccagtgcgacgccttcttctcctccctgcgggagaagctggtgccgctgatccaacaggtcaccgcccacgccgaccgggtggacgacgcccccctgcaccgggactaccccgtggcgatccagcgccagttctccgacttcatcatggatgtcatggacatcgaccgagaccactgcatcatcggcgagacggagcaccccttcaccatcaacttctcccgtgacgacgtccgcatcaccacccactatttccccgatcaggtggcctcctccctgtattccgtggtccacgagggcggccacgccctctatgagctccacaccggccgggagttggctcgcacctgccttggaaacggcgtctccatgggcatccatgagagccagtcccggttctacgagaacatcatcggccgcagccgggccttctgctccgtcctgctgccgtggctgaaggagcacttcccggagcagctggtggacgtgacggaggagcagttctaccgcatggtgaaccgctcccagccctccctgatccgcaccgaggccgacgagctcacctattgcctgcacatcatggttcgctatgagctggaaaagcagatgttcgccggcaccatcaccgcccacgacctgcccgccgcatggaatcgcctgtataaggagtacttgggcgtggatgtcccctccgaccgggagggcgtcctgcaggattcccattgggccaacggcaacatcggctattttccctcctacgccatcggctccgcctacggcgcacagtatctgctggagatgcagaaggatctggatgtggaggccgccgtccgctccggcaagctcaccgccatcaaccgctggctggaggagaagatctggaagtacggctgcatgaaggaccctgtggccctctttgagtccgtctgcggccccttccgcccggaggagtacgtggcctatctggaaaagaagtttacggagatatacgaactgtaatctattacgataataatacaaaacattatcgccccggagcgctccacaaagccctccggggcgatttctgtccgcttacagcaatatccgagacagaataaatcgccctcccccttgaggagagcgatttatttcatttcctgtaccagctgctccaacaattccaactggcggctgctgagccgccgcagggatttgctcagcgacaacagacgtaccgggtctgcgagttctgctgcaaaaaattcctccggcgtcacgcccagatactcacagatgtagaagaacgtggacatggacggcagattcacgccgttttcgatgttgttgatgtacccggcgctctgccccagcgaaagactcatatcacgagccgatacgcccttggcctgccgcagctgtgacatccgtcgggcaaactgcttcttctccatgacccacctccacgctttttgataattgtactatatagtctgctgaatcttatccggttatttaggatattttcttgacataactattttaaatagatataatgagaaaaaatactgtggaaagtagatggtgatgaagagtggaagtgctgattggaatcgttggtgtggcagtgctgtttttcctactttcggctctgtgggattttgcaaaaaagacggaaaaggaacaacagtggcaggccgtgcaaatgcaggatcgcaagcgaaaacagcaggcggaagaggaagcggagcgataccgaacgtctctggtaaagcggtataaaaatagcccgttgacaagggaaatcctaaagaccatttgcgacgggacggagcgcaatccggaggagatcgtcatcgacaaaagtggtgcctccggacgtacagacgggatggtgcgcagctatgattttttagcgcatcgtgtccctgaactcaccgatagcaaagcgttttcctatgaatatcatccgattcagaatcttggcgttaccgattgtgtgtttgttcgtcaacaagccgcactggcggaagccatcagggaaattctgggagaggattattctattgaacataaggatgacggtcgaatcgtcgtcatgcggctgaagccaaccaaacgcttttaattttaacaaggaggaacacatcatggctcgctgttattatctggactacatcagcaagggctgcctcagtagctacgacaatgacgagtatgtctgcaagctctgcggcaagcactttgccaccaatgacccgcaggtgaagtacacctgcaaccccgattacggcgaagagtatcagagatgtccggtttatcgggaccgccgctgacattaaaaaaccgctggccgtaacggccagcggttttcctatattcccctcttacagctttgtgaccatggggatgatcatggggctgcgcttggtgtgcttatagaggtagctgctcaccgccgagcgcacggcacggcacacctcgttgtcgtccttgcgccgccgggcagccattccgtccactgtggacatggccagctcccgcagctcctgcaaaagctcctcggattccttcacatacacgaagccgcgggtgacgatctccggctcacacagcagccggtggtcgtgggaggacatactcagtaccaccaccaccatgccgtcctcggccagcagcttccggtcattgagcaccacagcacccacctcacccacgccggagccgtccacaaagacctctccggcgggtacggaggcctcgcacttcatgtgcttggtggtcagctcgatgacggagccgttttcggccacgcagatgttccgggggtccatgcccatggcctccgccacccgcttgtggatctgcagcatccgctgctcaccgtgcaggggaatgaagaacttgggcttggtcagggcgtggatgatcttcagctcctcctggcaggcgtggcccgacacgtgcagcatatccgccttgtcgtacaccacgtcggcgcccttgcggaacagctcattgatgacccggcccaccgtcacctcgttgccggggatggcggaggcggagataatgaccttgtcctgcggcccgatatcgatctgcttgtgggtggaaaacgccatccggtacagggcgctcatctcctcaccctgagagccggtggtgatgatgacctgctgctggggcggcaggcccttgatgcggttgatgtccatcagcacgcccttggggatcttcatataccccagctccgtggagaccttcatgatgttctccatgctgcggccggtaacggccaccttccgcccgcaggcggcggcagcgtcaatgatctgctggatgcggtggacgttgctggcgaaggtggtgacgatgatgcgctgcttgcagccggtgaactgccgctggaaggtcttgcccaccatccgctcgctcatggtgtagccggggcgctccacgttggtggagtccgccagcagcgccagcaccccctccttgcccagagcgccgaaccgggccagatcgatgacctccccgtcaatgggggtggagtcgatcttgaagtcgccggtgtggaccaccacgcccatgcgggtgtggatggcgaaggccacggagtcggcaatggagtggttcacgtggataaattctacttgaaattttccggccttcaccgtctggcccgcctccaccgtcaccagcttggtgctgtccagcagccggtgctcctgcagcttcagcttgatgagtccagcggtaaagcgggtgcagtagatgggcatattcacctgcttgaggacgtaggggatggccccgatgtggtcctcatggccatgggtgatgaacaggccccgcagccgggatctgttcttgatgagataggtgacgtcggggatgacgcagtcgatgccgtacatatcatcgccggggaatgccatgccgcagtccaccacaatgatctccccgccgtactcataggcggtcatgttcttgccgatctcgttgagaccgcccagaggaatgatcttcaatttttctgccatatgtgttgtatattctcctttacaagataagtagcgcacagacagactgcccgtcggcggacgcagctgctccgcaaacggacacggcaaaatagaggcggctcccgacgtttctctgcggcgctgtatcgccggagaagtccggcggcccgcccgactgtcctgtgcaaaagtggtgaggggaatcccctcgtttatttgatcacgaaggcccgccgcctccgcaaaaaatacaaaaaaggccatcgcttttcaacgatttacacaaagtatatcatatttctccgcatttgtacagcctttctttcccccttttttcgccgcccctcgcaaaacccgcatttccccgatccctccgccgaaaaaataccccggaaaagactttttcaaaccgataagaaagacgttgtagcagaggaaaaactatgctataataatgtaattcaaaatggcggaacagcgcagtccgccaaaacagggagggatgcgccttgaataaacggatcgcccgactcctccggacgaatatcacgatcttctcgctgtgcctggtgctgtttgccctggcagcgatcccctttgacgtgcgcctcgccattggcgagggcgtggccgccgtggcctttttcctgctgggccgccgccgcagcaaggctacccagcagagtctgcgccagtatatccagcggttttacggcggcatggactccgcccgctccagcaatatgctcttcacccccctgcccatgatggtctttgatctggccacggaggatatcctctggagcagcgagagcttcctccagctgacggagcagcgggagggcatcttcgatgcccatctggagacggtgttccccaatatctccttccactggctgctggagggcaagaccgaggccccggagaccgtggtgtggaaccaccgcacctatcgagtgttcggcggcgtcagccacccggagggcggccagagcgcactggccaccacctactggatggacgtcaccgacaccgaggagatgcgccggacgctggagctgacccggccggtggtagccatcctcatggtggataactacgaggacctgatgaaggccaccccggagggcaagcgctctgcggtgcgggccatgctggaggagaagctgagccagtggtccgccggcagcgaggggatgatgttgaaatacgaccgggaccgctacctctttgtgttcgaggagaagagcttctccgactttgccgccaagcgcttcgacgtgctggatgccgtccgtgaggtggtggccggggagggcgtggcagccaccctgtccattggcgtgggccgggatgccgacagcttcgaggccctgttcaaaaacgcctccgtggcgctggaaatggccctgagccgtggcggcgatcaggcagtggtgaaggacaagctgaatttcgagttctacggcggccgctccaaggctacggagaagcgcaccaaggtgaagtcacgggtcatggccaatgcgctggcggagctcatcgacgaggccaagcaggtctacgtcatgggccacagctatgcggatatggacgcactgggcgccgccgcaggcgtgtgcgccatcgtccgcaaacgtggcaagaagtgccgcatcgtcatcgatacggagaataacgccgcccatccgatgctgcgccgcctgcaggccctgccggagtatcagggggccttcctcagcggcgatgatgccttcctgcgggtccagccggagacgctgctggtggtggtggataccaaccgccccggcagcgtggagtccgaacctctgctggacgcctgcaaccgggtggcggtcatcgaccaccaccgccggggcagcagctacatcgacaagatggccctgaactaccacgaaccctacgcctcctcagcgtcggagctggtgacggagctgctccagtatctcattgagccgggcgacctgctgaaagcggagtccgaggcgctgctggccggcatcgtgctggacaccaagaatttcaccaatcgcaccggcggccgcaccttcgaggcggcagcgtacctgcgccgggccggggcggatacggcggacgtacagcggatgttccagagcgacctccagtccatgatctcccgctacgatatcatccgccgggcggagctctaccacggcgacatcgccattgcggcgctggatcaggagtgcgaccgggtcattgccgccaaggccgccgacgagatgctgaccctgcagggggtccgtgcatccttcgtgctgtaccgtaaggatgacggtatttacatctccgcccgctctctgggcgagatcaacgtacaggtgctggtagagacgctggggggcggaggcaactccaccaccgccggcggccagtgctccggcatgacggtggcggaggcgaagaccacgctgctgcgtgccattgataagtattttgaagaataaggaggaataattccatgaaagtgattttgcagcaggatgtccggggtaagggcaagaagggccagatgatcgaggtggccgagggctacgcccgcaacttcctgcttcctaaaaatctggcggtgctggctaccgccgacgccatgaacaccatgaagatgcaggccaaggccaaggccaaggccgatgcagaggccaaggccgccgcacaggagcttgccgggaagctgaagggctgccaggtgaagatcgccgccaagggcggcgccggcggcaagctcttcggtgccgtcaccgccaaggagatctccgagcagctgaaggcccagcacgatatggagctggacagcaagaagctggtgctggcggagcccatcaagaccttcggcagcttcgaggtcaaggccaagctgggctttgagatcactggcaccgtctatgtgctggtctgcgaggagaagtaacttccctttggtcttgccggcgcttttggggcttgacagtcccttctgtttgtctccgacgggtactttctttcgctactgaaagaaagttacccgccggaggcaaacaaaaagcccccgccggaggcaaaaagaaaagcacaccccacccccttcagaaaaatccccgaaaggagttccctcatggatgaattgcttctgcggcaaatgccgcactccacagaggcagagcaggccgtgctgggctccatgctcattgacgccgcctgcgtcaaggacgtgatggaccagcttcagccggacgatttttacctccgtcagaaccgggaaattttcgagactatctacaccatgttcgtctactcccgccccatcgacggccttaccgtggccggggagctggagaaggcgggcctcgccaacgatggcacacgggcgtatctggcccagctgatggaggtgacgcccacctctgccaacgtgctggagtatgtgcgtttggtgcgtgagaaagcgctgctgcggtcggtggccgcagcggcggcggagatcaccgccatggtgcaggaggggaccggcgcccccggcgacgtgctggaggcggcggagcagaagatctacgccatccgccggggccgcagcgcccagagcatggccaccattcaggtggtgctgcaggaggtcatggagcatctggcggagctcagcgctcaggggggcaagaccctgccgggtctgtccaccggcttttcggcggtggacggtaagatcaacggcttgaacaagtcggacctgctgttgctggccgcccgtcccggcatgggcaagaccagtatggctctgaacgtagccctgaacgccgccaaggagtccggccagacggtggccgtcttttctctggagatgtcccgtgaccagctggtgacccgcctgctagccagcgaaggcctcatcgaaaatacccgcctcatcagcggcgacctgcgggagagcgactgggtgaagatcgctgagggcgcctcctccctgagccgtctggatatccgcatcgacgataatcccctgctgacggtggcggacatgaacgccaagtgccgccgcatcgagaatctgggtctggtggtcattgactacctccagctgatgacctccgccggcggaaaggggtatagcggcgagaaccgccaacaggcggtgtcggatatcagccgtatgctgaagatcatggccaaggagctgcaggtgccggtgctgtgcctgtcccagctgtcccgtgccaacgaaaagcgtgaggacaagcgccccatgctgtcggacctgcgtgagtccggcgccattgagcaggatgccgatatcgtcatgttcctgtatcgtgacgattactataaagaggattcggagaagcgcaacatcgccgagtgcatcgtggccaagaaccgccacggcgagaccggcaaggtggagctgcgctggatgccggagtataccaccttcggcaccttggaaaaccgctacgacgaggagtaacgagtcatggatctgatgccgtggatgcagcagcaggggatgctgcccgccgccggggagacggtgctgtgcgccgtgtccgggggccgggactccgtgtgcctgctacactatctggcgtcgctgggtcgccgccggggctttgccgtagccgccgcccactataaccatctgatgcgccccacggcgggacgggacgaggctttcgtggccgggctctgccgggagctgggcgtgccgctctatgtggagcggggcgacgtccgggccattgcccggcaggagggctggggcgtggaggaggcaggccgccgcctgcgctacgactttctggagcgcacggccgacgccatcggagcctcccgcatcgccaccgcccaccacctgtcggatcaggcggagacggtggtgctgaacctgctgcgcggcaccggcccggaggggctggcgggcattcccccggtgcggggacggctgatccgccccctgctccagacccctcggcaggagatcgaggcctatctcacggcccacgggctgggtcatgtagaggacgagactaacgacagcatggatttcacccgcaaccgcttgcggcgagaggtgtggcccctgctggcacagctccaccccgctccggaacggagcatcgcgcgggccgccgctatcctgcggcgggagaatgtttttctggatcggctggcccgctcctatctggagacagccgtatccgattgtccgtcagccggtgagcccaatgccccggagatctctggccgccgggaccccgctgcacccagccctgcaccgcctcccggcacgttgccggaggagtcgtcaaagtcggataagccctcagaatgtacacgcacgggcgatatttcgcctgatttcacatcggcacccaccgccgtatcggtgtccgaagctgtgctgcgatcggcaccggaggagctgcggccccggatgctccggctgctgctggagcggctccccgtcgggaagaaggatgtatccgccgcccacatagaggccctgctgacccttcgggagggcgggatgctggatctgccggagggcgtcacggcatggcgggagaaggatgtgctgcatctggagatgacgccgcccctgcccctacccctgaccctgtcggagggggagcaggtctggggagactatctcgtccgggtgtggagaagcgaaaaaaataccccgccccctgacggagaagggctgtccaaaacgggccggttttcggaccatatcctgacgctttcggacggtgggaaaatgtccgaatggacactccgctgtccgcaaaggggagacggtctgaccctgccgggggccagaggccgccgcagcgtcaagcgcctgctgacggagcgggggatgccgccccggcgacggcgaaccaccccggtggtgtgtataaacggagaacccgccgccgtatacggcgtgggtacagatcagagatttttgccggggaaagacggcagcagtataaatattttgatgattgagaaagatcaggaggaagaaagtaatggctaagagcaatatggatcaggacatcctgaaggtcctgttcagtgagcaggagatccatgaccgcattcaggagatgggcaatcagctctacgatgagttccacgacaggaacccgctgtttgtgggcgttttgaatgggtgcttcctgtttatggcggatctggtgcgggccacccagtgcaagagcgaggtggagttcatcggcctgtcctcctatcagaacgccaccaagtcctccggcgtggtgcagatcacccgtgatctgcagcgggatatctccggccgggatatcattgtggtggaggatattctggactccggcaacaccctgtactttttgaaggactatatgctggccaagggagccaatagcatcaccatcgtcaccctgctggacaagccctcccgccgggaaaagcccatttaccccgatctggcgggctttgaggtgccggacgagttcgtggtgggcttcgggctggactactgccagcagtatcgcaatatgccctacatcggcgtgctgaagccggaggtatacagtaagtaagcgacagcgcaggagaagcggcgctgtgccggcagagggccggcggtcggaaggaggaatggtctgtggaggaacggaagcggggttatcagggccggcggctggccggtgcgacccccaggcaggagccggaacgccggggcagccgtacccggcaggcggaggataaggcccgccgggagcgggacccgtgggagatgaccccggaggagaaggtatctccggtagaggccacgtcggcagaggaggctcaggcagagccgagggagcagtctgtccggcaggtggaggataaggcccgccgggagcgggacccgtgggagatgacctcggaggagactgctccgataacgccggtagacggggagtccgtctcggccggccggagagccgcttcggtggccggaggtaaagcggcaccggcggcggactttgacagcatgatcggttctgccgacggggcgagcgccgaccatgcagccggtgcggcgggtcccgatgatgcagccggactcgatggggaaagcagctccggcggggcggcggtcaagaagaaaaagagcggctttgccgccttttggtcggatttcggctatctcatcgtcacggcagtggtggtggtgctggtgttccgggtacttttacagctgagttgggtaccctccggctccatggagaccaccatccccaaaaagacgctgctgatctcgtggcagctgccctatgtgatgggtgacccggtgccggagcgggggaacatcgtcactttctggagtgacgagctggataagctgctggtgaagcgggtcatcggcctgccgggagacacggtgtccttctccggaggctatgtctacatcaacggccagcggctggaggaggactacctggaccagcagggcggtaccatcagccccaaccagacctcctttaccgtgccggaggggtgcctgtttttcttaggtgataatcgctccggctcgaatgatgcccggtactgggaggagagctatatcccggtgggcaatgtgaaggcccatgtgctgctggccatttccctgaccgggggcagcagctggcagggcgtgcgggccatcggctgagaggaggaaagcatttggcagaacgaagaaagatcggtttcggcaccattttgatggtgattttggcggtatgcgtggtggcctatgtggtgtccgccatgcggaccgccggggacatcccctactctgagctgcggcaatactttttagaggagaaggtgcaggagttctccatcagcgacacccggatcacggccaagctgaaggggggcagcaccgttacctccgacctgtacgacttcgacctgttctatcaggatctcaacgagctggtgcaaaagcagtatgacagtggtattatcaccgcctataactatcacgcagaccactccaccaactggctgcagctgctgctgccgtatgtgctggcgtttttgggcttcattttgctgatgaatctcatgaaccgcatggccggcggcggagccggggcgcaggacaagctgtcccggttcggagaggccaaggtcagtacgccgggagagaaaaaggtcacgtttcaggatgtggccggggccgacgaggagaaggaggagctgcgggagatcgtggagtttctccgggagcctcagaagtatctggacctaggggcgcatatccccaagggcgtgctgctggtaggccctccgggtaccggcaagacgctgctggccaaggcggtggccggagaggcgggggtgcagttcctgtccatctccggctcggactttgtggagatgtatgtgggcgtaggcgcctcccgtgtgcgggatctgttccagcaggccaaaaagagcgccccggccatcattttcatcgacgagatcgacgccgtgggccgccagcgtggcagcggtctgggcggcggacacgacgagcgggagcagaccctgaaccagctgctggtggagatggacggcttcggctccaacgagggcgtggtggtgctggctgccaccaaccgtgtggatattctggacccggcgctgctgcgtccgggacggttcgaccggcaggtctatgtggggctgccggacatcaagggccgggaggagattttgcaggtacacgccaagaacaagccgctggcggaggacgtggatctgagacagatcgcccgtggtaccgcaggctttaccggcgccgatctggagaacctcctcaacgaggcggccctgctggcgggacggcgcagcgagtccttcatcaccatgaaggatctgcaggagtccatcatcaaggtcatcgccgggccggagaagcacagccgggtcatcccggagaaggagcggcggctgacggcctatcacgaagcgggacacgccgtggtgatgcacgcactgccggatctggatccggtgcatcagatcaccatcgttcccagaggcgaggcgggcggcatgaccatctatctgccggacgaggatcggtcgtacctctcccgcagctatatgctggaccgcatcgccgggctgctgggcggccgggcggcggagcagctggtgctgggggatatctccaccggggcctccaacgacatcagtcgtgccacgcagctggcccggaagatggtgggcacctacggaatgtcggagcagctgggcaacgtggccttcgacgccggacacgacgaggtgttcatcggcaagtccatggcccagacccggccctactccgagaaaacggcggcggagatggacggcgagatccgccgcatcatggacgacgcctacgcccgctgcaccgccattctggagcagtaccggccccagctggtggaggtggcggagtatctgctggccaacgagaccatgacggcagaggagttcgagaaggtattccggacggagtgaggcattgacagcgccttgcttatggggtaaaataacggggtatccgcctccgtagctcagctgtatagagcgaccgcctcctaagcggtaggccgccagttagaatctggccgggggtgccatataaaacaccgcaggacggggaatttccccaccctgcggtgtttttttgctgcctgaggcgcttttttgaagaaaatgacgaaaatttgtgaaaaaaggccttgtgctttttcggctgcggtgctatgatacgcacatccatgtgtacgccgaaccgcccatgggcggttatcgtttcatctgaaacgataagggggggtccaaagggcgtgtcattctgagaaggggcgcagccccgacgtgaggatccgtactccccatgcgagagtctcgtcgccgcacacgcaaaaaaataggaggaagatacgatgacaaaccgcaagagtaccaaacgggccttgctgggcagcgtcatggccatggttctgtgcctggctatgctggtaggcgctacctttgcatggttcaccgacacggcaagcaccggcgtcaacaaaattcaggccggtaacctggatgtggtgctggagatgcagaacgctgacggcaagtgggtcagcgccgagggcaagacgctggacttcgtcaaggccgctgatgccaagggcgaagccatcctgtgggagccgggctgtacctatgaactgcccgccctgcggatccgcaacaacggcaatctggcactgaagtacaaggtggccatcaccggcatcaacggcagcgctaagctgaacgaggccatcgagtggaccatcggcgatgtggcgatgggcgctgagcagcatctggcggccggtgagagcagtgccttcaccatcaagggccatatgtgggagtctgccggcaatgagtacatgaacgagtccatcgacggcatcgccatcaccgtggtggccacgcaggacaccgtggagagcgacagcttcgacaaggactatgatgcggatgcggagtatcccgtggtggctgtgggcgatgtgaataccgacggcgacaccgtgctgaaggacaaggaagaggatcacaccattcaggtaacggtgcctgcgggcgctctggatgagggcgtgcagtccctgaaactggaggtggtgaagagcgccacgcccgctggggtgaaggttgcaagcaccgagagcagccagagctatgaggtcacgatgaaggaccagagcggcaacgctgtcagcacgaatggtacgctgatgacggtggagatgaacgtcggtaagaaccgtaccgctctgaagctctatcatgatggcgagaaaatgacaaaagacaatgggaccctaacggatgcggcggatcactatgtgtacgacgccgccaccggctatgtcaccatgaaggtcagccacttctctcccttcaccgctgtgtttgccagagattactggactgaccatgcggcggacggctatgccacgccggtggatactgctgacaaggtggtgacggtggcctccgctgaggagctggccctgtttgccaaggaagtcacggacgacggtaagaattacagcggttataccctgaatctcgccaatgatgtagatctgggtgagtacctgtggaagcccattaacggctataaccggctttccggtattgtcgtgaacggcaacggccataccatccggaacatgaaggtacgtggctgcacgaatagccgtgtttacggcgcaggcttcatcggtgatatcaacggtgcagtcactgttaaggatatcgcctttgatggagcggatgtgttctttgtgaattatgcaaaaccgcagtttgcgggcaacgtgggcggtgttgtgctgggttatacctatggcacgactctgttcgagaatgtcagcgtcaccaacagctccatttggggcttcggcaagatcggcatcctgctgggcatgggcgccgatcccggcgtgaaggtcaccttcaaggactgcgtttccaagaacaacaccatccacgccgcctatgacatgggcggtctggccggcatgatccagcgtggcaacggcgtggacaacgccagcgtggagaactgcacggtggagaacatcacggtggattattatgaagagtgcgtggatgttcagggcaaggccactttgaaggaaaatgataagaatggtgctgatgtgatcaaggaagtcagcggcaaatactgggtcaatggtggttactattggggcggttatgcggattattatgtctcctatggcgattccagctatgatgcgccggtggaggggtgcagcatgcgccttgccaacagcgagtactgcgtgaacaagtaagccgggaagtatccgggcaaaagtgaagaaggctccctgcgctggggggaaggctccggcgcagggagcttttgcgtggggcggggtaaaatacacgctggagggggaggcaaagtctcccttgcaatgggggaaggcttgtggtatactgataaacgtcgaaacatcctgaacggggacgaaccccgccgaaaagagaatagaagatcgagcggcctgccccatgctgcggggcaggcggaatagggtgcaaagccctgcgagtgggtcactgtgaagccggccgagccggataagtcagatacgccggccgctggatcggatgcctgccgacactgggacatccgccgggccgcttggaaacaaagcgggtccgcatcggtatgccggtgcggacccgcttttttgcatccgttccttccgattttctcctccggcggcggaaatgtctccgtgcgggagacaacgagagtatcagagaaaggaagaaagcaacatgaaaaagagactgctctccatggtgctgacggtgatcatgctggtgagcctgatccccacgtcggtctttgcggccaagaagtccgttgacgactatttcgacgggctccccatcgccgctgatcccggcaccggcaccaccgcatggaaggtcagtaccaaggacggcgaggaggtcctcatgtccggcaatgccggaaagaactactcctccagcaccctgaccctgacttttacagaagatacccacctgtccttcgagtataaggtctcctccgaggccaagtacgacaagtgtaccatcacactgggcagcaacaccctcgtcaacggcgagagcggcgaccaggagtggaagggtctggagctggacgccaagcggggcgacaagctgactgtgctgtacaagaaggacagcagcggcgacaagttcgacgactgcgtctatctgcggaacttctccgccggtgaggcgctggtggtgaccttccacgccaacaacggcacggaggacactgccacgcagaagatcttcggcggcaagggtaccctgaaggccaataccttcacctgcgagggcaagatcttcgccggttgggccacctccgccggcggggctgtggcctatgaggacggtgccgccatcaccacggagacggatctggatctgtacgccgtgtggtcggacgcttacaccgtcacgctccgcaacggcgacaccgacaccaccgttctggtcccccagaacagcgccatcggcagccgtattcccgcagaccccaccaagaagggctataccttcgagggctggttcaacggcgaggagaagctgacggcggagacggtgatctccggcgacgtcatctacaccgctcagtggagccccattacctacaccatcgccttcagcggcggtgagggcggccagggagccatggactccatccccgctacctatgatcaggaggtcacgctgcccaagaacacctttacccgccccggctactacttcaacggctggagcacatcctccggcgcctccagcggcagctatgccgacgagaagccggtgaagaacctgaccaccaagcagggagagacggtcaccctctacgccgcctggtacggcctgccggtgaatgtgaccctgcacccgaactatgacggtgcagagaacggcacccgcacctgcgtcgtgggcagcaactacaactacatccttaaggagggcggcggcaccaagtttgacgccattcaggaccccgtccgcaccggctatatctttgacggctggttcgatgcggcggagggcggcaatgcggttggcccgtcctacaagttcaccgccgtggacgccgaaaacggcttccatctgtacgcccactggaccaagggcatcaccgtccacttcgacggcaacggctataagaacacgctgaaggacaagaccgtgacgccggacaaggtattctccagcctgccctctctgagcagctactactgccccgccaacaaggcgctggacggctggtacatcaagaatgccgacggctccttcggtgaggccgtcaccaaggacaccgtgttcagcggcgacgaggtgactctcattgccaagtggcgtgactatcagtacatcatcaagtataacgtcaagtacagcgacaagaacaccaccaccggcaccatggccgaccagccggcacccttcggtcagaatgtgcagctgacgccctgcggctacagtcgggagggctataccttcgccggttgggcggagagcagctacggcagcaccgtcaagtatgccgacggcgccaccatcaaccgccccttcgaggagggtgactcttgggacgacggcagcgaggacggcgagacatacaacctctatgccgtctggacggagagcaagtctccggagcagctggaggccgaggccaagctggaggccgccgagaaggccattggcggcacctacaacgtcacctacggcaaggacaccaatgcactgaccatgctccgggccaagctggaggctgccgggatcacggacgtcaccgtcagcatgaaggaggcgtcttacagcagctataaccacgtgggcatcacggccgacggcaccattcagtataagtggaacgaaaacggcagcaccacggcggcttccggcaccgtgcggcctacgctggtgctgacctgcaatacctacaccaaggagtccaccgagtgcctgttcagcattcctctggacgagggaaaggccatggaggctctgcgtaccgtggcggcccgcatcagcgtgcctgagacggtggagagtgcctccgacctcaccagcctgcccaagtatcccctgaaggccggcgtggacgagagcaaggcggactacagcagcggtacggatcaggaactgtggaccaccgccacgtggacctccagcaacaccggcgtgatctccttcaaggaggtctcttacccctactttgccccttatacggtcacggtggcccagcccaagaaggacaccagcgtgaccctgaccctgaagctggtctataacggccgggaggatctgaccctgaacaaggtctataccgtggtggtcaagggtgacaatacgcctcccgccatggactatcaggcgctgctggagacggcggtgcgtgagatcggcctgaaggatccccgtgacaattccaagatcgacaccgcaaacgtggtctccgacatccagctgcccaccaccaagcagctcagtgtcatttccgccagagactatcagcaggagttcgacggcaagtacacccccatcatgctgtataccagcgacgccgatgtggtggtgtccgccggtcccaacacagccaatgtggcccggatgctgacctatcgccccctgcccggtcaggaggccaagaccgtcaccatcaccatgaagatcctctcccgccccagcggcgagggtacggattacgcctccatgccggtgctggccagcaaggatatcaccctcaccgttcagcctctgacccaggaggagctggacactgccgccgccttcatgaggctggtatgcaccgaggatgtgtactgggagggcatccgcaaggccaacgccgaccgtgaccacgtcaccggcgatatgcgctccttcatcgagatcgtccccgccaccaccggctataagttcatccgcaacatggacagctacaatgccgtgggcgtcaaggcggacgatattcccggctggtacgatgctcagcagtaccgctgcttccgctccagcaacaatgctgtggtggcccacgagacgctgcgggtgacccagcccaagtacaacacccgcatcaccgtggacagtcttctgacctacacccagtacgccaaatactacgagaagttccagggcaatgccgactatgagcagtttgcccagttctacaagcagcccatttccaccaccgtcaccgtcatcggcaccgagggcatcgaggatcccaatttgcagcccctgaccgttaccgtgaatgtggagggcagcaccttcaaggaggacttcaccgatctggagggcgccacctacacctgctccaccggagatcaccgcacggcagcggatgccgtgatggcggctctgacggagaaccagtatacctacaccggcagcagcacctatctctccggtatcaccgatcccaacagcgtgagccttaccggcggcgacagcgccttcggcagttggtccggctggatgttcaccgtcaatggggagatgcccattgagcgctacgacaacggccagcccatctatgccacactggggacttaccagctgaaggacggcgatgtagtgcggatgtactacgtggcctgccccacggagagcggtcagcacacgtggaatgacggtcaggtcaccacggcggctacctgcaccgagaatggcgtcatgacctacacctgcaccatgtgcagcgacaccaagaccgaggtcatccccgccaccggtcatgcttacggtgagccggtgtggaactggacggatgatttcaaggccactgccaccttcacctgcgccaacgacgccacccatgtggaaaacgtcacggcagaggtgagcagcgctgtcaccacgcctgccgcttgcgagaccaccggcgtccgcacctataccgctaaggtcactttcgaggataaggagtatacctccagcaagaccgaggtcattcccgccgccggtcacaccctgaccgccgtggcagaggtgcctgccacctgcgagaccgccggcacctccgctcactggaagtgcgacgtctgcggcaagctgttcagcgacgtcgagggcaagaccgagacaacgctggagaagctgaccatccctgccaccggccatgcctatggcgccccggtgtggaagtggaacgatgatttcaccgcctctgccacttttacttgcggcaatgatacttcccatgtggagaaggtcgatgccactgtgaccagcgaggttacggagggcagctgcgaggttggcggcacccgcacctacaccgccaaggtcacctttgagggcaaggactacaccgacaccaagacggagcctgtccccgccaagggccacaccctgaccgccgtggaggcagttcctgccacctgcgagaccgccggtgtgaaggcccactggaagtgtgaggtctgcggcaagctgttcagcgacgtcgagggcaaaaccgagacgacgctggagaagctggccatccccgctaccggccacgcctacggtgagcctgtgtggaagtggacggatggttttgaggccaccgccaccttcacctgcaccaacgacgccacccatgtggaaaacgtcacggcagaggtgaccagcgctgtcaccacgcccgccgcttgcgagac

SEQ ID NO: 12433 - DNA, 11923 bp, Unknown
  gut microbiota DNA sequence
caccgccaaggtcaccttcgaggggaaggagtacaccgataccaagaccgaggtcatccccgccaccgatcacgacacggagctggtgggtgccaaggatgccacctgcaccgaggacggctacaccggcgacgaggtctgcaaggtctgccagactgtcgtgaagcagggcgaggtgattcccgctctgggccacgactacaaggatggcaagtgcagccgctgcggcgctgaggagcctaccactcccgtggagcccggcaagccccagcagccggagaagcccaccacacccgatacccccgccaccggcgatgagagtcagctgatgctgtgggtgagcggtatgctggtgtgcgcactgggtgccggtctgatgctgcggcgcaagaaggaaaactgatatcccgcttttcccgatatctctcgatatctttcctgtaagcaagagggacggtccgtaaggaccgtccctcttgtgcgtggctgtgtagataagaaaaggcccccggcatgaccgggggccaaaggcttgggataaagcgggaaaatctccgggccaatgcagaggaatatccaagattttccagaagtgaacaggggaaaacgttcctgtacatggggcggagagccgggtcagatgagcgatccgaccggagtttttcgttgacagaaaagccggaatgagggtataatgcaggcaagtgctgcgatcacttctggcagatggtctcgatttccaccagccccccggcgggcagtgcgctcacctgataggcgcagcgtgcggggtaggtagttccctcaaagaaggaggcgtagacctcgttaacggcggcgaaatcagcgatattcgtgaggagaacggtggttttgaccacgttatccagagtcagtccggctgcggtcagaaccgcctggatatttttcatagcctgcgtggcctgagcctgtacgccgccgtctaccaatttaccggtggcggggtccagaccgagctggccactggtgaatacaaattcgccgcagtcgatggcctgagaataggggccgatggcggcaggagcgccgttggtggaaatagcttttttcatgggaggatctcctttctggtgtacagcagtgatgactgccaaatgtcggggacgattatagcataggccatttgttttggcaagtccccttttggaaagcgcttccgggtagggtctgggagccgatgatggaggagggagcaaaatggcggtaacaggccatgcgctgaatcaattattacagcagatggaccgcacattttccaatgtgacggggcagagcgtgtcctttatcgatcaggagggacactatcaggggccgctgcggctggacgtgtttaccggcttctgccgcagggtcatcagcagcgaaaagggcgctcagcactgtctggcctgcaaccacagcttcgggctggacgccgagcagcggtgtacggtgtcccagtgtcacatgggcatcagcgtgatctccgtgccggtgccgctgccggaggccagagggctcagcctgacatacgggcagttcctcacacgggataccgaggaggcgttttacagcacactgcgccggcactgtcaggagctggaactggattacgacgaaatggtggcgctggcggggacgctgcgggtgctctctgcggaggagctggatgccaggatgcagatgctgcaggtctttgccgggtatgtggccacctccgaggcggagctggagacccggcgggaatacgcccgtcaggtggagaagaagctggcgctggagcggacgctgcacgccagtgaatttaagtttttgcagtcccagatcagtccgcactttctgtttaacaccctgaacctgctgatgcggacagcctatcgggagggagcgccccaaacggcggatctcatctgcgatctggcggatctgctgcggcgggcgtactactacaaggactccatctgcacgctggcggaggagatgcagtgcgcccggcagtatctgaccctgcagagccagcggttgggtcccggcttttccttcgaggtgggggacgtttctgcctgcgggcagctgatgatcccggtgctgaccatccagccgctggtggaaaacgccatcctgcacggggccggggagaatgaacacccgctgcacgtgaaggtgtcggccaccgcagaggacggaaagctggtgatctccgtcagcgataacggcgccggtatcccggaggaggtgctggagaagctccgggatcatcaggccggaggctccggcgtacagaacgtgacggaacggctgaagctgtttttcgggccggaggcggaggtggacatacagagcgcattgggcagcggtacccggatcgttctgacgtgtcccctgaaaaaacaggaggaagcataaatggccatcgacattcttgtggtagaggatgaatataccgagcggcaggagctgacgcagctgctggagacggtgacgccgccggagcatattcgcagcgccgccacgtgcagcgccgccattgcggccatcagccagctgtgtccggatctgatcctgctggatatcatgctgcggggcagctccggctttgaagtggcggaatttgtacgcagcaaccgactggactgcaagatcatcatcctcaccgcctatcacgaatttgactttgccagcaaggcactgtccatggatctgcaggattacctgctcaagccagtgcggccatcggtactgctgcagcgggtgcgggatgtgctgcatctgtcgtccccggccagagccgccacaggactgtcggtatggccctatctggcctgcggcatctcgtcgccgctgccgccgatccccaacctgctgcccaacatgacggtggtgggtatattgcgggaagaagtcgaccgggaggtcgtatcgcagaccaatctggccctccacggcaccggctggacggagcaggacggccggcgggtcatcggctattgccgcacggcgccgcagcagtcgccggaggaggcggcggagccgctggtggcggcatggcggcagcgactggagggtctcgccgccgtggggatcggcggtccgtcggagcagggactggcggagagttaccgcacggcctgccgggcagcggactgccgcattttccatccggagggaacgctggtgtgccgggatacggcctctgatgtgccggagccttaccccctgaaggcggagggacagctgctccatgcgctgcgaagcgaggagggcgggctggaggcggcctgccgccacatggggcgttgcatgacagcggcctgcaacggagacgccggagccctgcgggagcagctgacgctgctgtgggccggaatcgcaaggctgtgcgccgagtcggccctcccaccgccggagcggctgaccacggaggggattttcacggtggagcagctgtgccggaggatacagaccgtctgcgaggatgtgcgctgccagctggttctggtgcgggattcggagcatcctctggtgcaggcggcactgacggccatccagctgcggttccgggagccgctgaagctggagactgtggcaaaggagcagtacgtcaatgcggcgtatctggggcgtattttccgggcgcagacgggccagagcttccgggatgctctgacggaggagcggatgcggcgggccgagcgccttctgcgccagcaggtctccgtatcggacacggcggtggctgtggggtacagcgactccaactacttcagccgtgcgtataaaaagtactttggtcactcccccagtgaaagcggtccgcttcgtacccattgaaggaagcagggactccgcagcggtatgcggagcccctgcttttttgcagtacggtaggtgcagaaaagtaagatagtgcaaaaagtcctgattggtcggggaggtggtcggtgcgattgctgcaattattacaaaaaaggggtgcaaagaggcattctcattggacactgtatctgttatgatgtagaaaaattacacggaacgccaagagaaggcagaaaacgacaaggcaggaggccccgatgatgattgacaagcagaagcttttggatatattgacctctgagatagagtcctccaccggctgtaccgatccgggcagcgtgtgcctggcggtggccgtggcggctcataccctggggcgcaggccggaaaaaatcgatgtgctggtgagccccaacatctacaaaaacggtgtcagcgtgggcatccccggcacgaaccgcatcggactggagctggcggcggcgctgggtgcgctgctggatgaaccggaacggggtctggccattctggccgatgtcaccggtgatatcgtgcggcaggcggcggccatcgtatccgacgggcgggtacacgtcgcctacggccagacgccggagccgctgtatgtgcgggccatcgtctccggcggcggcgaggaggcgcaggcggtgatccggggggactactcctgcgtgacggagatcctgcgaaacggagcgcctgtgatgcaggcagaggggcggacccatggagcggcggtctatccgttggtgggatacagcgtacaggagctgtacgagaccatcctctccatggagccggaaagcttccggttcttgctggaggatgcccggcggaatcaggaggcggtcagaagagatctggaggatccggagctgccgctgggcaggctgctgaagcagcggatttccggtcagatgaccggcccgctggcagtttctgccgaggcgcaggcctacaccgccgccgccggggaggcccggatgagcggcctgaatgtgaccatcatggccattgccggaagcggcaaccacggcattacgaactttgtgggcgtcctctccgcagcggaggcgctgggagcctctgaggagcagaccgccacggcgctggccatcagttccatgctcaccatctacatcaaggcccatatcaagcggatgaccgccttttgcggctgcggcgttgcagcggccaccggcatgaccgccgccgccagctatctgctgggcggcagctacgacacggcggtccacgccatgcagacggtgctggggaccatcggcggaatgttctgcgacggagcgaagatctcctgcgcctataagctcagcacggccgcctcgctggcggtgcaggcggcgtatttggccagagagggctgcttcgttcccgcaggtgtgggcatcatcggaaataccatcgagcagaccttcgccaacgtggggcggctcaacgatccgggcatggtggccacggaccgggagcttgtggccatcattgcggagaatcaacgacatatggccggccgcagttaagcggccggataggaaaggagcaagatcatgatcgttctgaagggacgagtgctggacggcaacggcggcgcacccatcgaaaagggcgccgtggtgctggaggacaaccgaatccggctggtctgccagcagagtcaactgccggacgatccgacagccgaggtgtatgagctggaggacggcaccatcatgccgggtctcatcgacgcccacgtccacatgggttggggcagcgccacggcggtggactggatcagcatgacgccgcagctcagcatggcccgtgcgctgcgggatatggcgcagctgcgccagcagggctacacggcgttccgggatctgggcagcgacgtgctcctgatgcggccggctgtggccgaggggctgctggatgtcccccgtattttcggcgccgggcgcatcatctcgcagatcggcggccacggcgacgtgtatcagaagctctcgctggaggccagccagcgggcatacagccccgccttcatcgtcaacggtgtggatgaggtgcggcgggcctgccgcatcaacgcccgcaacggagcggatctcatcaagatcatgaccaccggcggcgtgttctctcagggagacaaggccactccccacagccatttcagtcaggaggaaattcgggcggctgtggaggaggcggagaacatgggcagctatgtctccacccacgcacaggccacacggggcatcaagatggccctgaaaaacggcgtaaagtgcatcgagcatggcttctatctggatgaggagtgcatcgagctgatggtgaagaacgactgctatctggtcccgacgctggccatcatgcacgcatcgaagctgtattttcaggggaaggagggcgtgctgccctacctgaaggaaaagacggagaaatcctacgaggcccactaccgctctctggagatggcacgaaaggcccacatcaccgtgggcgtcggctgcgactttctgggagacgctgccttcggatgcccgtacagcgaggccacgctggagctggagcggctgtgtgtggcggggtatacgcccatggaggtcatcaccatggccaccaaggtcaacgcacggctgctgcagatggaggatcagctgggaacgctggaaaccggcaagctggcggatgtgctgctggtagacggaaaaccggacgaggacattcgggtcctgcgccgcagtgaccatgtcaagctggtgatccaggacggacggatcgtgaaaaacgccatgccgcacacggccaaggcgtgaaatataaacaaaagaaaggaacatgagcgatggatactatcttttacaacggcatcatccacacactggacaaggcctatcctgaggtaagtgctttggccatcaaggacggtgtgatcctgcgtctgggcagcgacgaggagatcctggcgctgaaagaaccccagacccgcctcattgacctgcagggcagactgatgctgccgggctttgcggatacccatctgcatctgctgttctacggaacgttccgccgccgcatcgatctggtgaacaccaccacctatgaagaggtcgtccggatgtgcagagagggcgccgagaaggtgcggggtaccaaccgctgggtcatcggctgcaatttcaaccagatcaactggacggataccaacaagatccccgaccgcaacgatctggacgccatcgcctccgatgtgccgatctttttgcagcgggcctgcggccatatcgtgtgcatgaacacgatggcgctgcagctggccggcctgtgggacgagcgggcggccaccaccaaggagaccatggacttcggccccgacggcctgcccaacggctacgtccgtgaaaattccgccatgtgcgtccagagctgctgggagcgctatacggtggaggagatcaaggacattctggaatccacctgtctggaggctgcctccaagggtatcgtgcaggtccacacggatgacttcaacctcatcgccgacgatgacttcgaggatgttctgcaggcgtatcgtgagctcaacgaggaggggcggctgcccatccgtgtcaacgagcagatccgcttccgccgcacggaccagctgcagcggttcctggatctgggctatcgggccaacgacaccatgggccatttcaagttcggcccggtgaagttcctgtgcgacggctctctgggctcccattccgccgccatgcgtcagccgtatcacaacgacccggacaccaagggcctgctgctgttcaccgacgaggagctgtacgatctggcgaagcttgcctataccaacggctaccatctgacggcccactgcatcggtgatgcggcgctggagcagatgatcaacaccatccagcgggtttccacggagttcccccacgccgaccgccgcaacggcatcatccactgccagatcatggacgaggcactgcaggatcggttccggaagctgaatctggtggcctatgttcagcccatcttcatcaaggccgactccgccgtggtagacgactgcgtgggcgcagagctgggacgccagagctacaactggcggcgctatgaggatatgggcgttcatatgtgcggcggctccgactgcccggtggagcccttcgacgtcctgcccaacatctactgtgccgtgacccgcaagggaaagcccggcatggaggcgtggtatcccgaaaacggtgtcacgctggaggaggcggtggagatgttcaccaaggaagccgcctacgcctcctacgacgaggccaagtacggcaccatcaccgtcggcaaatacgccgatcttgtggtgctggaccgcaacatctatgacagaccgctggaggagctgtgtgaaactcaggtggatctgaccatggtagaaggagagatcgtgttccagcggtaaatgcgccggaacgcaagaaaacacaaaaggaggctctatcaaatgaagaagaaccacatcacaagggacagcatcattgttggtctggcactgttttccaccatgttcggtgcaggcaacctgatcttcccgccgcagatcggcctggccgatggtactctgtggggctggggcgcgctgggcatcgtgctcaccggcgtgatcctccccgtgctggccttttggggcgtgaacaacgttggtacggacgtcaagtgcctcatgggtcacgtacaccctaagttctacgacgttttctacctcattggctgtattctggtgggtatgggctccaccctgccccgcaacggcgccaccactcacgagatgggcgtcatgtccatcttccccaatgcgccctcatggttgacgatgatcatcttctttgcactggtgttcttcttcggctgtgacaagggcaaggtcgtggataagctgggcaagtatctgacgccgctcctgctgatcctgctggccatcgtgctggtgaagggcgtgatctcccccatcggcacgcctcaggataccggcgtatccaagcccctgacctccgccatgctcaccggctatctgaccggcgacctgacggtgggcctgatgtgcgccaacatttttatcggcggtattctggacaagggccacaccaatcctctggagcgtaagcgcagcggcctgatcgtgggcctgacctccattgtggcgctgggcatcatctacatcatcctgacctacatcggcgcctgcggcggtgactactacgacctgagcgtgcctcagaccaccctcctcagcggtctggtgggccgggtgctgggcagcttcggtaaggtctgcatgggcttggcggtcagtctggcctgcctcaccaccgccatcggtatcggctccaccggcgcctccgtcatcaacgaggtctccaagggccgcatttcctacaagctgtggatgggcatcgcctgcgtggtgggcgctgtgttcggttccttcggcatccagaacatcatcaactacgtgactcccatcttcctcatcatgtatcccatctgcatcgtgctgaccgtgctgggtctggtggacaagtggatccccaacgacggtgtgtataagctcggtgtagccgcggccggtatcgtcagcgtgggcgacgccattctggcggtggctcccaatctggacggcctgcgcaaggtcatgtacatgatccccctggcggagcagggcttctcctggctgatccccacggtgatcgccatggtcatcggcggcatcgtctaccgtggcaagcctcgctacaactacggcgagatggcagtggccacggaggaagctgccaagtaatctattcatcccctaccccctcatttgaaaaggttccctgcggccataccacagggaaccttttcctgtcggagagggacatccaacggagtatttaccctatgaaaaaaatctcgacctccaccctgcagcgccccatggtcatctgcctgctggcggccttttgctgcctgctgtggggcagcgccttcccggcggtgaagatcggctacggcctgttgtctatttcctccgccgattcggcggagcagctgatctttgcggggctgcgttttttctttgccggtgtggtggcggtgcttttccacagcgcttccctgcggcggctgcggcttcccgcacgttcctccctgtggaaggccacgaagctgggtctgatccagaccctcgtgcagtatgccctgttctatatcggcatggcgcacacctccggcgtcaagggctccgtcctgatggcggtccacgtgttcttcgccattttgatctccgccaagctgtttcactatgagcggctcaatgcccccaagctgctgggctgcctgtgcggcttcggcggcgtgctgctgatcaatctgtccggcggcgggttgggcggcggcttcaccctgctgggggacggtgcggtgctgctggcggcgctggccaacggcttctccatctcgcttttcaagcggtatgccgagggagaggacaccctgaccctgtgcggatatcagttcatcgtgggcggggggcttttgctgctgacgggactgtgctgcggcggtacgctgccgcatttcaccgggcagtcccttctgctgttgggatacatggtgctgctgtccgccgtggcccagaccatctggagcgccctgacccggtataatccggtggggcgggtggcggtatacggctttttgaatcccgtgttcggcgtgctgctgtcggcgctgctcctgcgggagggacagcaggcctttaccccgtacagtttagcggcgctggtactggtgtgcgtgggaatttttgtagtcaatcgcagcgatgcccccggcaggggagcgcaggccgatcagcaaccataacaggaaaagggacggtccctgtggaccgtcccttttcctgtgggagagagactgctatattcgtttacacatattggatattcagcttccggaacaggggatgctcctcctcgccgctgccaaagacatcctccgacacctcttggggacggtgagggatttcagatcctggcagctgaccagcgcagaccagccgaagggggcctttgaagcacggatgatgtgctccacatggcgaaagtcctgcatctctcccgcaataccgtcgccaagcatatgcgcctgctggaggaacacgggctcatcatcacggaatggacgcagatacagatgaaaaacggtattaggaaaaacggaaacttgcgctgcaccatcgttcccatgcacgaggtcttggagcagtgttgccagcggcaaatgaccgaactggagcgtcagcgagtgcagaaaaagctgtcggtacagagcacagagaccatatgtccgcccctgtgagccgctgtgtggtctctttcggagtggggcagcattcctgccccgaagagaggtatcaaaccacttttgggcggcctcctcggctctgcggaggacgaaagaagaagcagggaaaaaatttcaaaaccggggcgagagatcaggttttcggaatacagaaatatgcccccggctgagccgggggcataccctgtatgggaaagacgatcgcttacttctgatagagcaccttgttggcctcggccatttcggcaaagacgccggcgtgcttcttggcaaccactgccttgatgaccagcagagtagcgaccatcagcacgatggcgatgatcatgcagaccacagcgttctggaccagaccggcaatgatgaagctgacgaaggaaacggcagccacggtgatgccatagggcagctgcgtcgccacgtggttcaggtggaagcagtgggcgccggcagaagccatgatggtggtatcggagatgggggacaggtggtcgccgcacacgccgccggcgcaggaagcagccagacccacggacagcagagtcatctgggtatcccagtcaaacacggcgcagaccagcgggaccatgatgccgatggtaccccaagaggtaccggtggcgaagccgatgaagcaggccacgatgaagat

SEQ ID NO: 12434 - DNA, 1077 bp, Unknown
  gut microbiota DNA sequence
cattttattcggctcggttcttccgttctcccagcgattgacggtcgcaacacttatattcagctgttctgcaagttccttctgcgaaatacgcagttcactacgaagctgaacaatagagtctgcaaaagtcactggtcatcacgccccttttgcatagtataacacatgataagcatttttacaacgaagagaagcatttcagaaccacttttttatgcaggctgttcctcgccgcacagcccattctttcggatatatgcgtccagcagggtgttgcgtaccagagcagagagggtcggattggcctcctgagcaaaactgactgttaccttatgaccctcaatggtcatctggatctccctggtgtttttcttctctgtgctctgatttaccatagttgcttcctcgctttcttttattgtcaagtagtagatccttgatcccaatgctgatctccaaggcggtattcacttcccgcatcctgtcttttcctacagttcccgcatatccaagcaaacgccgcttatctaatgttcggagctgttccagcataatcgttgattcgttgtgcaatccacattgccttccgttcaggttcacatgggtcggcagtcggtgatgctttatgcggctggtgatcgccgctacgatgactgtgggactatggcgattacctatgtcgttctgaataatcagcaccggtcggacgcctccttgctcggagccgcgcaccggttcaagatccgcatagaatatgtctccgcggtatgcggagtggatgttgtcattatccatagtagcttccgtttttctcctgctacaaactaagtaaaggaatccgcgcaggccatagcgcacagctttggtctgcgcggtatatattttcctttgcctgtattcgacactactgccccaggctgggcggcaacttgaactgtgcgggcgcacatcacgggaatctcacccctccggggaacgcccggagctgcgtacaggagtatcattatgggctgacgggatcatggcggggacagcttgccaaagctgtcttggcctgagtgggtatcgctctgc

SEQ ID NO: 12435 - DNA, 76166 bp, Unknown
  gut microbiota DNA sequence
gttaaaggctggacctttcaagaatcccacacagttggggcagcaggtggcagtcagaataccatccagccccaggaaccggagccgctcatcccggccatccagcaccaaaatatccaccatccgcccgccgcagtggggacaggtgtcctcccgtgctcggccaatgcggacgggagatttctcgccagtggttcccttgaccataggatagcaggtatcgaagcccagtcggattctctggccctccttgtcgaaggtccagcctccgatctgcgcatagctggatggatctacatagagacccttacgccagggccggggatttcgctccagctccagcagagtctccattgccttgtcatctccttgcatagcaaggcaactcatcaggttggaggccgcgctggaatattccgcggacaacagcgcatggatcagaccatcccgcacatcggcgggagcatgataatagatctcacagggccagaacacctctgcggccagtgccactcgctggatctccggggtgatggcatcatggtagccaagcagctgccaaaagtcggcgaaatctgggtcctccatatcagccagcctctggatgttctgtatcaaatttctttgtttttcgacaatttgttccggcgtccaggccagagcagcttgccgttcctgctcgcacttacatttccaacacaatccctcatagcccaagggtgtcccacagccggggcaggtatatttcagactcatattctttgactcctttccagcgatagaaaaaagccccacgccgcactgtcataaagacaggctgacgcagggcgcgaaaaggccgtaagggagactccacatccaccagcggatgtggtttcttcttcagccaaaatcaatttttcatatttgaacagaacagccgtggactgtcccagtttttcttccatagcaagacctcgggttacaaatttctaaatgggcatactttactattctattatatcacatcatctgttttctttggaagagagatttgctcatcagccaaatttgtgatgtggatttttccctttctctttcctgtcccggcatactccagcagttctctggcattgctggccggatgccgcacataggcgatgagaaaatcgctgcgctccaccatataccggtttgcgcggacgatggcaagccgtttggggaccgtttccagatccggcggatagaacagagcgtcgaacgcctctggcagatccacatttctgttgactgggtaatatggggtcatcagcatcagcgtaatatccgggtgcgttcgcttggcctgcgacagtgcccggatcaccagacggtcgaagcttccatactgccccaccacaaattcagatacgccatattccgtgatatggcgctctatggtttcaagcagagttgggtacacccgatccggcgtctccctgtgccctataaaaaagcagcttcccatctgacagccctcatacacagtcgcagtcatattttattggttgtgattcataatagaaatataaaactcgcgcccattttaataattatatcactaattattcgttgtgtgaagcgaaagttgatgatttaagtgcgaacccacaacgctcccttatattaaaataataagcagagattggagggagaggatcatggacgacaaccgccgctatgaagcgtttgtgcggaaccgcatcacagagctgcgggaacagaagggtatttctgagcatcggatgagcctggagcttggaaagagcggctcctacatcagaagcatcaccaatggaatttctatgccctctctccgagaactgttcaacatcatggaatactttgatttgacgccaactcttttctttgctcctatggacgatccggattccctgcgtgggatcataggtaagaagctgcttgccctgccggatgaagacttggagaaagtagttgtttttctggactggatcagaaaataaccgctcctactggcgtttgacatgaaaaatatgccgctcagtcagtttctgatagtttctgacatgggcggtttcttttttgcgctcttgggggaaagaacttccggctattgaaatttcaagctctttccactaaaatggaattcatcgtctgttaccaaccgttccaattacaaagcgaggtaggaaaaaatgaaccaaaaagaaatcaatgagctgcggcgccgttttcgcccggaaaaaagcgccatcagccgtgtttatggatgctatgtcaacagcagtaaagagatcgtttccgatctggacgaatccctgggcatgatgccgcaggaggagtccgagaagtatttgagccttttgaagaagggactgtccggctccctggggaaaaacctcattgatatcgtattctccactcagcaggtagcagacagtgaggaacaccgcctgctcaccacactgtgggattcccagcttaaggacaacgaggcccgccagaccttttaccacaaggtaattgacagtctggacatgggggacagcagttacctgctgctcctggcctgtgacagctacgatgtcccccatcggggcaaggatgattccctgcaagcggatgcctcggatgaggtgttcacctacatcgtctgtgtggtgtgccccatcaaggagggcaaggtggaactgggatacttccccggtgacaatgaattccactgcgctgccgggcaaacagtcgcttctcccgagctgggttttctgttcccggcattcgatgaccgggcagcaaatatctataacgctctcttttacagcaggaaggccaatgaaattcaccaggagttcattgacgcgatcttccatgtggaagcgccgatgtctgctgttgagcagaaggaagcattccagtcagctctgagcgatgcgtttgactgcagtctggaagtgatgcagactgttcatgaacagctgcgtgagaaaatcaaggagcacagggagagcgggagttcggaacctctggagatgagtgcctcagaaatagggcaaatccttcaaagctgcgggattgcggatgagcaggtggcagcattccaggaaaaatgcggcgagcagtttggttcgggggttgtcctgaatccggcaaacctgatcgacagcagccgttttgagatcaagacacctgagatcaccatttctgctgatccagagtatagttatctggtggaaactcaaattatcaacgggcgcaagtacctcctgatccctgctgaagatggcgtggaggtcaacggttttgctgtcagcattacagctgcacagaaagacgattaaatttcaaaagccggacacaacgcaaggcggtataatctttaaggccagatgttgtttgttattttctgtcttaaataaaatccttagagtgggcacttctggttggttcattatgaaccgagactcggttcacatgatatgtagaccctccccttggcgggagggtttgctttttacaggctatctcaccagacggttccttgcttccagtgctgatgcgcagtcatggcctgtcaaatactgtgccgcatccagccattcccgttcgctgcatgcacctaaagggatcgcggcagtgagcctgtgcagccgttcactttgctgagacagccgaagatcggaaagaactccgcatcccatttgataagccaaataatccagcagatcgatctcaaccagcattggacacctccgtcataccacatgatacagattggaagtaagactcccgttttcccgccagcgtgggtacttttgcagcagaccggttttacagaggtcatccagcgcccgcttgaccgtagagcgggaaagtcccaactccagagcaatggttctgatggccggccagcagcgtccctcgctgtctgcccgatccttgaggtacatatagacgctcttggctctgtggcttagattggaattgtagatatttctaaagctgttcattctgtttccctccgtcaaggccgaaataccgttttgcgggaatccggtgcggcctgaattccctgagccataccgccagcggatgtgccgcctccctgcggctgctcactatccattacaatcgtcccatagtggcggcggatgatggactcctccaactcctgtttgtcagcataggcaacgaaccgctgggccttctccggtacttcatagggcatgccgaaccggatgccccagtcaaggaacagccgcagtttgaccttcattgggtggacgccggtcttggccacaataaagctgcccttgggcatggacttaagttcatccggggtcatgaggggacgctccatcatctggagggactggctgggatcgttttttccgcgggagatactgccgctcattaccgtccggctgcccaaagatttggacagttccaccgcggtctgactggccggggcgaagccgccgtaaaggttgacctggcagttgtccacgatgatctcagagccctcttttccatagtttttctgcagctgtcccgtaatgctctggacgataggcaccagcatgagtcctctggaccgggaggcggaaaacatcagttccagcgactgaatgggcgggcaggtgcccaactcgtccgcgaagaagaccacccggttcttgagccggccgccgttctcgtcggccacagtgaggatctcccgatacaggttttggaggatcaggctgaccataaaatacttggtctggtcctcctcgggcagtacgataaagatggcggatttctcattgcaaaacttctccgcgtcaatggcggtgtcaaagcagaggatctgctccatctccgagtcgaggaaggcgtttaggcgggacagtaccgttgagatcacggaggccatggcctgctccgccgtgttgagggcggacccggcaaaccagcgggccttatgattaggcgggagcttttccagcaggagctggaactgattctttcccttcacccggctgggggccagcagttcctgcaccaacttgaacaccgacacgatgtggcgcttttcaatgggattgccgtccgcgtcctcggtgggcaggtactcggccaccagcaggaacatggcagtcagaaggccctcggcggaatcgtagaaaaaagcattctgcccatactgggcgctgtcgccgccgctggtgttgatgagggtcttggcgaggatcttggagtatttctctgccttggcctttgccgccaggtttttggggtcggctttatagatatccatgtacttgttgatcagatgaagcaggttgttgccgtccgagcgggtgggattacgcagatccaacacggcgatttggtatccgtagcagtccttggcaataccggcataattgcggaacaggtcgcccttggtatccgtgcagaggaaggacatcccgctggcgagggcatattcgatgttggggtacaaaaagaacgcggtctttccggcgccgctggcggcggtgaccatggcgtggatgtcatcggtgtccaccagagctgtaacatggtctttgggcccttcgcagccaaggacaaggccctgcttttccggcagatgctctcccttgcgccacagctctggttcaaaagggacatgggcataggtctgccgaatctcctgtttggtagcccagcgtgcggttccgtgctggccgtcgcccacagtcttggatttgattccgtcaagggtatagtaatgggagagaaacgcgaggccgccgatcacgagaaacatgatggcgcctaccacgataagtgttataacttgcgttggcacatgatcctccttttgatatctacgccttaatatcagaaggggatgttcagttttcgctttgtctgctataataaattggtatgaggtgattgctttgatttgcgcatgtgaccattgctactatctgtttgaggcgccggaactgccggagcaatgcccggactgtggaaagcaggcaacccggccagccaataagcaggagcgggcagaatatctcagcagacaaacaagcagccaggaagatgcggaggagtgggactgagccattcctccgctttgctgtttcaggcttaggccatcactggctcagtttccctctgggtcttttcctctttctgccgccgtttgatctcgtcggcctcgtacttgaccggcaccttggcacaggagatggccagctccagccatgcgctggccacctcttttttctctgcctgggtacggataccctggcgattgttcttggccaatacgctttggaattgcatggcgatctcatccgcccggttcttgaggatactccggttctggtgaggcaggatgtggctttctaaaaaccggactccctgctcaacggtcagcgcggtacccatctgtttgcactcccgcagcaccaccgagagggacagcgccgccatggtttccatgtgctccatcgcctggtcaaagcgtccccaatgaaggtcgttccggtactgcaggagcaggccggggatttgataagccgcccggtccggctgaacttccttgcacctggtcccgattcgctggcagacgaggtctgccgccacaaactgcggatgctcctcggcgggctgtgcctccagtccatgccgcgctttcagatcctcgtcccagtctttgtattcggattgcagcggggcaatttgagaatagccatgctcccgcagaacatccgagagccggccgacggcctcaattccggcagcgtcgtggtccaggcagaggatggttttccgcagatttggatttttctccagcatccacagcatggcatgttccgccgtaccacagagagccacatagctgtgctgctgccagccgtccgggtacagggtgagaaaggcaagcagatcgatgggggcctcgaatacatagagacggtcgctggtaccgacccagtggaaactgcaccggggatcactgccctctatgttgccccggtagcttttgccttgggtatagagcccccgcttgtgggcatgacgggcaacgccgcgttcatcgaatccgacgaacacggcgttgtgatacacctttgtctgatctatggacaattcccggctctcatagatcagtcccttctgtgcgaaagcgcttagtacctcccggctgatgtgcctctgctggagcagataagcatatacccgccgcatggcctggtttgagggaggcagggcaaattcctttggcggctctttttcttttttctccgccggtatatacacctccccctgttcaccattgagcagacgggtcactgcttcagggtaagtcaggccgtagaaattttggacaaaggagattgcatggccacccctttctgcagcatgatcataccactcattcccatgcacagtaatactgtgatctgaggtgaggcgtttgtcctggccggaggagatgagtttctctccctgccggcgcaggaactccaccaggtcaacggagttggcacggagtttttggtcctctgtgaagtggatatatggcacgctacatccctccttatcaaaaaagagaccgcagtatgcggcctctcaaatctgtgttaattcattcggttggttggcatctttcggagctcttggacttgatcccaacgcccatagaccacagcgatagtgtgactggaaaggtgcctgaaagggtaactgaaaaagagaaaaagatttcagaacttcttgttgaagctccagaggctattaatgggagtccgcaggttcatacctcatatgcctctcactgattccttcccttgagtttccggtggaacagaacaggtctgcacgggattggcttttgccttttcagcccttgaatgccttttggctgcgccaataaaatctgctgtttaaactgcactttctgtttcaaaagattacctcccttatagctgcatttccggctcatggtcatccgccttgtggccctgagcgatcttcttcgccttgatttttcgtaggagcttccgatccaccgcgacccgaacgccaccggagggcggtggttggttttgctcctggaaaatgttggccagatggtggaacagcgaaatgacggccgccacaggaggctggcccaagcggtcatccatgtgtttcaggaaatattgagcatattcattgccctgatccgctgccagctggaaccacttgatcgcactggatctatcttttgggacctccttcccaagcagatagagcttgccgagggcatactgggcgtattgattgccctgttccgctgcggcggtgagccagcggatggcggctttcacatcctttggcgcatcttccccctggagcagcagcttgcccagccggtactgcgcaaactgattaccccggcctgctgaccgcttcagcagacttagtgcttttacgctgtctttgggtgcatcttctcctgtgagatagaccagagccaggacgtattccgcatacccgttctcctgtttggccgcggcagtaagccagcggatggcggttattacatcctttgggataccgtcgtctcccttcagcagcagttttcccaggcggtactgggcaaactggttcccaagttccgcagcgtatgtgagccatttcagtgcggccgccgggtctctgggcagggctgcgtcaccggcaagatacagcttgccaagagcaaaggcggcgaagctgttttccttcgttgccgcaagtgtgaacagagccaccgccttttgaatgtctttttccacgccctgaccatcccgatagattttgccgagcgcgtattgagcacagtcctggccggcttccgccgcctttgtcagccgctccaatgcctgggctgtctgctccggtgtagaggatggatcattgaaaatcatccgggccagttggtactgcgcgtggggattgtccagtttggacgcctgttcaaaccactccctggctgccgtctcatctttaccagtccctacaccatggaggagcatccatccgatgcggtactgcaatttatcgtcatggctctgctgttccaattcgagaaatccggcgaaggcttgccggtaccactgttccgacgcttcggcgtccttctcacagccaatgccgtcccgatacatctttcctaactcgtaggcggcataggggaagtcctgctgtgcggaggctgtgtataactccagcgcccgcgcatcgtcctgttccacaccctgtccacggcgaaacaggccggcaagggaatattgcgcatacttgtaccctttgtctgcggaaagttggaaccaccgggcggcatcaccatagtcctgctcacagccgaggcccgcggcatacagtttgccgatccggtactccgcatagcgttttttcttctgcctctcaacagcatagaaagcggccagcgccttgctgtaccacacatgggcggcctgcatatcaatcttccggcccagcccgtccgcaagcatccggcccagatcgtgcatggccagcgcattgcctttttgcgcctcctgttggaacagggtaaacgcctgctcaagatcctggggctgatccttgccgccaaacaaacagcggcgggccaggcggtactcatcgctccagttcatctgcgctttggctggcgcagacaccgttttgtctgggacatcgtccggtggggactccgagaaatcattccagtcattatcaggctggggcgcctccggcagcggcgcttcttcctggtcctccacagggacacggtcttgctggtcatctggatggaaaacctgctggcgcgcccccagtgttaccgcttcctcaatgacgatgtttttgatccgcttgaattccttctgctgggaaaggggaaggcgtggaggcaggtcgtccttgtaggtgcgcagcacatcttcccgcagttcataccacagggcataggctgcggcgacacatggctctttggccagctcgtccacaatctcatccaccacggccttcagcggagccttgaggtagccgtactgcttcctgcctccggtgtgccgcaggcgttccgccagatgctccatgagcttctccatgcggtggttgaccacggcgccgctccacatccgttcaatcaactgctccagcacagagcgggcgtcctcattcagcgtgtccctactctgggtctgcttctggtaaagctccgtcagctcctgccggaagatctcttttgccagtcccgacttgatttgggcgatgccctgcgtggtgaggaagcctttcgacggatcggcgctgtagcagaccatgtggatatggggatggtgtgcttcatcatggaatgcagcgtaccaccggaaatcctcccaagggatcttcatcgcctccgccatttccatggcatacttggagagcagtgctttccattcttccgccttgtcatagccgagacgggcagcgtcttcccgccgcagagagatgatgggcagccacacattaccggggtgggccgcgaccgcttccgctacctgcgccagtacgagctgatcttcctcaccggtaaacaatccatgggaaccgacgcgctgggcgcgggggcgggtggcgatgtacttcagatagttatccttcttggcgatctggttatagttgtcctccagagcgcgagtgatgaactccgatgcgttggtgcgtgtcggctcggccgcatagtcctcgtattcaaacatcccacggctgagcgggaagtcccgcaggatctgttccaccatctttttctgctttgaggtggccggccactcactgcgtcccggatcgatgcgctccacaccattccgtgtggccatatatttcacatagttttcaagatgagcggtggcggaggaggtaccgcccttgatgtaggggcacttgaaaatcaggcgcggcacagactgtcaccacctttgtgcatcactccacgccccgctggtagtcgatggcgtccttgaagctgatgcgcccattggtctgcttcacttcacggacggaccgggcgcggagtgtcttgagatcctcgtcactgatttccatgcccgccgccagtacattcatcatcatgttgacctccaccgccagtttgaagagcaggcgggcgatgcggttctcactgtcctggacggttccgcgcatggctgccaccagtgcgggcggcagatatgctgtggcttccttgccggaaacatagccggcatagaagcggattgccttttcaataaactcgttctggctctggcagttatccctttcacagagttctttgaccagttgctgtgtttcgggagcaatacgcagagcgaacttgattttttctctcgccatactttcctccaatcaaaaatccctgacctttgcatggccagggattcgttttctttaagaggcttctttacttcaaagctgaatgccgcccatactttgcttttgtgcctccttttctgtccatatccctgttataatgccggataaacgccgaagtgatgggccattccagccgtggtgacccccggtgtgatcccatcccctgaaaagtgacccccgcaaaaccgttccccggcccgcattgcggggcggtgtgagccgagcgggggacgctttgcgacccccgctctttatcctgcactgttttcgacccctcggttcaccctcgctaaaggcgaaagtgagaggccatcaacgcaggacggtcactgctcattttaggaacggcccgcacaaagcccccacaaatcgccgggagggacggcaggggtacggatgccacccagccccggaaaagggcacaccgggccgcacagggggcaatggcgggggaatgcgctccacttcacaaaaagagccgtgctgccgcacggcttctcatggagcatcggctattggtttgctcagttctgtgtgcaggccatagacacctgggccccctcgttctctgtctggctcttgatgatccagtccgtcaggttctggcattcactcaattccctggccagtgcgtacatttcacggcggccatcggcgctgttcagcttcactgctgtctcgaacaagccccagatattatccagggtttggaggccgctggcgtttatcggcaggtctttttcctccatcacatgattcaccttttcgggctcggctgcttgggtaactgcgatttcttcctgacggatcaagtccagccaccgctgtgtgtctggtattggaagtccccatgccgttccaacctgtgtcacagcctttcgatatggagttacatccacagctgttccatagagcataaggtatgcaatggcctcctttgcgagattttcctgcagtttacatacttgtttggctttcattcgttgaactcctttcctcggatttttggtttgtttcaggcgccggttggctgcccatgcaacaacacaatgccacacttccggagagaaatccattcatcattgccaataaaaagcggcttgagaagctgtgggaagtcgataaaatttaccgagcggcgtttcctacagccgaatctccagcccttcttccgcctgctcccgcagcagggcggtccttgtttcccccaagctctgtccattctgttggtgacagtaggcgtccatctggttccacaactggacctgttccgcggaagtcagcgggtagaaaaactcaaactcatgaccgtcagagcagacgagacatacggtcaatgcgctgtctatccgcccggtcttccagccaaaattggcgtacacattcagccagtcatcgttgaaggcagaggcaacattggtaccaaatactgcgtcaggatcgaagtttatggggatatagaagttcagtttcccatcgcactctgtgatctcatcggtgaaggataccgcatctaccggcagccttttggtacctgcagtgagttccggaggggcttcacgctccatatccaactgtgcgtagtaatcgttcagcgttttcccggtcctgccgaggtagtccgcttccatctgttttcgcaaaagagcccgttcttcttttcccaggggataggtgaaaagtttctgtaccactccatcctggcgatgtagagtaagggaaagggtggcgtcggcctcctgccgtgcggcgtcgtaattgcagagaatatccagccagccccccggctctaaacagtccgccgccgggccaagaacctcccgctgggcctcatcgctggtgaagtcaaactgaaaattcagtccatggcctgacagaatgatctcctccgagaaggtaagatcgccctcccgcagaggtcggattcctctggtttcaatcgaaccaaaggtctgcaattcaatattccggccgtacagataatctacaagtctgcgccattgttcgtttctctggaggttgcgagttcggttggcgtggtaggcggccgtagatacatccttgtttttgaaggtctgccaaccgtctgcgagattcagcgcggaacaccagccggcatccagatcaatctcaaacgcacctgatactttgccagtattttcgaggcgcaaggcggccaattcatcaaaccgctcccgcgtaatgggctgtgtcttataaaagtggtgggagaaaccgcccttcaccgcctcggcgtctccttgcagataacggcgcagccgtatggccacatccagaaattcctcgccattacccgttgagaagatactgtcatggccattctcccgaatatgaaaagccgcatagactttctggtcttccgctgcctgtgctgactccagttcttcctttgtgatagctgtttcaatctgtacccaccgttctaatggaacagtttcgttgtacagcgttatcaaataatcctgcagatgccgtttaacattactgccttgcgccttcagcgcctcctccagcgccgcccagcgccgctgatccagccacgcctcggtagatacagaatcggccattattcaacccccttcttctcgtcaaaagtatccggcgcggcgcttcgaggggaccgggcaggccgcgggcggggctgttcctccggctccgccatgctttcaatatactccctggtctgagaaggcacatattttttgtagagcttctccatgaacatatccagttccaactctaaagaggtaccgttctttcccgcatagaactggacggctttgagtttttcctgctcaaatgaaaccgtgactgtggcttttttcatcgtgatccctccattacagaaacagttccatggcatgttctgccctggaactgttggcaagtgtttcatcgtattgtgccagaagctgtgaattgacgccgtccagaaccagttccactccataggggccggggcggatggcggcaatcttggcatccagaagagccgagaattcttctttgccctgggcggtcagacggggaaggtccgctgcgggcacccagccaacatcttcggcggcatgaactaaatagacatcatgatccggcagtccaagtgtcaacagatcccgcagatggacggccggggcttccgccagcgcatggagctgctgctcctgcacaggctctggtggaaaatacactctggtttcactgccatccctgcagaaataatcgacctttctccactcgccgccatgggcaacctgcaactccccaagatggctgtatctccagttccgattattttccttgcaccactggactacatggtcgctgacgctgccggacttccagtcgaaggtgaagagagtttcacccttctgccggagcagttccgtccactgtacccggtctgtgaagcccatacttcgggcaacaaacgcctcacacatccggatcgcccagtcggacggctctgcctgatgttcatgtttctttctgaactcctccaactgccaaagcagatccaactgatcctgtttaatattgatgtttctttcctcctctttcgtgtcatccttggactgtttatccagcgatagattgtttccaaaggcttccgtcaagctctcgtagatgctctccgtatcccattcgccagcggcagtcagccggccagcgatctcccgcagggtcgtttcctgggcaagcatctcatcgccggagataagccagggccacatcttcgaggtttcctgctcaaagcgaatgtagtccacgatgtcctggtatgcgtcatcgcagtcaggctcatagcggtgggcgagatcgaagcccatggcctcaatctcctgattagtcagtcccaactcattgtgaagcgtcttgtagagttcctcacttccgtcatgctccgcaaggaaagctatgagcctgttctggattctgttggcgcctgccgttggaaaatggtttgccagggcatccaagctctcccgcaggctgccggcccggtggtcatattccaaccgtattcgcccattgtccagatcaatgaccgcccgctgttccgcagccccgccatgaccaaggtcatggctcagggcctccgcttcatctgcaaatacccgcctgagtggagtgccgcgttcagcggcagcgagagaaagagcctccgcgaagctgctgttctcattttccgcgatggcagcggcccgcgctaacagtggatacagccccacaagcccagctccatcctcgcctacaaaagcggtttgccgtccccgttgctctacttgatacagcactgccgtagtatccctcccatcgttttattaccgtgttctgtctgttttacatagagagatcctgttcctcacccatctccacatcccacatggtccggacctcattcaggtaatacccagccagttctttgtcctcgcaaaagaaggggacgatgccgcggaccccatagtgctcctcaccaaccgctgggttgtaccgcccaagcacatagtgaagggggactttttccattgtgaaaaaagttccccgcacagagcaagtcttgtccttttcatccacgctctctattactccaccgcgtagatcgaaatcgccggggcctccatatggctcggtagcgacaaacagcaccttgtctccagccgtcagctccttagctaacaggcagtcccgcatacgggaaatgatttcatcacgggaggtgaagctctcggcctcctggatttcatcgctctccagttcgagagcggacagagcctgctggtacgcggtatgaagccgttcatccggcacatttgggtcaaggcagtaaccgaaagcccctggagccaggcgggtgattcgttcctcatctgggatctgttgtaattcttcataggcggaaagcagattcaccagcttccctgattttgggagaaggtcagactgcacctcagatgcttcgatctgctcgtccacatattcatcatacagagcgaagccgaggcatccaatttcatcgttgcagatttccaatgtgttatgaaggatatcgtagaggctgctgtcatcgaaatactctgccatatagttcagaatgcctgatatgatctcctccttccgctctgcggaaagagagggggcgggctgctccggcgccaggtttttgcagtagtccagataatagcagacatcaaagcactcgtccgtcagggtgacatccgccgcctccggccgctgctccagcttctcaaggagcatggtatcgaagccgttcccgtcctctatcaccagtcccatttgctcataaagctcactgaaataatagcaccagctaccctcgttggtgttttccgctccctccctgatgatcttttccactgcctgctccagaatggaatcaaccaccgctcttgctccgggcaagtaggcaaagtgtttccccccatcataggcaaaaactccgtctttatgcccctctcccaaaacgaggacgccctggtagatccgtctaccgtgttcatcagcatagaacggctctgcagcccagcggccatcctggtgagggccattcaaaaagtcttggaattcctcgtccggcagcgtaaccagccgaactgcctcacactcaaagatgtggaagcgtccggccttggccggcaattgaagtttcagccgcaaaatatcatcctccagtcttcggtaaataatagcggggattggtacgctccccattgacccgcacttcaaaatgcagatgcggacctgtagacctcccagtggaaccggagagggaaatgatatccccagcctccactgtctggccaacctgggccagtagacgggaattgtggccatacaaggtggatagtccattgccgtggtcgattatcacatagtaaccatagctgctgttatattgggaaactgtgaccgtcccaggcagtgcggcccggataggggtgcctgtgggtactgccagatctatcccggtgtgtccccgtgtctcgccagtgaaggggtcgctgcgatacccgaactccgaggtgaccacggactcccagcctgctccgatgggagagcagaagccatccaccccaatgaacgggacatcagccccagggaaccagccgccgctttccccgctggggctgccataaaggatgagatgatagatactgtcagcgttggcctgatggtccgcggtgacctcgactccaatggcatggctgatccgctcataaatttcagccaggtcttcaataggaacggccaccatgtaggtttctgtggtctccacctcattgccttcttcgtcggtggtggtaaccgttcgggttcgctcctcataatccacgaaacagtccgcaaactcatggatgccatctgtatctggctgttctgcggcgaaatacagagcataaaaaatggccttgacgcgggtatcgtcaaggctttttccatcttcgcattgactattgatctccgcgatcacttcgtccagttggtcaaagctgttccgcatatcctcgatgtatctttggtactccggcgtggcgctggcggaaatggagccgccgtggaagcacagctccacggcggacacgttgtgctgtgaggttcctgagaggatggcgcaaagcagaaccaccagaacgatcagcggggaaaggatagccacaatgccccagcccacctttttgcgggcttcctcattggaaagaattactatcgccgctttgacggccgctgcaacggtggcactcataggttcatacctttcatgggcgaatcctctggctgcgtactgttctgcagttcagaccagtacgcggccagctcctccatggtttccgtgtacccatcgcctttgggccgatgctccgcccacagctggtactgctccagatcaattccccggtccagcaggagcttggcggctccgaccgcctgattgctgacacaggcatagagcgcgtcgtagttgtccggctccaccggcatcccgtgttccagcagtctctctgccatccactcctgatgctggcccgtgagggtgcgcaggatgccggccacctcatcgcccggtcggacgcccttgtccaccagatccaccgcggtctggaagtccagcttttccgcaacccagcggagaagcttcgggggcacagaagcaatctgctccggcgtgcattgggcgatcaggtctttggcgatgttccggcagttatttgtataggcatagaggatcacctcaccgtggagggaggggagcggctccgagaggcggccttctgattccttcaccaatgtttgtacccgccaactgtctcccgtttccaccgcccgcttacaggcagtgagatatgcctccggggaaaacctctccaccgccgcaagaagtatcagggtcatatttcctcccacgacaccggggcgtcccgccacctcgatcagcaggtcatccgtctggtctgataccctgggataaaggtttttgaaggcgtcaaattctccgtcccgaatggccaacacggttttatcgtagtcgctgatgtgcagggggtaccgtcccacctcatccatataggcggtgatgctcccggtcatccgccgcaggagctgttccgtctgggacatggcctgttcctggcgttcctgctgttccaccagcgcctcgatgatggtgcgctgctccgtaggattcaggtggacgatcatgccctccggctccgcccgctcaccctgacggagatgtcgggcataggtttcgccgtccccgtggaacgccttggtgatggcggaggagatgaggaacatccggtccagatctgcgccggtttcgcccagcgtcttgccggtgatgaaacttttggtgacggggcggctgtcttcataccacttcaggtacacatctaaatagacgccctcgttgccgccgtagtcggtggtacagaagatgtcggcgtctttggggatctcccggccattttcccattcccggtccatgagaaaatactcgtccggaagatatcccataccttccagacggtgcttcagttcctcgaagacttcctgtgcgacgcgctgaccggcatactgcatcctccggggatctcccggaaacggctcccactgctccaattcaatttttttcattcgaatttcctttctcttttatagatctgctgttggcagttcacccttcatacagcaggaacagggcagatcctcatctgagaaagcgcccggaatcgccagctgattttcatccgcgcagataaaatcccgccaggcccagttccggcccaacccccgcactgatgtgaggtttggcatggctgcgtcttcaatcgccaaagcccgccgcagcaaatccgggtagcggtggtacaatgtccgaatttcccaccgcttcatgctggggcagaagaagcaggaagacttgcccggcaggggaaggccggcatcccggatcgcctggatgcagtcctttcggctccagccccactccatcaggggatattccttctggtattttttatcctgaaggtcatgaggaagggcgttgagcagacggcgctcctctccggcatcgtatccaatgaacttgacgaccttttctcctttctcccaggcatcaatgcagggctggtagtgcctgcagaacttttcctgcggggcaaccttgtgcttgagggagcattttttgtacccataagcaatggagggcagcgttcctgagcggaggcactcctgctccagcgtcagcctctggccgttcttctcggtgtaccacacccgcgtgatcgccggcatcccatggttctccagccagcggctcatggtgtccaggtaggcataggtatgcggctgctcggctccgggatcggcaaaaaggatcaggtcgactgggacatggtgccgccacagtcctaccagcattgccgtgctgtccgttccgcctccatacccaaccacatttatcgcccgcccgctgtgccgaacagcgcctccttataggctggagcgtgaacctccaacagataccgctcgttgccgcatttgaacaggcacacaccccgttgggggaatcggatgaggttgtactccgcctcctccagctggagcagatccatataaaaccgcttgtcaatggagccgcagttgaagatcaactggtggggcgggatagcgaacaggggcttggtcaactcccggatgccctcccggtcaaagtcctccagattctgcgaggccatgatgaggttggattccttcttgcggacccgcttgagagtgttgcggatatactcgatgatggtggtacccaccgacacattatccgacagccacacatacagctcgtccagcgccgctgtggtgttgccgatggtcagcaggcggtcggacatataggacaggatgttgaacagcatggcgccgcgcacattcttgctggcctgcagcagccccttgaccccgaagacgataaagcgggaggaggtcacattggtgtgcccgttgaagaactgagcctcggcgccctggcacatggagtggaggcccagcaggatctcctgcagcagttccgctgtgtagagctggtggcagttcccatcgtactctctgtactcctgctcaatgagtttatagaggtcggaaaggatgggatagtcctggggcttgaggccggcgaagttggtgctgtcgctgatgccccatttggcgtacagcttgcccaccatgatctcaatggcgtcgatgtggcggtctgagaaatccttgtaggcccggaaaaagtccttgagaaaggagatgtgctgggagagccgggtggatttacggaatgcctccggcgcgtccctgtcctccgggccactgccgtcatcccagcacttgggctccagcggattgatgcggtacacgccgcccatcagatccatgaagcagccgcccaccgtctcacacatatccttttgttcgtgttccacatccagggaaatcacggatttgcccgcctcgaggaagttgagcaggagcagtttgagcagatagctcttaccctggccggagttgccgaggatcaggatgttggcggaggtcttatcgtcatcccgcttatcaaaatctacgaggatattggccccgtacttgtccttgccgatgtagaatccgtgaggatcggtcttgccagaataattgaagggatacaggttggccaccgagctggccggaaggacccgttcaaattgggcgccgaaggcgttgcggccggctggcataacagaaacaaagccctcctgctgacggagcataagccggtccacattgagcttggagcgaaccagttcggtgagcacatcggtctggagcagcttgagggcgtcgtagtccggggcggtcagctccaggaacaccgcacagtggaggagcggctcccggttgcggtgcatggaggagaccagggtaaccacatcctgcaggttggcctcggcggtgacagtctgctggagatcctcggtgctggagcgggacattcggtgcttgttggcggcgttgtggatgatccggcgctcctcactgggggtgacctgccgggtgtagatgcggatggtgaccccgtccatctcgcccagatgccgcaggatggcctgctcatcggtagaagtggggtactcccgcagcgcccatacacagcggcaggtgttgccgcacaggtagtggtccaccttgaagtcgatgaccgagggggcgaccatgtcgaggaaatccttgatatatggttcctccaccacaggccggggagagttctttgttctgtttttcggcaatgaaaaaacctcctgtccaggccggcaggagatcttttatcgcactgtttcttcctgatatggcccggaagttctcctgacggccatatcaattaaattgtggggcacgggtcagtcattcagaatgatccagcgttccccgtcgtaatcctcatatttttccgtggtggcattctgctcaaaatacacgcccagcatgcgcttgagatcctcgccgctggcgaggcttgccttgaagccctgatcctcgaggcttttctggatgcgggagaggtgggtgtgcagctccatccctgtttcctcacgcaaccggaccagtacgaagaactcacgggcggtcgccatctggatctgtagacggtccagtgatttagcgtccgcctccagcagccggctgatgaccggcaggtcctcctcggcagcccgctggcgatagtgcctcttgttgtcctcaaagctctccttggagttgagggccaacatctcgatctcagcctgccccttgaggacggtcatgagggcatagatgcgattgctcacagcctccgggggctggaccgagaggttggtgggcttgatggcaaagaaaatcagcctcccatgactggtctttaggccgctgtcggtgatctcgtcgatcccgatgagctgccgggtagtctgtttggccgttgcttctttttttctgctcattttctatcactcctatccgttgatggattacacagcccccaggcataggtctgctggcccaggaggaaatatcggattgcatagcgcaggaagtccaagatactggtatcctccagccgaatcgagaggaaggcataggccgcagtgattaccactgggggcaggaagccaagttgggccatggcaaacacagagatcagggcgcccacgccaatgatagcgatgtcccgcagttcccacagccacagtacggctttggatttcagattatcgggataaatgtacatgtttcacctcacatcgtcatgctcattccaaacccctgttcatcctgatcggggccgaattcctgatcttgtacttcgtctgggctttgttccatcaaccaagattggagttcctgtgccaccaaccccacaacgaagactcgtttggatacgccattatgcgcctccacatactgctcaacgcggtggaaaagagattcgggcatagcaatggccagcgtccgttctttcttgttgtcctgaaggaccgcactctggagcggttcctcgccatgttcccactgatccagtgtctgattcaaaaggctctgaaccagtgccttttgggtgaggggcgcatgagcatccaggtaggacttcagccgctgaaacatgtcatctgagatctgaacggccagggtgcgctgttcctgctttgctgtggctggctggtccagataggtagtgagtatcttagtgagatactcaccgtttgtcatttcaggacttttgccctccatcagccgcttgtgaagcgactcgggaatcaagccgcagaggtttttcatcggttccatgatcgcatctcctattcataatcattcaagctatctgtgctgtggtcgcccatgcgattccttgcaaaacatagtcgacgcaaggaatcgctacactgttgcccagtgctttatagcgggcggagtcggaagcaccctcgatatcagtccaaccatccggaaatccctgcaggcgctcgcattccagcggggtcagacggcggatcagaagaaccgaggcacctcttggagcggaggcgctgttatctggctcgtccatatccacgaccaaatctgttgcgtctttgtgctgacgagcgctctgagtgctgaccacctcgttgcttttgaacacatccacacgctggcggctgaacacggcatggtgatcggtggcggtgagagtataggcgatgccctgttgatacccaatcccgttcccgcggttcataggctgccggtcaatggcatttccggtgatacagaatatcgtgtccggttctgcgaccagcgggacattgttcccacccgtaccgtaacgggctgacattgtgggcgccacagaatgtgggccggtgtagcgggcatcgatcccgtggttctcgaatacaagtggctggtggccatgctcctgtgcccgaagtgttccggcaacattttcgctgcaggcaatggcgcttccgccctggtcattaaggcacaggatggatggcatacagttcccgctggcggttcctttcaaggtaggcgagacttcctctccatagccaatactgcccgcagaagcaccagctccagcagaaaaagcagctgtaaaaatggcgggatacccttgtccgggcataccgccgcctccgcttagtgctgtgtgccgctcctcggaaaggaagcaatcaccgttgcctttggccgtgattccggccacaaaggtctgctgtttcatccctggctgggcggtcagcgccgcggctacatcatgaagatcccgcacctcgtcccgctgattggcggcaaaggcggtgagcacaccgtttcgtccagtggacataccacaattaacaccgagagtggctgccttttctcctgtcaggtctccgttgtatccgtcgaatccgatggggccagtcccgcctggaggatcagagcatcccggagctgaggcggcagttccttgcctctggcctccgctcgacgcagaatacccaggcaggcggttttgctcaaatagtatttgcggggcggatcgtcctgcaaaatctgcgacaaggaagattctcttgcgacgctgggcgacaccccagaattgagcatccatgactctccaagccaggctgaattgatttcccagaatgattgccccagcagattcccagcgcccggagtcaggtcgaggcactgaacaggagccgtctttaattcggacaatctcctcgaggacgatgcggaaatcttcgccgcccgctgaactgaatgatcctggtacattctcccagcacatatatcgaggtcgaacagtgtgagctgttctgccgcgccgctcatctgcatccctcatttcttttacaacgcggatctgctccataaacaggccggaacgctctccggcaagaccggctctggcccccgccacgctgagatcctgacaagggctgcctcctgtgataatgtctaccgggggaagttcggcaccattcagtttcgtgatgtccccgacatggagcatggaggggaacctctttcttgtcacttcgatggggaaggcttcgatctcgctggcccacaccggctcgatgccgttgcggaccgccgcgagtgggaaccctccgattccatcgaacaggctgcccagcgtgggcattatgccatacccatgctctgccctggagcttcgctttgctccatctcagcgggcagagcctcctgcttgatttccagctccccaatctgtcggatggggatgccgagccgttgggcctcctcaatctcacgggccatgccagaactgaccctgccgccgcagagccacagttcatcgcagacttccagcacccggtgtcccagccgcagtccaatttcccgttctgttggctcagcgtcatccaacatctgtgggtagagcaggtggacggcgatgggcgtatgcccctgatggatggcataccggcacgcctttttcgcaaacgcggtgtttgtctcaatatctcctgcatagggagaggcgatgtaaatcagtttttctctgctcatttcgccgcccccactgcctgtaccacggtgcgggtggtgttgaccgctgactgtgctgcatagacggcggacatgatgttggcgcgtgtcgaggtgtccagcccaaaggcgccgcagatgcggggcacttcaccggccgacagcatcaggccaaggcccagcagcgcatgatccttcagcaccagcagtcccgctgtaaggatggtggcctgcaggaaggtggtcagacacagaccgatgatctgcttgcaccactgcacaaaaccgtccatatagccgcggggcaccgagaacatatacagggaacccacagcaatctggatgagtaagactcctccgcgcttgaggttggagaaaaagcacttgatgacggcgtaccccatcatgatgataataaaaattaccatgatggggctggtgatgctgccaatcccgccgaatacgccggaggaggccgcggccccgatatccacgccctgcagggagttgatgatatcagtggaaagggcatcaaagctctcgccatacccggtaattccagaggtcaggctggcctgcagcgtgacggagagtttataaagttccaccggcaccagggtaaaacaccccacggccataaagcccttgacggcgctgatagccgcgtccttgatactggcccgtccggtctggtattcgattccgacctcgaacacggccaccaccagcccgacgacatacagcgtccaggccagataagaaaaaaagagaacaatggactgtacccagctcatctcgaagagctcgacgcccatgttccccatctcggcaaaaaagttgccaaagaaaccaacaagctggctgtagacccagtcgataaactgatccatcagcccgccaaggaaaaagtccaatataaacatctggtggtttcacccctttgcgtaagggggaccgtgccagcattggacgcatactcctgctcaaaggcacaggggccgtggctgggcacggcccctgcttgtattcgcttcctattttcttagcacatttgcgggctgtgttcctgcgcctcctcctgacgctggaacacctgcagatattcgtccaccgtacccgccagcagcctgtaatccgcctgagtaggctggtaaacataccagtctaccttcccataatcgtcccagaggtgtggtaagataccatccgagaagttgggattgctcacttttttctttcccagtaaatcgccaaagcgtaggatattcacatccaccgcgccctcggtccggttcaggatcgtcagcttgagggcattgtactggccggcaatgttcagagaaacaaactccagcctggcccgcaaatccgggtcaagctggatataggcggatctgcccgcataagacacaacgccgctggttttgcactgagtgaggattttcctcaactcctgtccaaatggattcaattttcttctttccctccctacatggttaattccgggacagtcggcgccggtggatgagctaactccagcgtactgccttccaaggccagaacgccatccagccggtgaataaggccctccatgtgtttctgccatccgtcccaatccttcggatcaaaccagccgccgggcagctcgccggctttgatctgccgctccgctctgatcctggcgtatttcaaagtgtccgcaaggtaatcccggagttcccggagagaagcccttgatgctgtaaacgaggtgatggaccggaacttgttgtcctcggccgcccactcctcatcatagtccaaactgccgggatcaccgtcaagatactttacaacgatctcagccagtgccatagggctggtatgcgcacaccccagctttacatcacagggggcattccatcggtctttctttaatcgttcaagcatttctcccaggtccagttgtccatctgccggtaaattgtaccggacacatctaaccgcatccagtccattgtcggactccagtgcggtgattccccaacagcccatagaaaccgtctcccatttccggcttacgcctcatcattcttgtcctacatttccagtttcggtccaatctgctcctgctcatccagcccaaatgcctcgcgcatttccgcatccgccagaatcccgaacgcttcctgacaatctgcgcagctcacgatccaggtctttccttcaaagtaccggagcatttccgccaatattctggtcttcgggtccgaggcagagagaagctgccccacctcctcccgcgaaagatatttgcgttctccgctccaggagccaatcacgccgacagtgtactcagggatttcctccggcagtattttacaatccagaaccggatctggatcaaaggtgaaaaacacatcaatgggagtatcttctaccacgcttaccccgatgccgtatggacctgcacctgctctgcacatcccggtagaccgctggtacagctcgttaaccaatgaaagcattttatttccggatggatttggaattggatattccattgcttccttcctcctgtattctcagaataattctttacattcccaggatcgtccagacataggtgggagccgtcagggtgaagataaggcaggcaaacaggatggccggcgcagtccattcgaactggccgtgctttctatagtcaaaatacgccatgcccaatttggcgaagaagaacacagccagaacaaggtcaatcacgggaaagaccacattattgacaaccgttttgatctgggcggatgcgtccgtccaagtgccttcaatggcaccagccacatccccggttcctgccgcaaatgcgggtaccgtaaacatgatggccagcatcattaccattacgaccgcacagagcatctttttcgttttcatcatcaaataccacctttctttgctgaaaaaagaaaggccgcaggggtgttcccgcggatggatgatctatcccgaacaggccgcgaggcactttcccacggcccgtttcttttctgattttgttactgtgaatgcttacatcgtgagcacaggtccactcagttcctgtgtttccaggaactgagcccggattatttcttcaaacgcttcctttgctaacctacagaagacagagtacataggcagaccgttctcagccgtgtattcatacggttcaggtaaccgcccgcattttgtaaaaaagttcttttccgcctccataagccgctcaatagaccactcacgtacttcgttccgatatgccaagacggtttgaacatggcgctcatctcttgcggagagaagcgtggggtaacgaagttcagcatactcttgggcggtcgtgtccatatagcgttcaaatgttctgcgtgtcggcagcccatattgaggcttcatttcccttgccactggcagccttctgttcttttctacaaatcccgcaaaggcttcttcgattttctccttggtccatactgccggaagcccttttttgcacattgtcaaccgcctctttacatcaagaaagaaatatctaaaaactgcgtttgagcagcctcgaccagtggggctacttcaatgacctctggattctgttggaacttcaaatctccccggaagcccagtttcaggttactgaatgtttcggcggccttcagcagttcgggcggcgatcctggaggcatctcctgcatccactgtacccattcacctttctgaaagcggggatttagccgaaggatcacatagtcctccggcacaaacttgggatagcggccgatgctgccgcccaccttatagtagggctttccctccatcatgaccgtggcccgcatgagcgtcagggtatcctccaaagaggcgcaaaaccagcactccctatcgcccatacgcctgattcggccatcccgcaggatgctgtccagattctttcggtgcgtgtagtggtagacctcgccaggctgctcatccagtcggatgtatcccatggcttcacctcccgcctatagatcaagcggagcgatatgccaatcgtcccatagattgccccggatattcagtgaatcggtgaggttgaccgagagcatccctgccggggtccagcagtcaatgacccaggtgttgactgtataggagccatccgggtaccagataggagtgaaatgggtacgccggttataggtgctatactcgttcttctggaactccagcctggaagacgaggaactgatggacgtgcgatccaatagccgccaaaaggattcatagttgaactctggtaagtaactgactgcattctgcagggcggtggtagccgacctctgggaactgttcactctggcggtgaccacctgattgaccccatagccggacttcatggtgctgtcgctggcggtgggattcttctcgtctggagtaatttccatagcagcggaaaggctggcactgtagcggtccagatcaaattcccaccagccgtggtcgcaccagtatccgtcctcatcatcgccatgccatacccaatactcctgccaccatgggtcccaaatggtccactgggccgaggttttctccggccggtctgggaccggggagggtgtgaaggagtcgttccggtcatctgctactggattgggcggcggattctcgtccagatctacgatcttacagtggatggtggcctgtgctgatcctgggccggatacatccacatcgatggtcatgtcctgcggctcgtccggtgtagtccagcgtacccaggccaattgggaatctccgtccgggtagtagacattgctgaccgtataggtcgtcccatcaatatggaactgtacagtgaccggatcatccgggtcactttggccaccgctgacctctaccgccgtgatgacctcggtattggttcggtattcatagtcataggtgctgatctccggctcctccggctgctcctcaaagcggacgataccaagcccaagggaggacttgatgtccgagttggacacattcttattggtggggccggaccatgcgggatagcctaaatctggggtttccagaaacatggacaggggaaggtttttggccgtcagcgatcccatccaatagcggagttgtcctccaaccacctcgtcataaagggcggcctctgtcgctgttgtggcaatcatgacaccttggaacttataataggcgatgggttccagcagaattttgtattcgccgctgatgagcgtgtcataatccataccagtttcttccgcaatgaacttgacaacatattctgaacaaaaatactttttgatggcctcgatgttattacgcccgtttgtacttatgatgcgaggcattggttgtacagggtttttatagctatacccgccttgtacgggagagagcccagtaccattattgtactggattttactgacctttccgaaatgatatattcctgcagatggtgttttgttggtcaaatcaaatggtgtagtaacaacggcatggtcacttgcccgcactacggttacacgcaccccttcgtttccggggttccaactgccatgactcgtcgcatcccccatactcccgccgccaccatcaatgttaccagacccgccagttccattcgcggcataaacttgtatgcaagtaaaggaaaatatcatcacaacggccagaaacaggttaaagagtcgtttcacttgatctcctttcccacaaaataaaaagcacagccaaagctgtgctttttgaagatgcgatattactttatcccattatgccaacctgagtattgatatctccatcactatcgatacttccaccttgatttgcgcctgcgttgggaacattatcgaaaccaggcaggccgccactggtgttggtggagggctgttcagggggaggcgtcacattgttgtgatcttgcggctcaggagtaccctcgaccggagtcccatccggcgtcttggtggggtccttcagttcatcctctgtatattccggtttgaccgggtccggctgaatggtctgctctgtgccggtaaaatcagcgccgtttccatcatcggtgttggtactggcatccggggtttccgggttaacggtcacattatctcccggcttctggtcatccccggattctgcgggaggcggggtactgctgtccgggtccaccactacatcgccctgctgggagctgctgggcgggagcaggtcatcggtgaccttgtctttgctgaagctgcttgcgatcacagcaaccaggattgcgcagaccacaagacatccggccacggtcagccacttcttggtattctccgtcatcgtttggattcctcctttttctgttgattatgcttcttgtcaaactgtctgtgtgacttcaggcggccaaggatagttcggctttaagatctgctgcctacattttcctataccgcccgtcctttgtcaacacgaaccctaccacaaacaggcagagaagtctattgggacaatagaaaactttttgaaaactgcgttaaaaccgaggggcatagcccgcgctgaccttgactgtcatccgcatgggcggcagaagctctcctccaaaagacactggaacctccaattcgatttcacagtccgccacaaaacggtcgccggcgctgtcgccggaagcgaacggtgcgttgcggatctccacatcaaggccccacacacggaactccatcccaccatcctctgtgtactgagtatggtagccgccccgataggtcagcccaaggatatcgtccaagcgtccatagatatcgccatagtccagtgattcctcaaaatctcccgccaacggctggtaggcgccggagtagccctcccggacgccatggtacacatcgtcatagttgtcgttgacggtggagatcacagcctcctgcaccgcatcccgaaccccctgggccacgatgagcagacggaaatattcgctgatgcagcacatcagcattaccagcaccagcacaatggcaataatcagggggaaggccacgccgcgccggtctttcaaaatctgcctgagtctgttcatttccagtacacctccgactttcctgtggcatctgcccgcagggtgatggggaaactgccaaagccggcaaagagaccgaggtcgatctcatgagtgagcgtgaccgtgacctcctcgttgagctggatgcggccggtatcgctccattcaatctccgggtccaggccggtctgctcccgcagggcctgttcccggcggtcagtttccggcccgatcctgccggcgatttccgcctcacgcaccagttcagtggcaaaggtatcgagctgctgtttggcaataaaggctgggaggacctgcactgccagcgcgatcaccagcatggcgcagagcaccaggacgcacacatcgatgtatccctctccgcgtcgggatctcaaaatccgtttcagcacatggttacctcctcgcctaaagtcagatccctttcctgacactgagcattatattcgctcaaaatactggagatagagctttccgatgaaagatcagttttatcacttgtcaggaattggtatagtgcttccacaggattttttggcttaaggattaaatccaagtcatcatcgtcgagttcataactgtcatggataagagcagaaagcaggctttcctttgccgcagtttcagctgaatggcgataaatttcatcggcagatagctgcttcaccctttgagcatattccttcatttcatcttccgcacgatcaatcaatcgatagatgctgcctgtatagtccattgggcacctcctctcttaaaacatcccgcccagggaatggatgatctcgtagatgatgatggacagataagtcaccaggaagcacatgagcaggacaaaggagaatacacggatcttaggcgggattttcatggcctttgccttgaggcgctggagttccagctgcttcatatcgtggctgagcatctgaaagtagtggaccccattgtcgcctcgcagcacgccgatgagtccgcggacaatgtccgaaagcagcggagagttgaaccgggcctcaaagcgggtcagcgccgcctcataggagccggaacgcatatccgcggtgaggacatccagttcagcggagaaaacaggaccggaattctgcttataatgctcaatcatgctcagcacatcccggctggcggccagttcttgggtgatggtggccacgaaccggggcagttccgcctcaatctcgtccctcttggcagagagtttttcctccgccctgcgaatctctttgaaataaaccgccaccgccagaagaacaactatcaacgccaacattgggaaaatcaacaggcacggaatcaccgtcagcagcactgcaccggtcttgaccatggcaaaggcggtgtactcctccggtgtcatgttcagcccagcagcggccagcgtatttttcagacggccccgcttatactcatccatatggatgtgtggggccagcttgatcgcccagcccatgagcagggcctccacactgcgggcctgcttcttctcctggcggcccaccgagagcatggcacgctgggtggccagacgggggagcctgagcagatcagccgtcaaaagaaacatacccagcgcaaggaatatgccaaataaaaacagaaggaaagtcatggttgttttgttcacctccacataaaaacagagccagtacacgacagatgtgtaccggccctgtttttcttcttatgctgtattacaaggcactctttctatagcattattgcatcacatctaactccgcaacaaatgacggatcaaagtcatcccgccagtttcgatagtcaggatacagtcccaaaccctttcggatgagctcccggttttccggggtgtcaatatagataccgtccgggatgccgtccatcccatagatgagccggaccccatcctgctccgctgcctttgctgcttcaaaatctccatcatagagcgccatgtcatcgatgcgttctacatggagggcctccggaatataggaaccatggttgatcgttgcggtaataaaatagcccttttcctggttactgatgaggatcacctccgatactcaatgggctgggtcagcttgatgaccgctgcggtgctgatgaacatcacagcggcaatggctgccaacagcgcctgccccagcggggtgtgcatcagaacatcgtaccagtcctgattgagccagtacaacagcgggatattgccgatgaccagcacctgcatggtgataaactccttgcggggctcaaacaccagattctccagctcaccgttgacgatccgcatatcggagagtttagccacgatgggagtcaggatggtcttgagcccccggtcgtgtcggcaggtcagcagagcggccacccactcccgaaacacggcgttgtcgatcttcgtccccatgtcctggagggcggcgtccacatcggggtccaccagcttgatccgggtgagaaactccacaaacacactccggacgggcgggttgagatagtcaatgttttcctccactgccgtctggatgtcctcattgcggagataagctgtggtgatgatagagagggcggtttccagttcagcggcaatgttctttttgtagtgatttgcggtcagacggataaaccagaacggcacgaacatcatgcccaccgccagcaccggcaccaggaagaggttgcccagcgtcagggcgaaggcggcccctaccagaaaaagaagcagggacagggcgcacaccatgggaaacttggcggcccggccagtcatccgcagaatggtctgtgtctcctcgatttcccggcgcagaaaggatttctttttgcgccgtgtactctcattaacctccgaccggatgcttttgggcttactggtgattctgcggaacaccccttcagtgaagtccataggggagatgtgtaaaaggacaaaacaacctgtgatcagccctatacaggcaatcaactggatcagattcatacagattcgcctccttccttgccggtttcaggtttggcaggcggcttggactgtgcgctcctggtcttcggagcgggcgttgcctgtcctgcctttgccggactggagcctgacttacccttagagggagcggactttttgcccacgagctgagtcagcacctcctgcggcataccattgtcgatgaaccgcttctgcaggctttccgagatggggttgaccgcctcgtggcggcccttaatacggtatttgccgtcctccaaccggttttcttcgattttgaagtgataaagggtgttgtaccggcgctccccagtgggcaggatctcacactccatgatctccatgattttacggctcttatcctccagctgcttggcgaacaccacgatggggaatgcctcggtgaccagatccatgagggtatcgtcggccatctcgtgcttacgcttgcagagggtgaccatacgccgccatgtagcctgggatgagttggaatgaatggtggtcaacacgccgtggccagtacgggcggcctcctgtgcggcatacgcctccgcagaccgcatctcgcccacacagatgatgtcggggtggtaccgcagggccatgtccagcagcatatcctgatcgatattctgcttggcgttctcgctctcacgggtgatggtgtggatgacgctgttgcacacccggccatctttctcccgcaccaggtccagctcacgggagccgttctcgatggtgaaaatacgcttgttgtccgggatggtggtcaggagccagcctgccaccgtagtcttgccggaaccggtggccccggcaacgcagacggaaacgccgtaacgcaggcaggcggccagaaagtccagcatggggcctgtggctgttccaccttttacgaagtcctctttctgcatattctgcgggttgacgatacggatggatgccgtgacgcccacatcctcgtccaccaaaggggtcttgaggaccgcgatgcggatgttcttgctgagatggcccaggacggcgggactggcattgtccagcaccataccgctgacatggagcatacggcggatcacattgacggcgtgttcagggctgtcgaaatgttcctccagcttgaccgtttcgccattggcgtacaacacctcgatatcccgccaagagttcacattaatctcctcaatgccggttccgaagatgtacttggtgagcaggccgaactcggccatctccgtgtagagggcgtccaccagctggtcgccggaatagcctttgactgcgatgcgccggtcctgcacatatttggtgatgtaccgtttgatctgggccttggcgtcttcatcgccgccctcggtgatgagggcggaatacttgccggagatatattcctgcacatcctgcaggacggtgttgaaatcctgcccttcattctccggggtgaagaagagagaatgcgcccgatagccgcctgcagactctgtattcagggaccgcctggggagatcctccgccatgttcacgctatctgtgggatcagcttcaacccctgtcccatcatcagctggggcgtgacgcagcggctcatctgcgggctggggttctccaacgccggcttcatgctgattctgacccatattgccgcttaccgggcagtccgggccgaaatagagggggagttcttttttccgcccgtccggacctgtcgtgatatgtgttgcggcggctttctcagcggacgctttgggagcgaacagggactgacttcgcttctcgcctaacacccaaacacctccctggcaatcttctcgatctccttgcggaatacccggctgtccttcatggataggtccgccagcaggttgccggccagatactgtccctccagctccgccgaatggggcagcgtgaaggccactgtccccagcgcctgactcatgtgatccccggcctgctgggactttacattgctggcggtcttgtactgcttgtccgtatcccatttggcatcccgcaggaggggaagttggctggacaggtagctgatgctcttgaggtcggcgttggccagccgcaggacggaatccgcctccatgagcgccacagcggagaggatgtcgttggcgatgtaactgccgcagtcaatgaccacataaggagcgatctcccgcaggcagtcgatgagctcccgcgcctgcacctcgttgtaaggcgggtaggtgtactcattctctcccttgagcatccccagcatggtgaggtaacccaggcgtttgtgggtgaccaggttgttcttgaccagattctccgacacatgggcggcggccaacacgctcccgagggaacgctcgcactccagatctgccgccgggcagatacagggaagcattggggctgtcatgtcgcagagaaggaggatcacattccggcgcttgtcggccagatacttggccagccgcacggccacggtggtcttgccgctgccggggctgccccacaccgccagcaccccgccgctctgatccttctgctcacaggcgtcctcctggccacttcctcgggaaaaaatacccgctttcttgaagttcagcatcaggccacctcctcggttttcgcgggcgcctccgtttctgcggtttcgctggagtcagcggcgggttcggactctgcgggattctcctgtggtttctcctcggggtccggctccgggggatacaattccagaatgatctcgtcttgagaggtcaggaacttgtcggcattctcccggtcgccccggtagaccagcgccagatggatggtcccctcggcctccagctcggccaacactttggcctgctcgggggacaccagcagggtgacagtatcgggcagttccttgtcatcctcctcgtccacaggctcaccggtgttggcgtcatagccggaggaggcggtaacactgataatctccacatactgcagctcagcggggacaacggtctggccctgctgcttgtagtccggggcgatcaccgacacaatgtcgccgctctgcagcttgccggagagcccctccgcaaaacttttgatggacacggagatggcctgctggctcccgtccaggctgtacaggtaggcgttttccgctgctggggcgtctgagagtttggaagggatgatatagtcgcccacagccagatccgcagtagcgtatttacccacggcgctctctttctgccgaaggacatcctctgggagattatagccgcccacctccacgatctgaaccatgctctcggtgatctcatcgccggcccggatgggctggactacccgcacgatctcagctttctggctgacgctctggttgaacagcggggtcagaccgaagcagatcagcagggagagcaggatgcagattacaccgaccacggtgcgatttttcaaaaaactcatactggcatttcctccttgatttcatgttgggtcggaaagtccgggcattacgcccggaccgatctggcccttctgctccgcttcaaccggggcagaagaatggcggccgccgtcaggggcagggtcacgccaacgatggtgagcacagtctttctcgttacatggaacttcttcatagcagtcaacctccaaaacagtatagtgcggcaaagccgatggataaaaatggtcccagcggcagcgcagcccgtgtcattgcgggtagcggatgatgaatgaatttttgaaataacatagcggtgcagaaatacagcaccgccagcagcagacccagcgccatcccccagatcccccgccaaaagcccagcacaaagccggccgcagcagtgagtttgatgtcgccgccgcccatgcactccggccggatcagggcggcaatcagcaggggcagagccgccagcactccaaaaaactgggcggggctgaaggagatcagccccgccgcggcggtcaaaagacagaggaaatccgggatagtacgcttgcggcagtccaccgcagaggcagcggccagtgccgtgagaaacaggaacgcctgcaccgggtatcagcccttgtagtcaaacatttcctctacgcgctcggtcacggtgggcaggacggtgtccccgaacagagtgtagaggccagccaggagcagggcgcccagcaccacggcaatcaggatcttgatggcggtgtcgatgtagccctcgccgcgagtgttgcagagaggggcggacaggtgggcacgggcgcaggtcatggcgcagtgggccttgcaggtcatcgtctttacggtgttggacatcttgttgaacatcttcttcatagagagttcctcctcaaaattttagattgttgattgttgtgtggtcagtgggtcacatacccatcttctgagcctgctgtgccgtggggtccggcgcggactggggagagcggttcatcccctgcgtcagtgcctgctggtaggcggtcacgacagccgattccagttcggcgcgtgcctcccgtgtgtacggaaaacagatgtccttgatttcacccttgctgttgatctggccgggcatggatacaaacagcccattgctgccctccatgagcttgacgccccggacggcaaaacagccgttgatgttcagcgatgcggtggcccggcagggaccgtcaaactggatagagtggatacggacatcatactgcatgggaaggacaggagtatcctgctgggaaacctctccctgggggttttcacttgtggtctgcgcttttgccatggtgggttcctccttttctgaatataaaaaataagtggcttttccgctcttgggtcacagggtcatggtcatgcctgattcctgctccggggctttcagttggacggggacgatagctgtgcggtccacatagtagaactcgctgccggaatcgtcgtagagttcgacaaggtctgagatggccagcggctgtccgtcgctgcccagggacctgcgacagaatgcctcccagatcccatccagactgttggtgctgacagtgccgtcaaacactgcctggtaacgggtaaggtcaggtccgccatattcaccactcatgcggtccagcccaatgaagcgcatggcggcgggagctgaggggccgagctgccagatacggcaggatttcagggctggcccgttgtctgctgccttctggtatccaccgctggagagacggtcatagatgccgtcctcccaccggacagccagccccttccttgccagccagtcctccaactcctcacggcggaacatggagtccgccaccactccttgttctgtcctgtagcccactggattcccatagtagagcagacatcgatttttcatttccacacttcgcatggcggcatatctcctttctgcggttaagtcatttccatccctcccatgcctgcgttctgcccttgaagctcctccagcttttctctggcccagccggggaggaattcctctttcagaacgccggtgaagtctgtgcggttccatctggtctgcgctccatcgcccaggcaggtacagcggatagaccgaccgacagcgtgggggctgcatccaaagccgtcatgggccagagctggttctggggcgtccagcaggactccttgagggtgtctggactgagcaccaacacccggccctcatagtccagagattcataggagttgggttcgcagtgctccggcccaaatagttccagcttgccgtatgcctccctcacttgactgataaatgcgtccagatacgccagggcggtgtccacttcaaaataacggttatgggcatcatcgggtgggacataggctttcttttgccattcttggttttccgcgctgagctgctccttgtaaggccccagcctttctatcgtgttggccaggacgaaattggtccgcttgaagccccaccgtttcagcaccatttgggatgcttccggctttaatgcgctgcggccgtcgccatagacgcggatgacggcttcgatgtcccgcgcacaggatacattggcgtggaaacttgcatcccagagcgcagcttccccaagtctgtgggcctctgactgtgagccgggatagaggtagatatcctgttccatcttgcctcctttacggcaggcgccatttgcccgctggggggatcgtcagcgggctgatgcccagctcattgagcaggcagcaaagctccaccgaaagctcccgcagttcctccgttgaggggacgatgatgagcgctccatccgcggccagaaccgcgacttcttctcccacggggatagatgcctcggataacagtgcggcgggcagattgagttccataccgctgctggtgtatccggtacactcagcgtcgtcacaggttctggtcaccaggagtctgtttgcgtcacagtcgcagatgtactggttcgctggggtggtgatgggaacttcttcccccggctcatagcccattccgcgcatgaaaaatgcaggcaggggcagagacccgtctacaccgacccgaaccgttgtatggatcttactcatcgccgtgttcctcctgcccattgcatgcggtgcgttctccgtagatgagattccccaccatcagctgttcctccagctcgcccaggcagattccggcttcacccagcatctccagcaggtagggaggcacatcccgcaggtcatggtcatatccggcctcggcaatggtgacggtcttttcttcgtcatccacatagacacagagcttggccccggcagggatgccggcttcttcccgcaggtagtctggcagttccagcatgccgtcctccagatcatcgaatgggcagccatcctcgcagtcatcacaggtgccacagactctggccagatggacggtgagctccgtggccagccggtgcagggcatccatcgcctggatcagttccatggtggtcatttgctttttcagaacgaccaccgcgctgtccagcgtgtggatctcgaccttttctccgccctcaaagccactgatcttgaacgctccgccgggaatcaaaagagtaccattgtttatctgtttgttgaatttcatcttcttctccttattacattgaaattgtagaacgggctggattggatgctcccggccattcctgtccttgttgggcagccagcccgtcccggaaggctgtcagatcttctcctgtcggcgtatagcgtcttgcttcaagggcggccatcagcgcataggtctggccaacctcggacagcagtgcccgaagatcgtccgcaaccatatccgtccccatccggcggagctgcacggtaaaggtgattcggtaatgcggctggccggggatgctgtcgatccgcatatccattcccaagttggaatcgtgttgcgggcggatatagacctgacccactacgctggggcagacctgaaggcggccctgactcatttcctcaatcagctgagccgcctgctggagcttttccagttcagagagctgttcatccaattgcctaacccccgttccagtcaaacagcgtcatttgagagggaaccgcccggctccgctcccgcaggtcatagttggcgataagcagttccgggaactgagccccattgtcgtacctctgcttgatgttgttgatacgggtggtttccatgaggtagatgcctggcctgtcgtacagcccgcggacaaaggcgtcgtcgttgtaggagagcaggaatttgccctcgatccgcatcagggcgtcccgcaggcggatgtggtcggcttcggtgaaaccgtcttcaccaatgttctggtaatacccctcggtggcatggtagggcgggtcgagatagaaaaagctcactggccggtcatattgatggagcagtttttcaaagtccttgttctcaataaccaccttggcaagcctccggtgggcctgctcgatgagcgaaaagttgctacgcatatcgtggggctggctgccaaaactggtcagcccggaggcgtagctgtagcggatgagctgatagaaccatgccgcccgttggacatcgctggcggggctgtcccgcgccaaggcggagcggatgcggtcaaagtcctcccgtgcgttgagtacataccgcagagcctccatcagttcctccggtttgtcccgcacacagcggtacaggttgaccaacaggccgttgaagtcattgtagacctcaaagtcgttgccgggaggcttgtggaacagtacccagcccccgccgccgaacacctcaatgtaccgctcatagtagagggggaacagccggacgatcaactcccgcagggccttcttgcctccaatccaggacatgaaactgttcagggcgtatcacccccatccagcggcaggcgggtctgtgcggtatcctctcgctccagagtccgatccagtccccggatggcggccgcgattccgctgatccgcctggtcagatgggcgatggtggcccgcacctcctggtccgtggcggcatagaagtatccactcccgttgctggcgatggggacgccatcccgccgcagggcattgaccatgtgtcgaacctgaatccctttgatgccgaaggtcagttccaactcccggctggtggcggcgttgagagctcccatgtggtactgctccagatattccgccagccgttctttctccatgaatgcctcctttccgggcctgttttccgaaaaagggcataaaaagaaggggccgttttcccctttcggaaaacggcccctgtgtcatattctatatcctgtttttacttcatcgaatcacccccagctcccgcagcggacagatgcggtttttgtgacttggcaatagatcggctatattgacagagcgggactgtggtgctcaggctggctatactcataccggcgctctccaccgttccaggctacatagccgtggtcggtggtcgagaggccatattgacccatattggcctctgcgtaggcagccccgtcaaaggcgtctgttatcagtctgctgggcgggatcacgccgtttcggaccgcaagttcccgcccgtatgcggccaagtccatgccgcgggggaagaactcatagtgctggagattctgggcgagatccagagccaaatccagccggtggcagtcctccagctccagcaccgcctgccatttgtccaaccagtggggtgccccctgaccctgttccgcccaaacataaccgaagtcaatggcatggcgaaccagttcgctggctgagtcgtactggtcgagaatacccgtcagctggggcaggcagcagtccacctccagcgcgatgcactcgctgaggctctctgcctgtagcgagtccagccccagcaggagttcgtccggatggtttgagtcgatatactcgccggaatccgggaagccaacccaaatcccctccatattgctccggctggccagtttaactcgtatggcatagtcaccggcgaccggctggagggtgggatcttcctctacgaagggatctgccagtttgatgttccgcacatagtgaccggtacaaaaggctccattctgcgactggtggtaggcggcccccaaatgctccgcattcaggaatggacgggcggcatccgaggaacactctatgctctccatgacaaattttccaagcgcggcctcgtctcccgcgccatagaagaggtcgtaacagtccagttgggacgcaatccgcatcacatggccgatctcttggggcttctccaactccatcgccccttggaacaggatcttttctttctctgtcatattggaaaagcgccgctccagccagtcatgctccgattttgtaacatagaagccgtccagcttgtcaaagagggcggcgttttgatctgacatcgctcacatcatctccagtccttgtcctatttcctgttccggctgaaataccgggaaaggctggccgtcctttctgcggatcagaccatactctgtgataacccccagccggtcatccagcatcttctggccgatctgggccgcctgcggggtctggaacagctcctctggtaaagcagaatacttctcacggaacatcatctccgcatagccccaggtctgcgctacctcgggacggagttcgtactggtcaatctcgcccatcaaccgtgtggcgtcctgcagactggggtggtcaaccacggataaaagcgccttatacttgaccatatccgattcgggccactcccgttctatttgagccaaccgcttggcaaattcgtcggcctgttcaatgccatcctcatcgtcgatagcgttgttgatagcatctcgcaggaaggggatcaggcaatccacacagcggaatgcacattcatccactgaggcggcatctactttttccaccgctctccatataccggcatccgctgcgggaagattcagcactgcggttttgtcgttatcatagcttgggtcattgaaaaatcccttacgcacctccagcaccaccggagcatcggagcgatggaagcaagccgtttcattggactggcacacatagatgtccttgatttctccacccagttccgcatagccgaagtcggtgaacacgccgccatgatcctcctgatgctgttctcccaacagttccagcagtctttcttgaaagccgctgccctcctctgtggtgtcaagcagagccatagcctcatttgagagcatttcatttgcgtataaaaacgcccccagttcttcatgattggaaactcggggcgcaaaacagcagatatcggtattgtaggtcaggttaatcaattggttcagcggaatgggagcgacgcggtgattctgcttgattttcaaaagagcatccatcccttttttctgctcctctgtcagtgaggccaatcgctgggcaaacaggtttaggtcgtatagattagcattccacccaatcatggcatgcgtgaggccattgtaatggatgcaggttagctcatttttgcagaagctaccgtctttgattctcgccttttggagtgcgtcgctgaactccgcaaaggatgctggcattttcattaccgtggccgtctcataagatttaggtccactgttgctgatctccacctcgaaaattgtcttatctaagagtaatccctccctgtgtagactcttgctcaggagcctcgggcggttccatgtctgagtgaacttcgtttacggtttccaatatggattccaagtctcttttccgagaaatattcgcaaaatccacggagcggcagtatacttcgccatcctttcccacagagcactgtgtctgctctttgcctcgcatctttttcgatttcactgccaggcatccgtcatcggcaattcgtgaggagaagcccttttcctttaaccgctccgacaataccgaaaaaaactgccgcgttctcccatcaagatccattttatacgcctctttctataaactcattccctgcatctcaatatcttctgcaggagcggaaggggcctcatagagtgtgcttcggccataagcgatgcggatgatatcctctgcggagtagtcggagccagcgccaaaaagatgcctgaactgcaggcggtctgacggagcaatgtaccatgtggaatactgagacttcagccctttcagggattcagccgatgttttgaaggtcagttccactccgtccttctgtaccgtgacattgaccgtctttgcgccacttttttggagggcatctgtaatcgcccgcatccgatagaccggtgcatcgctgtcctggctgagcatctgatactctgccagcaacgcatccttctttagaaactgcgccagaaattcctcctggttgtcccgcatgtactgttccgcagttgtttttatataatcctccggggatttgaggtaggagagcagggtgtcttctgtcaaggatgtataatactcactgtgaaactgtacatcgggtttctccccagaaaaaacgagggaagctgcctcccgccctgcctcggttcccttgtaataccggtatgaattgatgttcctctcactggtgagttccctgacagagaggcgacttcgctcattggaaatggccgcctcaacatagcggtcgacctcctgagcgatgcgcttcccaaacgccgtagaatcctggcattcttcttccgtcagtccggagacaaagttgggaagggggtcatccagaagatggagcgcctggtgttgccggtcgtacaggccgcagaactccaaacggtcgctccagctgatcctctctccataaaatgtttcgcatccaaagaggtaatcaatctctggcgttgcgggaactttcactactgagcccaaatgcttgcccttttgcagaactaaaactggcacagcggcattttccagccactcttgaaactcctgccggggaagtggggcctgcttttgctgcgacattacaaaatcctcccattttactgtttctgctcaaagtttgcacaacttgtctgtcccgagtatgactcttcatagtgtttggggtcagcaccaggcacatcccacccagccatgcttcctatctccatagcttgccgctggatgggggtgacgcccaggtcttcgttcaactcatccgccagttccacattcccttccttgtcgccggtatcccagtcggaggggtagtagccagtttcaccccgtttgatgcagataagctgtccggtggtccgcagggtggagaagcacagttccggcaacccctcggccaccttgggggcaaaccgttcctgttcggtttggatgctccaatcatcaggctgccacagatggacatacagctcgccgccgtccacctcgatggggcgctgctcgaagccttcgccccatccgtcagaggcttgtccacccaggtactcttttaagatggtaagctcttccggagtcagctctccggccacccggcactccgctacgccccagagctggcgattcctgacctcaacagtaaacaccgccgagcggaccttgtgatctacactgtcgtcctcaccgtaccagcgcatgaggccgctctcgttttcctctggtacccggttttttaccagagcggacagaatttgtccctcataatccatgagggtgtggccatcccactcctcaccgtcctctgacatatccccccactcgtcccgtccatagaagtccgctgtgagcggcatatacaatttgaatgtctgaggctctggcagatagaccgagaatcggtcttctcccagcaccagagccaaggtacatccattgtcccactttacatggaattgcccggcatcgtcgatataatccagtttcccggtactgtcgggggaaatgggccggggattaccgcctatctctgtgagttggatgcgggaatccttggggaactgctgccgcaagaagtccagccactctctcggtacgctttgcatttacatctctcccattctaatcccaatatccggctgatttaattgttgatagagccgttccatcgcctccgccaccacgaggtccgaccggaagctttccagtttttcgtgatccgtaaagaattgctgttcaccgctctggaaatgaacaaagtccactgtggcgataccgtccttaataacgcccagccgtttctcactggtattgctgtcctggtagatttggattgcttcctccagagtcagatcttgcctgattatctcctgcggggtattggtgtccgccatgacaaaccaggcataggtgtggggaatgctgggatctgcggctttcctaagagcctgcttcccagtttcagtcagtccatagttgcaggtacggcgtgaattgtcctcaccggcaaaatccaacaggatatcgtctaccgcttttttgacctccggatcgtctgtcagcgtttcaaagcggaagccggttgtgctgcggaagggcagttcctcccggatggcctggagcaacgccttggaatccgtgaactcctgctgttcgccgctggcgaaggttacccgacctaccacagggtgttcctgtcggtacatctcctgctggcaaagatcatagcaatagaggtacccctgatactcgccgggaaagggagtacagcgtagacagaaacggtaattttctgtttccgcaatatagccataactcctgcggtcctctgtgatggagccgccatgctgccagcagtaggcgtccatggcccccagattcttcaggagtccagtctgacgcaggtcgtccacaaatcgctgcagcacctctttgaactccggggtgttgaacctatcctcgttatggggccaccaggtgtgccagaactccttctcaccatggccgaaatccatgcggaggtggcctacagtacccagtgcctcgtccagcttttcttcggaatagaacagccccacctcatccagggaggcggggcgcagtacaaactcacgattatcctgggggtaggccagatcatgctcctcgcaaaactgctccagcgtcatttcttctcccagcagataaaatgtgccgttgacccggcgcgaagcagtaccttcatgctttaaagggattggagaaagtacggttcctgcatgatagtcagcggcatgatccaccagagtggttcgggtgctgggagatttatgtgtcccccgcaggtcatagcagtaccacccatcaggaatgatatcccgctgaatcagccagttggtgaacagcacaggttttccaagcaacgctgcgtgttgcatggagtctgtccagatgttaatgctcatttaatccctcccatattcacagtgttttcccactcgtgctggttccacagcgtatcttgtatctgcgtacagggattaatgcatctgcaacccatcttgtacttcagggaacggatcactgagctttcggagcaggccaaattcggtccttctcacaccatcctcccgcatataaaagttgcccattgcttcgaaatccgtaaagccatcgagggtagagatcagctcctcgtccgccccgatccgctccaacacctgcttgccatattcctccggatcgtccggtacacgctcgtagtcatccagttcgatggaaaacctcaaagcctcctggagcgttgccggctgttccacctcaaggacagagaggtatttcagcaatgcgccatcctcctgatccattatccggatattttccgccaactcgtccaattgctccagtctcagatccatcccctggagaggaagatattcccccagataaggccgcagggcctccacccgagtgagtttcgccatattgaggctgtccactcccagaagttgtctggcgctctccaattgctcaaaggtcgcaggcagagtgatctgcgctgtttcgctctgtacacgaacagggcaggggttttccatccatatccggaaaacgccgtccaatctctcgttctccaaaagttcaggtgtctttttctgcacataattgccgctggaatattctcctccatgcttttcccgatattcagcccccacacgggcataattgatatagggcttgaagcgatccggaaatggtgtgatccctttgttcacaaggtagatgcccaattctgaatcagacgacacattgttgacgagcatatactcatccagcctgtccgccacagtaagggccccctccaagttccagacacactccgcatccaatgccccggaaaagatggcggctttcgccggagaaagtgcctctgtgcgttccgccagtttttgtagtttttgaaactgctccgaatcttctacatccacatcgtacaggcatcggtaaaggaccggtacattgctgctcacatccaggatggcggtggctgtggtatcgaggctgattctgtccaggaaggcaaatgtctccccaatctcagcgggactggcgggcagttgcagacggacagtttcttctccttttccccggctcagagtcaacagaatcatcgttacattcctcccatctgaaattcctgttcccgctggtgctgctctgccggaccgccggccatcagctcccccaatgtcaatgtgccacagtaggccacatatcctttctccgtgaaggctcctgtttccttctccatacggagtttgccgtaacgctcataatcatagaactcctccagattggggtcatattcataatggccggagtcctggatcatgtatctgccatattcggcgggagtgcggactttgggtgcaaactcaaacagctccagatttttggccagttcgcgtatctcgccggcacactccggcttggccatctccatgaccgccgtcaactttttctgttccaaatcagacagtgcagcgatggccgtcgccatatcattcagcgcgaatagatcctcccgttgtccctccaggacctcctccacctcggatggaagcagactgtcctcataccagatgcgggcatcgtggatgttaacgcctgagcgtgcaattccacgctggagctgttgctcggagcagggcaggagcagccaagtgatttgatctgtattttccggctcctgccgggaggaaagccctaccgccagcagattcggctggtagtggtaacaggggaagtggcggccgtcatagagctgctccagtttcatcccgttatcatagaccacgccataaggggtaatccttccctcaagatgattgaggatcaggtccagagcgaacttgcggccatccagccgctcgagctcctcgattctgcagcccccaccctgcatcgtcatgtagtgctgccgcccaatggcgtccaggtcggagaagtctgtgatgaccgtggcctgctggcagcaaaaggtcagattgatgaaatcctttatatttgagacgcccaatttgcaggccattccctggaactgggcagcctcaccgtcatcaaaactgtccagccgtttggccagatagtccagctcatcaaaattgaccaatgagccaaccagcctgttcagtacggtatagaagctgtccagttcatccacccggcaatcctgccggagcgcgtcaccgatttccaatggctccagcagttcgatcatgcggtcatatttctcatcggggatagggaatggaaccgtaatctgcccatattccgggtgctgagcgctgctcagtaccgctttcagcacatagcccattctggtgcctccttactcgcatccatgaccgcctttccatatctggcaatcatggttgcgtaaataatattgtggaagtccagatcactcaccagttttgggtgtgccaaatcttctgcctccatgggtgacttcaggtcatacagccgtctggcggaataaaagatggggtaatcctgtatcgcaaatccatggggtttggatacgatgcggctgaaatcaatggaatcgtgtgaaagagcggggagcgccggttgccagagtcgctcctttgaggcgagaagatagagcgccgccagatagccaggaggcgcatcatcccataccctgtccgcaaagcggcttctgaggtggacggacactgtgtgcaggactgcctgatccggcccgctccagtgttccacagcctgaatcctcttgtgcaggccggcatgagggatgtgtccgaaatattccagaatcaaatccaggtactcaatcgcgccggacttcaaccgctccgcgatatacggacaggtgcggacttgacaggatcggcggcggtaatgcaggcagtaccggcaatccacatcctccggcttgtagcagaagcggctgaggatcatcatcccgccgccgcgcttctggaagccagggacgctcatcatcatatgctccagaccagctcgaggggtattctgagcgaaatatcttgtcatggcacactccttctttcaaaacaaaaaagcgggagctgcttatgctgcacagtgtgtgcagatgcggctcccgctttttctgatgtcacatatcaatttgtggctcctgtgcttgtccctgctccagtctgtccgccagatctgggacagtgtattcgatctttgtccttgcggtctgcatggctttgaggtgtccatcttccagctctgggccttcatccagcaggtagtctgtggcccggtagagttcagttagctcctccggtgagaaaagctgggtcttggagatcagcccggagcggacggcaaaatcctgcttggccccgcaaaaatcttcatcataataatgtccgtagctcacgccggttctgttatagtcccagatccaagtgacaaactgatagcccctgccattttccaactcccggccagccagcactgcgccgccaaaatccgccagcagatggaatttttcgctcagaccgctgatatgaagggtgggcgcagtttgaacctcctcaacataagtgtacacttcatctgcggtctgtgcgactctgtggtacaattcactggcctccggattattgcttccggcaggaaaaaggaacacatcgtttcctggagaaacaaagaggacaggctgaccatggaggaaaatctccagccgcctatcctctacattggatgattcaactccgccttctctcaggcaccgggaaagttcttcaaaaaattttttcaatggttaaacctcatttcttttttatctgttgggacgacaacaaaaaagcggagattctatcatcgaatctccgcttcaataactatattggtttttctccgggggaagggaatcaggtgtccgtcctctttgtgttttcgtatggatagaacaacgactcacacatttggtctgtgtgagtcattgtttttggtggagataagcgggatcgaaccgctgacctcttgaatgccattcaagcgctctcccagctgagctatacccccatgttgccagaaacccttgattttgctggatttctgagctattcaattttttgactttactctccgttgcgggggagcacacccggttgcttgctctcccagctgagctatacccccatattcacttgcgtcgcttgctcaccgcaactgacttggtcagtataatacaaaagcccgcatttgtcaacacctaattgcaataattttcagggaaattttcgttcccgctgatatgccttcctccaccgaggggggagggcgcagatgccctccctctttcgctcagttcagcacaaaacgcatggataccggattgtgatccgaccacgcaaagcccgtgtcctccaccacagcttgctccacggtgacgttgtccgacaccacgaagccgtccaccgtcagcacgtactgtccctcgtgatacggagcgtcggcgttgcggcagctggggacggggtccgtcccgtccagcggagccaccagcgacagattggtgccgtcccagatgccctccggcaggggctgcgcccaggtgtagccctcggcagagccgccgaagatctcctccgactggcccagcagatccttattgaagtcgccgccggcaatgcaccagttgcccttttcatattccgcctgcatatccgcccgcagcagctccagctgctccacggcgatggtaccgtcggaggtgtaggcggacagatggacattatacagcaccagctcccggccgtcggcggcggggatgcggtggacactgtaacaccgatccagatccaccagcttcatcacaccggcctcgatgggcagctccacccgccgggcctcggtgatgccgaaggaggagagggtcagcaggcccgacacggacttgccgtggggctggtccagcgggtagaacagatacggcgagtcgtagttctgcgcccaagtgtagcccagctccggcagctgcgccgtcagcatggcagcctcatccacgtggtagctgcgggtggagtcccggtccacctcctgcaacaggtacaggtcggcatcctgctgctgcaaaaacgccccgatacgctcgatattggcggtaagccgctcctcagaccacgcacgggactccgtgccgccgtccatgaagaagctgtaatcgtcctcataagcgccgaagccgatattataggagaggatgccgtactccttccccacctccacggtggcagcggcgttccgctccaccgtcagctcctgattcccgatgcggtgatagtcgatgaacacataggccacgtaccccagcaccaccaccagcagcgccagcaccacagccagcacgatcttccaagcttttttcaacaacgcttccccctcggtttacaaatttggataaatctattataatcgaaatattcccatttggaaagaggtatgatgcgtgaaaaaactggtgatccgattcaatgccccggtggtgctgctgtttgccctgctgagcctgctggtcctgctgctggacggctggacaggcggcgtcagcaccacccggttcttctgtgtataccgatcgtcgctggcggatccgctgacctatgtgcgcttcttcggccatgtgctgggccactccggttacagccactacatgaacaatatgctgctgctattgctggtggggccgggcttggaggaaaaatacggcagccgcaacctgctgatgaccattctggcaacggctctggtgacgggactggtgcagttcatcttcttccccggtacggcgctgctgggagccagcggtgtggtgttcatgatgatcgtgctgaactccttcaccgagatgcgccggggcggcatccccctgaccatgctgctggtggtggccctgtatctgggcaacgaggtggtggacggtctctccgagagcgacaacatctcccagatgacccacatcgtgggcggtctctgcggcatcgtgttcggtttctctctggcccgtgccaaaaagagatgatccctataaaaaagatgcggaagccatatgacttccgcatcttttttacgcctgcttatggagccttcgatactccgtgggcagcatggaaaatgccttcttgaattccgaggtgaacttgctctggctctcatagcccacggtccgggcgatctgagccacgctgtcgtcgctctccagcagcagagcggaggcccgctccatgcggtgctggcggatatgggcggcgatggagctgccgtacacctccttgaacagttccttcatggtggaggggttcatgagaaactgccgggacagctgctcgatggtgatgcggctgtccagatgctccgtcaggaaccgatggacctgccggatgacctccagctgctccgccggacagctgccgcagtagtcgtgctgatccagcggtggcagatggggcgcaccggacaccagctgactgtccgactggggacacgtcacctccaccgtgcgctcgatgatctggtgcagcagctgggccacctccgtatccgctgcccggtagtagacctccttccccacccggcggctgacgatgaggccgctgtccttcagctgccgcagatggtgggaggcggcggggctgctcatacccaccagtgccgacagattcatgacgcactcctcacagtgacacagtagccagaagatccgtacccggctgttatctgacagcaggcggcagagattggccacctcctgaaagctctccggctcctgaataaagcttcgcagccgctccagtcgcttccgatcctcatgatgatggggcaattctcccatggttctcccgcctttctgttccgtttggaaggacttttcgcccgtttggaagggaagcgtctttccgcattgactttctcgtcggcatctattatagtacaatcatcaagattaaacaagtgcttaatggttgaaagccgccgcacggaaggagcatttttatgaaaaagacctatcagatcgaagtggactgtgccaactgcgccaacctcatggaggaggccaccaaaaagaccgagggcgtgcaggacgccgtggtgaacttcatgacccagaagatgattgtggagtttgccgagggcagcgaccccaaggccgttatgaaggcggtgctgaaaaactgcaaaaaggtcgaggacgactgcgagatctatctgtaagataacgaaatgtgccggaggacctccggcacgttttatggaaggaagtgaccaacatgacaaagaagcagaagaaagtcctctggcgcatcattgccacggcggtactggttgccgtggtgaagatcttctccatcggcggcgtggccgggacggtgctgtatcttgcggcctatctcatcatcggctatgatattctccgcaaggccttccggggcatcatcaagggtcaggtgttcgacgagaacttcctgatggcggtggccaccgtgggtgccattgcactggccgtctacgagaaaagcggcgactatctggaggccgtggccgtgatgctgttctatcagatcggcgagctgttccagagctacgccgtgggcaagagccgtcgcagcatcaccgccctgatggacattcgcccggactatgccaacattgagcaggacggcaagctggtgcaggtggatccggatgacgtgtctgtgggcagcatcatcgtggtgcagcccggcgagaagatcccgctggacggcgtagtgacggagggcagctctaccctgaacaccgccgccctcaccggcgagagtctgccccgtgatgcagccgtcggtgacgaggtcatcagcggttgcgtcaatatgacgggcgtgctgaagatccgcaccaccaaggccttcggtgaatctaccgtctccaaaattctggagctggtggagaactccagctcccacaaatcccgctccgagaacttcatctccaaatttgcccgcatctacacccccgccgtctgcatcggcgctctggtgctggcggtgctgccgccggtggtgcggctggtcatgggcctcagcggcgactggggcacttgggtctaccgcgccctgaccttcctggtcatcagctgcccctgtgcgctggtcatcagcatccccctgagcttcttcgccggactgggcggtgccagccgggccggcgtgctggtgaagggctccaactatctggagaccctctccaaaacccgtgtggtggtctttgacaagaccggcaccctgacccagggcgtctttgacgtcaccggcgttcaccacaacaccatgccccagaagaaggttctggagtacgccgctctggcggagtgcgcctcctcccatcccatcagcaagagcctccagcgggcctacggcggcgagatcgaccgccaccgtgtcacggacgtgcaggagatcagcggcaatggcatcaccgccaaggtggacggcaccgacgtagccgtgggcaacagtaagctcatggaccggctgggcattgcgtggcacgactgccatagcgtcggcaccatcatccatctggccatcggcggtcagtacgccggccacatcgtcatctccgacgtggtgaagccccacgccaaggaggccattgccgccctgaagcaggcgggcgtggaaaagaccgtcatgctcaccggcgatatccggcgggtggccgaccacgtggccggagaactgtgcgtggacgaggtacacagtgagctgctgcctgcggataaggtggcgcaggtggagcgcctgctgaacagctccgacggcaagctggccttcgtgggcgatggcatcaacgatgctccggtgctgtcccgtgccgatatcggcatcgccatgggtgccatgggctccgatgccgccatcgaggcggcggacgtggtgctgatggacgacgaccccctgaagatctccaaggccatccgcatctcccgcaagtgtctgcggatcgtgtacgagaacatcgtgtttgcgctgggtgtcaagggcctgtgtctggtactgggcgctgtgggcatcgccaatatgtgggcggccatctttgccgacgtgggtgtcatggtcatcgccgtgctgaatgccatccgcgccctacaggtgaagaatttatgacagcaaaagggacgtccggttatccggacgtcccttttacttatgtgaaaggcttcagtgcgccttctggaacgaatggacccagtcggccttcagataatacagcagaaacaccacgcagctgagacaccacgtaatggggtatgcccagaagatggtgataatatccggccacaccttcagcgccagcgtgatatacgtcacacggatgacgcaccagcacaccagcatggtgtacatgggcatcttggcccggcccgctccccgcatcacggcggagatgctgtgggcgaaggccagcgcaaagtagaacagcgcctccgtccgggtctgccgcacgccgatggcgatgaccgccgggtcatcgttgaacagggcgatggcatagggggccaccagcagtagtgtcaatccgataagctccgccagcagcatggagcaggtgaagcccacccgtgcgcccctcttggcccggtcatactgccctgcacccagattctgccccgtaaaggtggtcagcgccatggcaaaggaggtgatgggcaggaacacaaagccctccaccttggcgtaggagccgcagcccgccatggcatcggagccgaaggtgttgatgttggactgcaccaccacgttggcgatggcgatgatggagttctgcacaccggaggggatgccctgcgccgtgatctgcttgagcatcggcagctcgaagcggatgcgcttgggaaccagccgataggggccgtccgcccgcatcagcttccggaagcacagcacggcgctgaccatctggctcaccaccgtggcgatggcggcgccgttgacaccccatttcagcgctcccacgaagatcagatccaacgtcacattggtgatggaggagatgatgaggtagcgcaggggactgcggctgtcgcccaccgcctgcaaaatgcccatacaggcgttgtagacgatcataaagaggctgcccatgaagtacaatcggaaatattggatggactggggcagcacgtcctccggcgtccgcatccacaccaggatctggggggtcaggaagatgcccaccagcatcagcaaaacgccgcagaccatggcgaaggccagatcggtatgcaccgccgcctccagccgatcatagcacttggcgccgaaatagcggctgatgataacgccggcccccacaaacaggcccataaaaaaacccgtcatcataaagatgaggttcccgctgctggacaccgccgccagggcgtccttgcccacaaattttcctacaatgatgctgtccgccgtgttatacagctgctgacagagattgcctaaaaacagcggcagggcaaaatacgccagttgcttccaaatgacgccctgcgtcatgtccatgctctggtttttgctcttcaattcggcacccctctcctttggataaaatttctttacagtccgtttattataccgccgctttttcaaaaggtcaagagacagcaacacatccccgcacattgtatacaaccgacgcacagtgccgcttttcccacgttttcgccgctttgccggatttgaacccctattttatccccttttccggcatatccccgcattgacaaattccccttacgccgtataataattataatcagtacatgaatcactcccacggaacaaaaaggagctattgtatgaacgagatctatgtagtcgggcatcggaaccccgacacggattctatcgtggctgccatgtcctatgccgctctgcggaatgctctgggcgaccgggactacgtggcagcctatctgggccacgtcagcgacgagacccagcgcctgctggatcgcttcggtcttcagccaccccagctgatccaaaatgtccgcacacaggtggcggatctggattatgatacgccgcctgccctgaacgccaccgtcaccatggaccgagcatggcacatcatgcgggaacagcgcatctccgccatccccgtggtcaacgaggacggcaccctgtatgggaccctctccgccggtgacatcgccacctacagcatgaacaccatcggcgagccacgcgtggaggcactgcccctgttcaatcttctgagcgtcatcgagggccgcgtcctcaacgacaccggtgatctggtggactctgttaccggcgacgtggtcattgccctgccccagagctgcgagaatctgctgtggaacggtcgggagcatatcgtcctgtgcggcgaccagccggatatgatccgccgtgcgctggaaaccaacgtgtgctgcctgatcctctgccagacggaggtagatcaaacgctgctggcagacgctcaaaatacctgcatcatttccagcccctacgatgccagccgggtggcccgtcttatctatcaggccatccccatctcccgcccttgccacactgacgacatcgtctgcttccatctgtcggactatatcgacgatgtgcgggaagtggtgctgaagagccgctatcgctgctacccggtgctggaccagaacgaaaaggtcgtcggcaccctgtcccggtatcacctgctgcgcccccggcgcaagcgtgtggtgctggtggaccacaatgagcgggcgcaggccgtgcagggtctggatcaggcggagattctggagatcatcgaccaccaccgtctggcggatatccagaccgcccagcccatccgggtccgcaatgagccggtgggcagcaccaataccatcatcaccggaatgtatcaggagcacggcgtcatgccctccccggctatggcaggcctgatggcagcagccattctatccgatactgtcatgttcaaatcccccacctgcaccaagcgggatgtggccatggccgagcgcatggcccgcattgccaacgtctccctcaacgagctgggcaagcttctcttcgatggcagctttgacggcaaatccgccgaggagctgctgcacagcgacttcaaggagttccacattgccgagcagaatctgggcgtgggccagatcacctgtctggattccgaggatatgctccagcgccgggaggagtttctggaggccatgcgccacgatcagacggagcaccactacgacatggtgatcctgatgctgacggacgtgctgatggagggcacacagctgctgtatgtgggcagcgacgacgtcatccgcaatgccttctccgccgagcccaaggacaacagcctgttcctgcccaaggtcatgagccggaaaaagcagatcatccccatgctcaccgccctctggggctgatatccccattccccgcacttcagtcaaggacaggccccgcctgtccttgtttttctctccatatcgtgctatactgacacaaatcacccacggaggtatcgcctatgcacatcaccgtatatctgggtgccaactgcggcaccgacccccatttggcgcaggccgtccgggaactgggagcatggatcggtgccgcaggccacacgctggtctacggcggctccaaaaccggactcatgggcctgctggcccaaagcgcactggcgcaggggggcagcgtcatcggcgtggagccggagtgcttcatggcgcaggagctgcaatacgacggtctgacccaactcatcgtcacccgaagcatggcggagcgcaaggccaaaatgatccagctgggggacgccttcatcgccttccccggcggcaccggcacactggaggagatcacggaggtcatgtcgcaggtatcgctgggccagctgtccgccccctgcatcctctacgatctggacggctactatcgccacctgaaggcccttctggaccacatgatctccgccggtctctcctcctcggagcgccagcagggcatccacttcgcccggagtctgtctgaaattcaggcgctgctgtcctgatctcccatcgggccaaatcatccccccgtcccaaggcctccggctccgggacaaaaaaagagcctgccaaactggcaggctctttttgatgaccaacttactcggtaacgaagggcagcagagcgatctgacgggcacgcttaatggcctcggtcagctgacgctgatgcatagcgcaggtaccggtggtacggcggggcaggatcttggagcgctcgctgatgaagcggcgcagcttggcggcatccttataatcgatatgctcgcacttatccacgcagaactggcaaaccttacggcgcttacggccgttgccacggggcgctctattttcacgttccatagccatggaaaattcctccttataaagatttcatgtgccttggcacatcagaacggcagatcgccgtcctcctcgtcgatctcggcaaaatcggacgggccgcccaccggggcggaataccctccggcgggagcaccgtaggcaggagcctgagaataaccgccgttattcccaccggcaccgccgggtctgctgtcaccgaaatagacattgtcggcaaccacctccgcacttctgcggttgttgccctccttgtctttccagtcacggatctggagccgcccctccaccacggccatgcggcccttggtgaaatacttggagacgaactccgccgtgctgcgccaagccaccacatcgatgaaatcggtctccttttcgccgctctgggacttatagtcccgatccacggccaaagagaagctggtgaccgccgtaccgctctgagtacgccgcagctccgggtccctggtcaggcgacccatgatgaaaatcttgttcagcattgtgcttcccccttactcgtccttgcagacgatcatggaacgcatcacgccctcggtaatgcccaggatacgatccagctccttggggaattccggtgcgctggtgaagctcatcagcacatagtagccttcggtcttgtaatcgatggcgtaagcaagacgacgcttgccccactcatccacgaccacgtcggagcagccgtgctgctcagccagagcctggaactttgccacattggcggcaatagcctcctcaccctgtgccgggtcgagaatgtaaacgacctcatagttggcggaaatcttagccatactttttgcacctccttttggacttatggccctcacgctgcggtgagagcaaggatttgcccgcatacgcaggcctaattattataccggatatccgccaaaagtcaagaagtttttgggaatattccgtggaaaatcccctcttttttgcccttcccggcagaaagggcttgaaattaccgaaggaatcctttagaataaggtgtcaaatcatcccttcggtgcatgaaaacgccgggaaaggagtccctatggagcatatcaccagccgtcacaaccccctcatgggccatatccgcaggttggccggctccgccgcctaccggcgggcgacgggggaattcctctgcgacagtcccaagctgctgcaggaggccctgctgtggcaggcggagatcaccgccgtggtgaccatctcccctctgccccggctgccggagcacatccggcaggtgcaggtgccggaggacgtcatggcctccatctccccggtaaagacccctcagggggtgcttttcacctgccgcctgccccagcttcccctgccccagactctcaccggccggcggtatgtgctgctggacggggtgcaggaccccggcaacgtaggcaccatcctgcggacgctggacgccttcgacgccgacggcctgctgcttaccggcggctgcgccgacccctacggctggaaggcggtgcgctcgtccatgggggccgtgttccgccgccccatctattccgacacaccggaggaactggcggccctgctgcaccgcagcggcctgcccctgtacggtgccgccctgcgggaggacaccgtggacgcccggcaggcggactacacccgctgcacgctggccatcggcagtgagggccgtggcctgagccgggaggtgctggacctgtgcgatcaaaccatccgtattcccatgtcggaccgctgcgaatccctgaatgcggccattgccgcagcggtgctgctgtgggagagctggcgataaggagggatctcacatggctgctctgaaatactgggtatggctcaccaccctgccggggctgaccaaccgcagcaagcttctgcttctggagcatttcccctcgccggaggacatatactacgcccagccggaggatctccctccggtggaggggctgtcctcctctcaggcggcgctgctgtcggacaagtccacagaccgggccgaggacgtgctggcccgctgcgccaagggggatatcttcctgctgaccatgcaggacgccctctatccggaccgcctgcggaacatctatgacccgccggtgctgctgtatggccggggccggatgccgctgttcgacgaggaggccgccgtctccgtggtgggtacccggacctgtaccccctatggcatctccgccgccgaggaactgggctaccagctggcgaaggagggtgccgtggtggtgtcgggccttgccaagggcatcgatggtgcctcccaccggggcgctctgcgggccggcggctttacggcggccgtgctgggcggcggcgtggacgtggtctatccggcggagaaccggcggctctacgaggacatcgccgccaccggcgtgctgctgagcgagtacccgccgggaacggagcctatgggcagccacttccccgtccgcaaccgcatcctcagcggcctgagtctggcggtgctggtggtggaggccccggagcgcagcggcgctctcatcaccgccaatacggcgctggagcagggacgggacgtgttcgccgtccccggccccatcgacgcccccaacagccggggcagcaaccgcctcatccgggacggcgcaggacttgtgacctgcggctgggacattctggaggggtaccggagccggttcccccaccggctgcgcccctcgccggagaatcttcctccggtgccggagcaggacggtctccccgctcaaaaggcggaggaatcgtccccggcaaagccggagaagaaggaaactccccccgccctgccggtactggacctgacggcggatacggcgggtctgacggacgatcagatccgcatcctacaggtgctgaccaccgatgcccctctgctcaccgatgacgtggcggagcgggccgacctgcccattcggcgggtgctgtcagccctgacggtattagagatcgacggatatgccacgcagcacggagcacggcgcttcgtccgcacggtggagatccggttgtaaaaaggaaggataagaacatggcaaaaaaagcagcccgaaatctggtgatcgtggagtcccctgccaaggccaagaccatcggcaagtatctgggaccggattacgaggtcagggccagtatgggacatctgcgtgacctgcccaaaagcaagctgggcgtggatgtcgagcacgacttcgagcccaactaccgccccatccggggtaaggaggagcttatcaatgagctgaaaaaactctccaaggccagcgacaccgtatatctggccaccgacccggaccgtgagggtgaggccatcagctggcacctgaagaacctgctggacctcagcgacgaaaaagccaagcgagtcaccttcaacgagatcacccgcaaggtggtcaccgagagcatccaccacccccgtgagatcgatcaggatctggtggacgcccagcaggcccggcgtattctggaccgcatcgtgggctatgagctgtcccccctgctgtggaaaaagatccggcggggcctgtcggcaggccgggtgcagtcggtggccatgcgtctggtggcagaccgggagaaggagatcaaggacttcgtcccccaggagtactggacgctggacgccctgctgaaaaacgacggcggcgtccccttccgggccagatattacggcaaggacggcaagaaatatgagcccgtctctcaggaggaggtcagcgccattcaggcggaggtgcaggctctacccttcgccgtcaagagcgtgaagcgcacggataagcagcgctcccccgccccgcccttcaccacctccaccatgcagcaggatgcctcccggaagctgaacatgactccccggcgcaccatggccattgcccagcagctgtatgagggcgtggacatcaccggcgagggtaccgtgggtctgatcacctatatgcgtaccgactccctgcggatctccgacgaggcgcaggcggcggcccgcagcttcgtcaccgggcgctacggcgcaggctactgtcccgccgccccccggcagtataagaccaaggccggggcgcaggacgcccacgaggccatccgccccagcgacgtggatctgaccccggagcgggtcaagagcgatcttaccagcgagcagtatcggctgtaccgcctgatctggagccgttttctggccagccagatgtccaacgccatctatgacagcgtcagcgtagagctgggcgccggagcccacagcttccgggccagcgccagcagcctgaagttcgccggctataccgccgtatacgaggagagccgggacgacgagaaggaggaaaaggcccccgccctgcccccgctggcacagggcgaggtggtgacgctgacgggctttgacccggcccagcacttcacccagccccccgcccggttcaccgatgcctccctcatccgggccatggaggaaaacggcatcggccgcccctccacctacgcccccacggtgtccaccattctggaccgggagtacgtcatcaaggacggcaagtacctgaaaatgacgccgctgggcgacgtggtcaacggccttatgtgcgaccgcttcaaggacatcgtggacgtgaagttcaccgcccacatggaggaggagctggatgaggtggagtccggaaagctgccgtggaagcagctgctgcgccagttctacggtggcttcgagtccaatctccatcaggtggagaaggacatggagggtgtttatctgaaggttcccgacgaggtcaccgaggagaagtgtgacctctgcggcaggaacatggtcatcaagtccggccggttcggccggttcctggcctgtcccggctacccggagtgcaagttcaccaagccgctggtggtggagatgccgggccgctgccctgtgtgcggcggtcggctcatgaagcgcaccggtgtcagcaagaaatccggcaagcagtataactattactgctgcgaaaagttccccgcctgctccttcgttaccttcgacgtaccggtgaaggacgactgccctgtctgcggccacaccatgttcaagaaatccggccgggggttcaagcgtcccttctgcatcaacccggcgtgtgaaaatttcctgccggaggatcagcgaggctatcccaagcggactgctgcgtccgatgggacggaaagcgggacaaatggtaccgcagcggacggtcagccgatgtccgaaactgtccaaacggaggcatctgacaagcccgccgccaagaaaaccaccacagctaagaaaactgcggcaaagaaaagcaccgctaagaaaaccggcacggccaaaaccgccgccaaaaaatccacggccaagacggcgagcaaaaagcctgcctccgccgtggcgaaggccgctgcggaacagccctctacggaggaggctgccgaagcatccacggcagtggagaaggccgcagccaaaaaagcgacggcctccagaaaggcggcggccgagagggctaccaccaagaaagccacgactaccaagaaagcaacgacggccaagaaaaccactacggtcaaaaaggccgctactaagaaagctaccacgtctgccgccaagaaggctgacgctgaaacggaggaataaatggagcctgtaactgtgatcggcgccggtctggccggctccgaatgtgcttggcagctggcccggcggggcattcccgtgaccctgcgggagatgaagccagagaagatgacccccgcccatgtgaccccatggtttgccgagctttgctgctccaactccctgcggggagcggggctggagaatgccgtgggcctgctgaaggaggagctgcggcgactggacagcctgatcctccgctgcgccgacgccaccgccgtccccgccggaggcgctctggcagtggaccgggagggctttgcccggatggtgacggaggagctccggaaccacccgcttatcaccgtggtccccggcgaggtaacggagctgccggagggtgaggtggtggtggcctccgggccgctgacctccgacgctctggcgaaccgcctgctggctctgctgggagacggacagcaaaccaccctgaacttcttcgacgctgccgctccgctggtgagctttgacagcgtggatatggacagcgcctatttcgcctcccgctacgataagggtaccccggactacatcaactgccccctgtccaaggaggagtatctgtccttctggcaggagctgaccaccgcccaggaggcggaagtccacggcttcgaggacgggcaggtctttgagggctgtatgccggtggaggtcatggcccgccggggtgaggacaccctgcgcttcgggccgctgaagccccgtggcctgccggaccccaagacgggtaaggagccttacgccgtggtacagctgcggcgggacaacgccgacggcaccatttacaatctggtgggcttccagacccacctgcggtggccggagcagaagcgggtattcaccatgatccccgctctgaagggcgctcagttcctgcgctacggcgttatgcaccgcaacacctatctggactccccccggctgctggatcggtattaccggctgaagtcccaatcccgtatcgcttttgccggacagatgaccggcgtagagggctatgtggagtcctgcgccagcggctttctggtgggggtggagacggcccgccgcctgaaggggcaggctcccatcgacttcccgcaggaaacggccatcggcgctctggggttgtatgtcagcaaccggaccgtggggtcgttccagcccatgaacatcaacttcggcatcatcccgccgctggaccaccgggtcaagggcaagcgcaacaagaatgccgagttgagccagcgttctctggccatcatcgaagcccggaaggaggagatcctgtcatgaagctcatcatcgacgccatgggcggcgacaatgccccgctggaaatcgtcaagggtgcgctatccggtcagaagcgctggggcgtggacgtcaccctcaccggcgacaccgccgctattttgcaggcgctggaggcctgcggcgaaaagacgctgccccagggcatggagatcgtccacaccactgagacggtggagatgtgtgacgaccccgccacggtgttccgccggaagaaggacacctccatgggcgtggggctgaccatgctgcgggacggcagggccgacgccatggtctccgccggcagcaccggcgctctgctcaccggcgctaccctcatcgtcaagcgcatccggggcatccgtcgggcggccatggccccggtaattcccaccaccaccggtcaggcggtactcatcgactgcggcgccaacgccgagtgtaccccggaatatctggtacagttcgcctatctgggcagctactacgcccaccgggtgcttggggtagagcggccccgtgtgggacttctgaacatcggcgccgaggacagcaagggcaccgatctccagaaggagaccctgcgctggctgcgggaggcccacacggcgggacacctgaacttcatcggcaacattgaggccaaggaggccatcaagggcgggtgcgacgtcatcgtctgcgacggcttctccggcaatgtgctgctgaaaaccatggagggcgtaggctctttcgccggaagcgccctgaaagccatgttcaagaagaacctgctgaccaagctggcggccctgtgcgtcatgccgggcctcaacgccttcaaggccaagctggaccccaataaggtgggcggtaccgccttcatcggtatctcccggccggtcattaaggcccacggctcctccaacgccgaggccatcgaaaacgccatggggcaggcggtgcaggtggcccgcagcggcattatcagggatatcgaggaaaatgtggccctgatgaaggtggaacgggaataaactccacttcgagaaaatattcacagaaaaggtgttgacacacggcggtaattgccgtattatctttcagagcgatacccgaaaggaggggaatcatcttatgacgatggaagacatcttcaagacgatgcaggatctgatcgctgaacagttcgccattgatgctgacgagatcagcatggacagctcctttgtggatgatctgggcgctgactctgtggatctggtggagctggtaatggccatggaagaagaattcaacgtcggtgagatcgacgaggacgacctgaccgggctgaaaaccgtcggtgactgcgttcgttatctgtacaataagatgagctgacacgaccgtgaagaaagaacgccccgttggagtttgtccacggggctttcttttccggccggaaaggagttatgcaatgcgtactttagaggagcgtctgggctataccttccgggatcggaagcggctggagggcgctttatatcacagctcctacgccaatgagcaccgcagcttgggcattcatagcaatgagcggctggagtttctgggggacgccgtgctgggtctggtgacggcggactatctgttccgcaagcacccggatctgccggagggggacttgacccgcatccgggccgcactggtctgcgaggagagtctgcacgaggtggcccagagtctcgacttgggatcctatctgaagctgggcaagggcgaggaggccggcggaggccggcagcgggcgtccattctggcggacgccacggagtccgtttttgccgccgtgtatctggacggcgggttggaggcggcccgtgcgctcattcaccgggtcctgctggataaggagcgggagacagatgtggaggagcgccgccgggactacaagacggagctgcaggagttggtgcagcggcgcagcaaccagacgctgcaatatgaattggtctccgccagcggtcctgaccacgccaaggtattcacctcccgtgtgctgctgaacgggcagcccatcgggaagggtcagggccacagtaagaaggaggcggagcaggccgccgcccacgccggtctgaccaccctgatccgggggtgagggcggccatgggcagatatcatgcgatcctgtttgacatggacggcaccctgctggacaccctgacggatatgcaggacgccgtaaaccacgtgctggcggctcacggcctgcctctgcgaacccttgaggaggtgcggcgcttcgtgggaaacggcgccggaccgctgatccaccgggcgctgccggagggatatcctcaggagcagaaggtgctggcggagtaccgggcctactatcaggcccacaactgcgtccaaacctgcccctatccgggcatcccggagctgctggagcagctgcggcagcgggggctgaagctggcggtggtatccaacaagccggacgagaccacccgtacgctggcggcccggttctttccggggttggcagcactggggcagcgagacggtatcccctccaagcccgcaccggagatggtgtggagcgccatggagcagctgggggtggacgcccggcacgccctgtatgtgggcgacagcgaggtagacgtggagatggcccgccgggcggggctgccgctggcggcagtggcctggggcttccgggggcgggcgctgctggagcaggccggcgcccggtgcatcgtggacaccgttccggagctgttggccgtagctacggagtgatgggcgggaaaattgctcttgcaatccgccgccacttcggctataatagtaaagtctcctctgccggtgtgatggaattggtagacgtagtggactcaaaatccaccgctggcgacagcgtaccggttcgagtccggtcaccggcaccaacagcacccgcagacccattgggcctgcgggtgctgtttttcttttgcggttccggcagctgcataccggggaggatatgcttacttctcctgcacttcttttccgctgaggtggtggatctcgatctcgaagagctgggcggcagcgccatcctgccggatctcctcgtccgccagccgctcctccgggtaatacttcatggcgaagcgcttcagcagcgccatagtctccgggctctgctccagcaggcggcaccggccgaacaccacgacgctccggaggtacggcgcccacgcctcctcccggatcgtctcactgccgtagacggtgaagcacaccttatcgcaggcccggatggcctccgccttgtgaccggcacgggcgccgtggaagtaaatcttctgcgcctcccggtcgtaatagtagttgatggggatggcgtaggggtagccctcccggccgtttacggccagaatgccccggcgggcctcccgcaggagctgctccgccgcctccgcgctgatctgatttttcttcttccggatgtctcgaaacatggcttttccctcctgtttttatcgctccagtagttctgggagataccgcagtgctttttcaaactccaccccgtaccatggggcgttttcatcccggcaggtgacttggatgcacagcagcgtgaaatccaccgccagacgcagggcctcctccagcggcttgccccgcatcagagcacccacgcaggcggaggagaagagatcccccgtgccggggaaatgggcgtcaatgcggcggctgccgtattcaaagaagcgatcctccgccggggtataggccagcacgcccaacttatccgggccataggggacgccggtcagcaccacgtgacggggccccagctccgccagcttccgcaggatatccctcagccggggcaggtcgtagtcctcccggtagggggtccccgtcagcaggcaggcctctgtgagattgggtgtcaccacgtccgcctgcgccgccaagcgggccatgtggcggggaaaatcctcgtcaaagcccgtgtagagcgctcccccgtcagccatggccgggtccacgaagcgcagggtatccggccccgccagcacctccaacgcctggcagacatcctccacctgtcggggggaggccagataaccggtatagacggcgtccagctgcacttgctggctctgccagtatcgggcgatgggcagaatatccgccgtcaggtcccggcagaggatgtccgggaacatggtgtgggcgctgagtacggcggtgggcagaatggcgcactccacctccatggcggagatcacaggcagcgccaccgtcagcgagcagcggcccagacacgaaatatcctgaatactggcgacacgtttcataagcggctccttgatgcacaggttaatggattcagtatagcacatccagcaggtggtgaaaagccccggccgtaaaaagatgctgcggaaagttcagaaaaaaaggcgctccggcaactgtcggagcgccttttttcgttggaacaggccgatttagtcctttttgttcttgcgcttggtgacaagcagcaccaccagggcgatgatacccagaccagccacagccagcaccacccacagggcggtcatgttgctgctgtcgccggtggcgggcgtggtgggctgagacggctcagcgggcttctccggcgtggtaggcttgccggaatcgccgggcttgccgggctccacgggagtggtaggctcctcagcgccgcagcggctgcacttgccatccttg

SEQ ID NO: 12436 - DNA, 20205 bp, Unknown
  gut microbiota DNA sequence
gatgacctccgtcttggtatcggtgtagtccttaccatcgaaggtgaccttggcggtgtaggtgcgaacgccggtcgactcgcaggtggcctcggtggtcacctcattggtgacggttgcgttcaccgtcttcacatgggaagtatcattgccacaagtgaaggtggcagaagcggtgaaatcatcgttccacttccacaccggggcgccataggcatgaccggtggcggggatgacctcggtcttggtgtcggtgtactccttgccctcgaaggtgaccttggcggtgtaggtccgcacgccgtcggccttgcaggtggcctcggtggtcacctcgttggtgacggtggccgtcacgttttccacatgagcggcgttgttgccgcaagtaaatgtggcagaagcggtgaaatcatcgttccacttccacaccggctcgccgtaggcgtgacccgtagcgggcagggtctccgtcttggtgtcggtatactcctcaccctcgaaggtgaccttagcggtgtaggtgcgaacgccgtccgtctcgcaggtggcctcggtggtcacctcattggtgacggttgcgttcaccgtcttcacatgggaggtatcattgccgcaagtaaaggtggcagaagcggtgaaatcatcgttccacttccacacaggggtgccataggcatggccggtagcggggatagccagcttctccagcgtcgtctcggtcttgccctcgacatcgctgaacagcttgccgcagacggagcaaacccagtgggccttcacaccggcggtctcgcaggtggcaggcactgcctccacggcggtcagggtgtggcccttggcggggacaggctccgtcttggtgtcggtgtagtcctcaccctcaaaggtgaccttggcggtgtaggtgcgaacgccgtccgtctcgcaggtggcctcggtggtcacggcgttggtgacggtggccgtcacgttcttcacatgggaagggtcgttggcgcaggtgaaggtggcagtggccttgaaatcatccgtccacttccacacaggctcgccataggcgtggccggtggcggggatggtcagcttctccagcgttgtctcggtcttgccctcggcatcgctgaacagcttgccgcagacggagcacttccagtgagccttcacaccggcggtctcgcaggtggcaggcacctctgccacggcggtcagggtgtggcccttggcggggataggctccgtcttggtgtcggtgtagtccttaccctcaaaggtgaccttagcggtataggtacgcaggccctccttatcacaggtgggctcggtggtcacttcgtcggtgacggtggcaggcaccgtctgggtatggccgtcgtcatccgtgcaggtaaagacggcggaggcggtgaaatcatcgttccagctccaggtgggctcgccatagttgtggtgctcctccacggtgatggtcacagtggtggtgggcatctcccactccacgccggccttgccgtccttatcctgatactgctgccacttggcggtctgattcttcagattttcgggcaggttctccagcttgtccttcaccatctgctccaggttgatgccgatggtgatctcggtgtcatccgtggtcaggggatccgtggtgtacttgaggtagtcggacacgtccttggtggcaccgttggcataatgggcggtgaccttcaggcccgtggcatcaaaggtatcgtccttgctgtaggtggtgcggtccggctgctgggtgacctccagctctgtgatacggctgctcagccgcatcagctgggcggagtcgttcttgaagtagatgttgccctcttcgtccacaacggggctgcaaatggcgtactgcgcctgcgcaccgtcaggggtaaacagcacataggccgtctcgatggtgtgctcctcgccgtttttactgtaggtctccatggtggtgtagtcgtgatccacctccgtcatgccgggcttatcccggatgacccgcagcttaccgggggtgaagttatcgaagaagtagacgtagttatagccgtccccgttctgataggccgtggtcagcagaccgctggtctgaggatagcccatggtgggcacggagtaggcgatggagaaggtggacaggtccaccaccgtgatgttgtggccggaataggcaccgaactggctggtaccggacacgccgatgtaagcacggccgttggcgatcacgggggtggaggtactcatgggaggcgcagaggcactgtcggcgccattatccagatgcaggcgacgcagggaacccttggtaaaagtgccgtcggcgttgaccttcacctgatacaggtcgccgcccttggaggtgaagtaataggcctcggtctccgtatcgtagcagacgctgctgcggaggtcgcctacgttggtggcctgcaggctgtcaatgagcttgccggtcttggggttcagagacagaatggagccgtagcccgtggtatagccattatctccgtcatcggtggtcaccagcacgaagtcgctgttgacgtaagcaccggcccaatagaagccgttgtgggtataggtccaggtggggagcttggcctcgttggtcttggtggcatcctcatcggtgacagagaggcaggcaaagttggcctgcttggtctcgctgttccagaagcccgtgtagatatagccgtctgcataggcgatggggcagttgggctggccgcccagcgcatcctgatagacccagagggactccagcgtctcggcgttgaaggcctgcacccggccattggcaagaccgataaagatcatgccctcggcataggtggcggagttgatggcaaaggaggagccgcctaccatggtgccggtcttgaggatcaggccggtctccttatccaccttcatgatggtggtaccggaataggtatagaggtagccgcccacgatgatggggctgcccacagcgctgccgctgtagccctcgcccagcttgttggcccacaccagaacggtgtcctcagcggtgatgggggtgcgcacatccaccacgccgttgttttcatcgttcttgcggaacaggggccagtcggtgggcagttcgatatccttcagggtgctgtcgggggccttctccagcttgatctggatggtcttgttggcctcgccggcggtgaaggtctttttctggcccacatagccgtagcgggtcaccactacggtgtagctgctgccgctgtcgagggtataggtacccttgtcccccggcaggatgcggtcgccgttgacgttgctggtaaggaacaccgtggcatcaccgggggtcgtggtgatggtggtctcgatgggagcctgcttattgaccttgatggtataggtcccggcgatgctgccggtctccttgtgggagacggtaaccgtgatggtctccgccgccgcagagcccgccttcagggggaccgccacggtctggcggtcagcagggctgtggtccttatcataggtaatgctctggctccagtcgccgcaggccaccgttacggtcatatctgcatccatccggtaggaggacaggggccgcagggtcaggcgcagctcagaggttttttcgctgacatcggcggtgtagtcatacaccagcttggtaaaggtggccttggtggtgtcgccgccctgattcaggggaaccacaacgtcgttctggtccttggcggacagggactccagcgtcatggtgcggttgacatggatgaagtagtcctgatacagggtagcgccgttgaccgttttggactgggctaccttcaggcgggcagtgttgccatagccgcccacggccatgaactgcggcggtgaatagaagcgtgtgtcggcagtagtcaccgctttctcgtagctgttcgcagagaaattggtgtttgaatggccgtagtagtatatcgtagtctgataagtgctatccgctctgacacgctggagctggaagatggaagcgttggattccaccgtaaaggtgtactcatgggtaccctccgtaaacgccggggacatatcacacaacggtgcattgttgccggttctggcgctcagacccgtcagccagtccccggtgacaggggtgggaacatcgtaggatctgttggggacggcctgaaaggcacattctgcgtggtaatacacgtccttggtggccagataggtataccccagccccagcgtcagcgtatagatgtccgccgtaccggtggaggaggtgggggcgatgcagtcgccggtctgactgtacacctttacatccagcccctcctcgtgattcagtgtcacggagacggtagcctgcttctgcaccttcaccgtataggtgacgctctggccgttggccgtcagcaccacggggatcaggtatttcttgccggaatcctgctcacagtccgccagattcaccgtcacgggggaaccactctgggtggacttcccggccacggtgatggcagtgccgctgcacagagccgtgggggtgatcttcacctgatcctgcgacgtgaccacgttgtaggtatcggtggccctatcataggtcggattcagggtcagtccggacacggagtccgcagccgccagaccgctgaggctgggagtgcggatcaggtggagcgtgtaggtctgatactgctcataggtaccgcccttcagacgggcctcgcacaccacgtccgcatttttcaggctgttggactcgacactatccgtcagggcagttgccttgctcttccagctgcgggccttgttgccgttggggtcgcccgccttgtagacacggatgttggtggtatccacgccgtcacccggctcaaaatagggatagagcgagttgtacgcatggtccgggatcagataggtaccctcggaggcggtaacgtcctgcttgggcatctcgccgtaggttttccagtaattgtcgataccaatgcctacggacttgatccactggccggcaggcagctgggcggtgagggtggtaccctccttcacctccagcgtgccacggacatggcggaactcgccgtcggacaggtcaaaggtataggtggcaggaatcaggtccacggtgttggtgttcttcaccgtgacaacggtgccgaactcactggtgaacacggcttcgccgggggtgatggcctcgccgcccatggtggcgctgatggtcagcggtgtggtcttgccctccaagaacttggcgtgcttgtcgatggcgctgaacagcgcatcgttcagggtcttggccgtggtgtccgtggcggcatagaagcccttcacggcggcatcataggcctcctgagcggccttgtaatccctcaggccgttggtagcggtgttgtagaccgccatgttggccgccagcttctggaggtttgctccatggctctggctcgagttggtggtgaaccagatggccgtcaggccatccgccgactgatccagcttgtatccatcctcgtcgtaatggatgctgaagttgtcggtggtgccatcgacagcggtaatgtatccgctgtcgatgccgctgaaggtgtggctgctttttttcagcacatccttcaccgtgtcgccggagtgataggtgacatactccggttcgatgaggaatccgttctgcgtcaccgccatcagggcgatctgctgggtgtccgccgccagcgccgccgaaggcagcagcgacagcagcatcaggaacgtcagcagaaccgacagaaggcggtttccgagatgtgtcttctctttcatctttcatactcctttctgttcttttatgattcaaatcacctgacaggtgaggaatctctgtttccagcgtctggccgccgggacacgctcccgccacagacgctccgtcccctccagcagcttctgcgcctgttggcgttggggctcctcgatggggtggtcgctgaaccagacctcctgctccagcgccgtcagctgccgggccgtctcgtcgcccagcagagccgtcagggcctcctgccgccggggggatgcctcgctccacgcttccggctgcaaggccgtcagctgccggtgcagggcgctgagcatggcctgacaggccgcgcggccgtcggggtcctcaaagcgcctgcgctgccgcttcagccttcgccgcagcagtaccgtccgcagcgccatggctgccagacacaccagcaccagtgccgccaaggccagcagcacgctctggataaagatccgctggctgtggtcgtcctggggctcctgagagatgtcggtctggttctgttggggcgtttgatcctgccccgtgtaggtcgtgccgttctcgttttccgccgggtcgccgtcctccggcagttggtagctgatgttctcctcgtagccggggacggtgtcgaaggggatccagcccacgccgtccagatagtactccgcccaagcatgggcggcccgctgggtcagggtcagctgcgccccgtccgacagggcctccgcctgctgccgggtcaccacatagccctccacataccgggccgggatgccgcagcagcgcagcagcagcgtcgccagcgtggcatagtggacactgtacccctgtcgggcgccggtcagcagccacgccgccacgtcgccggtggccggggtgaccgtcccctcccggagggtcaggttggccgccagaaagcggctgatctccgtcttggcctgagtggtgttccagccctggccgggggtgaactgcgccgtcagggcgtcgtaggtgtcctgcggcaccgtgagatagtggtcatagacccactggcgatagacgctctcccccgtccgatagtcgctgtccgtctccgcctgcgccagctgctgctggagcaggtagctctcctccaccgggtacagcgccgcctcatagctgcgctgagtggggtcggtcatgccctcgccggtgaggtcacgggcatccagtgcgctctccagcccgtcgcccccgccatagggggtataggccacggagcggcaggcgcccagcacctgaatggtcacatggttctcgctctcggcctcaccgttggcctttgccagctgctgggccgggaagaaatagccgctttgcaggctatacagcatcggggcctcctccgtcaagcggcgggccgccagctgctgccagccggtgccggtgtactcccccgccacatagccccgcagatacaggggcgtccagtgttccatggtcagccgcagcgccggctcctgtccgggggaaaaggccccggagccggagatatctccctccggcaggggatcggcggcatcctcatagcgccagcggtgcagggccttgcccagccgccgccccagcgccgtgggggatgcgccgccggagaggccctccggcagcagtcccatcagcagcaccagcaccagcgctcccgccgtgacggccttggccctgcggcctatggcgctgccctgcacaaagcacagcagcacccccagcaggaagcaggtaaaccaccagccccccggcacaaggcccgccagacgcagcgccagcagtcctgctgcgcagacggccgccggccatatgcgccagcgctgccgcagcacaaggcccgcggcaaggcccgttacagcccccacaggcagcagcatccaccagacgctgcccgcccccacatagggcggcgtgtaccgtccggtctgctgaaagcgccactgaccccacaagtctcccagccccgccagagcagcgctgatgtggctccgcagcagcacgcccgccgccagcagcaccagcagcaccccgcagagggcagcccgctgccatttccgatcccaccgcagcagcagccccgccgcaaggcccagcgccgccagagcgcccagccccagcaggcccagcatcggctccgggcgcagacactgccacagcaggccccatatgcctgccagcagcagcacgcccgccgccgcatccgtggggcgcagaggcctgaatggggccggcgtcgtatcaaattggaatgaaacagtctgttttttcaccaaaagctcctaattccacatccattttcccagtatttcccgcatatcctccggggtaaagcggcacacgccctccccggcgcagggttcatcgctgcacagcagcacgacggcatcctccggcagctgcccgtccgccggaagctgggtacagcagtacagcagcttcccctccggacgcagctccggcggctgcggctcctcctgtgccttgcttttcagcagtgccgtcaccgcttcgggcagctgttcctccccggtgatctcccggacagaggcggtctccccgctccacatgagtcgaaagggctgatccacataggcctgacacagcgacaccaccgcctccatcagaccgtccgccagacggggcggggccgtgcggcgctccacatagatggtcaatcggtgatccaccggcttggccgcatcccgcaccatgtagcgtcctgccttggcggagagcttccagtggatctgccgcagactgtcgccggggacgtattcccggatctgaaaggtctccgtagggtcgctgcctcggacgtccggggcgtactcctcgcagtccgtctggcggcttatggccgacaccgggtctgcctcgatggggaaggtatccggcatgacgcaggtgcgtccctgtaccgtgcaggggatcctcaccggcagcacgcccagcagatcccatagcacaagctccgccgcctgcatcaccagacagccgcagcaggcactctgcacctgccacgctccccggccctgatgcagggtcagcttctcccggtgcgtctctccggtaacggtgttctccaccgataccgtgagcctgccccggccgaaggggacaccctgccgcacctccgccgtcacggaaaagggcttacccttctccgccgtcacggggcaggtgagccgtacctgcgaccgcttccttgtcagcagcagtgcaagccagcccgccagcggcgccatcagccagcacagggccagccacggggcaggcgcccaaggcgtcaccagccagcacagcaccagtccggcctccgtcaaaagccacagcaacgtgctcatgcccgccgctccgacagcaccggcggctgggtctgtgccagcacctccgccacgatggcctccggtgtgtactcgttgaggcgggccttggaggaaagcatcaggcggtgggcaaacacatactccgccatctgcgtcacatcctccggcaccacgaaatcccggccctctgcgaaggctctggccttagccgtgcggcacagggccaaagcgccacgggggctgatacccagcttcagcaacggatgggtgcgtgtcacctccgccagccgggcgatgtaatcatagatctggtcgtccacatggacctgacgcaccctggcaatggcggcgatcagctcctcccggcgcatcaccggctccacctgctccagaggctcctgctggctgcgctccctcaggatgcgcacctgactgcccacatcgggatagcccatgctcagcttcatgaggaagcgatccagctgggagttgggcagattctgtgtaccggcagagccaatggggttctgagtggccagcaccacaaagggggccggcagatcgtgggtcacgccgtctacggtgacatgaccctcctccatggcctccagcagcgccgactgggtcttgctggaggtgcggttgatctcgtcggccagcagcagattggtcatcaccgcaccgggctgatacaccatccgcccctgctccggcagggaaaagccgatgatatccgagggcatggtgtccggtgtgaactgcacacgcttggtttccagccccaatgccttggaaaaggccagcgccatggtggtcttacccacccccggcacgtcctccagcagcacatggccctgggccagaatggagatccaaaccttctccaccacatcgtccttgccgacgatgaccttccgcacttcccgcagaattttctccgttacttcgtacatattttcctccgcttgctccaaatcaccatgcctgcagccaccactaccacggcgacgcctgcggcgatccatactacggcgccggggccagaggtagtctcctccgccgcaacccgcagctcatatgcctgtgccgggtcctccggcgtgatctccagggaaagctcctgcatccgatccagcagcgccccggcagcgaacacatagctgcgctcggcggctgggatggccagataccgggtatacagagcctgcacctcctccggcgtggccaccgccacatccgtcagtgcctcgttcagggccgtcacctgcatctttacatcctccggcatctcctcccggaagtcatacaggctccggcgggcggcggacagccgctccatggcctcctgcgccagaagggcctgctccgtggccatgacatcggagccgtccgtcagaatatggcggaaggtgccgtcgtccagccggtagcgcatcagcccgtccacggcgctgatgccgtttttcacgaaccgggcgtccgtggccgggtccactcccaagctgcacagggcgatgatgacctgcgccgtgctctccagattggcggcgtcccagctgatgaaatcgccctccgccgtctgctggtcagacagccacgccagcgcccggcgcaccacctcccggatggtcacagactccccggaggttccggtatacgtcactgtgctgttctgatagggcgccagcgcctgcagggtcatggctgtcagatccacatccgagttccctaccgtcaggccgaagccgccctccggctcctgcgctgccaccagcgcctgcaaaatagcggctctggtgtagacggcatcctccggcacggcgaagcgggcgctgtccagagcgatcaggccgaagatccagccgttgagtccctgcgttcccagagatttggcggcggtgaattgatatacgccgtcggccagcaggttcaccgaccgaccgttcttgtcccggccgaaggcggtggggtccgctcccagcgccagcgccgtcagtgcggtgcgctgccactccgtggctcgcaagcggtccaagcccccctgctcccggtacatccgggtcacatagcgctccagtgccttgcggtaagcggaggtatccccctccgtaccggtccggctcacggcgatggccacccagtcgctgacggagtctcccgccgtcagcttatcgctttgcagcagtgtctccgccgtgcagccctgcgctgccgccagcgcatccagcgtctcctgcccataggcggggatcaccagcaccagcgtcagcagtagcgccagcaggcgacagcagcctcttctcattctatcgttcatatcttgctcctgtcatagcgtagtccggcactctgcgccgccggggaagccacccggcattgaccgccgggatcggctcctgcttctgctccccgcagcgggagcaggtgtattcgatgtagcccggtgttccgtcctctcccggctccgtgcgtcccgtctccacgaaatcatgccccagaggcggcacctcctgctgatccttccgatcgccgcagacggtgcagacggcgctgatctcgccgggatgggtgcagtccggcgccactgtctgtgtcggctcaccccagacgtgctcctcaatgtaggtgccgttgagccacttaccgcaatagctgggcagcagaccgtagctgccgccggtggagctgtatccgccgatgtccttgccgtaggccagcgtgaagcgcagatacagggtatcgccgtcggtgaggtaatagccggacaggcccttaccggcataggtattgccgcccacggagtacatccagccggagccctgagtatagtcgaactcgcccagactgttgttatccgtctggcccgtcagggtcaggccgtcctgcaggatcttgctccacaggttctccgggatggcgggatagtccatcatgccgccccggctgatgcgccgcagatagaagcccacgtccatggagccggagtattcgtactcgtagccccactcctccagcgcctcgataacggcataggaggccggggtattctggcgaattttgtaggtatacggctcctccatcacatccagtcccacggtggtggcgtcgatgacgatataggccgtgccgatgacgtcgccggtatccacgaagcggtagagaatgcgataggacacgaaggcggagttgccctccccgtcccaggcccggacggtaatggtgtgctccaccgtatcgcccacgatgggatccgggaagtagagctgatactcgtacaccgggccgccggtggggcctgtgatgcgctttccgtccatctgtacctcgatctggctggcgtagaggggagagcctgtgtaggccgtggccttcaccgtcagggtgaagttgcggttgctggtctccgtcacgccgtccagattggtgacgatggtggggggatgctcaccgatggtgggatgatcctcatcggccttctgtgctacataccggatggagaagcggacctcctccaccgtggtgttccccttcttgcggtagagggtgatatggtttgtctcattccgcaccagctgggcggtatagttcttgccgtcggcgctggtaagataccggccgttcatgggggtatcgctgttttgcagcttcaccttcagcgtctcgccgttgggattgatgagataggcgtagaagggcagcgtgtcgtctgtcagctgattataggtgatctcacagttgctgagatccgtgatgatacgggtgctggtatcgtcagaagggcctggctccggttttaccgggccgggcccgtcgttatcccctttgccgggatgatcaccgggctgcggattatcgccgggctgctccggctgctccggattgtctgtgggattctccggctgctccggggcatcgggttcctcctggggcggctcctcgtccggctgctccggagtctccggctcttccggcgtgtcctcgtcctccggatcctccggctgctccggggcattgggcttctcctgctgggaggcgcctccctgtccctcggtgcggatagtctgggccgggggctggggcagcggctccggctcctgcgtggaaaggcccatcccggacagcaccagcagcaccaccaaggccgccgccagcaccagcgctccgccccgccatagatagggtcgaatcttcttcatatactcctcattctccgtgccgccgactcccgcagtgcacgggagcaggcgcaaaaaatatggtgtcatcctgcgtggcagaataacaccataaccattcctgggatcattctaacggcaacagtaggtctcccggctcgcatctcaagcggcggtctcccctgccttctcagaagcacgcttccaatggctgactttcgtcggcgggatagacacctcgatgcacacggtgttggtcaacgtggggctcgtccccgttcccttgttcagctttgcacctgaccccacggggcctttgcagcgcattgcctctgtccgtatctatcagaagatattatatcctatcccatatggaaatgcaaggaaaatgcagagggccgtcgaaagattttcttgacctatgtccgaaatcgtactaaaatacatttgtccggtttcggacattatttttacggaggactttctcttcatgcgtatccaactatccgagcacttcacctatcgaaaactgctgcgctttactctgccgtctgtcatcatgatggtttgtacctccatctacggcgtggtggacggtgttttcgtgtccaatttcgtgggctccgatgcctttgccgccgtgaacctcattatgccatttctcatggtattgggtgccgtgggtttcatgctgggcaccggcggcagtgcgctggtggcatacaccctgggggccggcaacgaaaagcgtgccaacgagatcttctccctgctgatctatgtgctgattgggctgggtgccgtgttcaccatcggcggcatcgcccttctcacgcctatgtcccggctgctgggcgccgacgagaccatgctgcctgtgtgcgtcagctacggacgcatcgtcctgctgggcctgatcccctatatgctgcaaaacaccttccagagctttctggtgacggcggagcggccgcagctgggcctgtacgtcaccattgccgccggcctcaccaacatcgcactggatgctctgttcgtggcggtgctgcaatggggcgccgagggcgccgctctggccaccattctcagccagttcgtaggcggcgtcattccgctggtgtacttcctccggcccaacagcagcaagctgcggctgggccgcaccgccttccatgggcgggcgctgctgaaggcctgcgccaacggctcctcggagttcatgaccaatatctccatgtcagtggtgaatatgctctacaactggcagctgatgcggctcatgggctccggcggcgtggcggtgtacggcgtcatcatgtatgtcaacttcatcttcatcgccatctttctgggctattccatgggcagcgcccccatcgtgggctatcactacggtgccgggaaccggacggagctgcggggcctgctgcggaagagcctgtgcatcattaccgttatgagcgcggtactgacggcggcagccctgctgctggctcggcccctgtccctgatcttcatgtccaaggagccggccctgctgccggtgaccatccgggccttctccatctactccctgtccttcctgatggtagggtacaacatctatgcctcctccttttttaccgccctcaacgacggcttcatctctgccctgatctcctttgcccggacgctggtgtttcaggtagccgccgtcaccgtgctgcccgtgctatgggatatcgacggcgtatgggccgccgtggtggccgccgagacactggctctgctcctgtcaacggtatgccttgtgggcaagcggaagaagtatggctatgcgtaagggggcgaggatgtgaccaccattcaggagttcaatcagatcgacggccgtatcagcagcctgtatcatgcggcggcgctgaaaatgggactatcggacagcgagttccgcatcctgtatacgctggccgtcaacgagccgggctatctccagtctgccctgcgggaggccacgggtatgggccgctctaccgtcaattccgctttgaagaagctggagcgggagggcatactgaccctgtcccccggcagtggacggcacacctgtgtctccctgacggcacaggggcatcgtctggccgatagaaccgtgtgccgcctgatccgtctggaggaccgtatttacgccggctggacatcggaggagcaggctctgctgctgcggctgaaccgggacttcaccgaaaagctggaggccatcgtggcgtctttataatggggcatcccccaagaagtaaaaaaggacacggcaggcgcagcctgtcgtgtcttttttgtgcttgcttaccgcacgatctcgccgaccttggggttgccggcagcctgagactcgtcggtgtcgatgtgcatggtggtgacggcgtccttgttgacacgaaccaccacatcgtcaaaaatcagcttacggccctcgccgccgcaggccaccttgatgatctcgccgttcttcacgcccatctcggcggcgtcggcctcggtgatgtgcaggtgacgcttagcgataatgacgccctcggtcagctccacctcgcccttggggcctaccagcttacatgcgccggagcccttcacgtcgccgctctcacggacgggggcatcgatgcccagcgtgcgggcgtcggtggcggacagctcgatctgatccatcttacgcacgggacccaggatggacacgttggccatctccttcttggggcccaccacagtcagacgctcgttgctggcgaactggccgggataggacaggggcttgcggacggtgagctcatagccctcgccgaacagcttctccagcgtctcctgggtcaggtgaatgtgacgggcagacgtttcgatcataaaagacatggttttttcctcctaattgttgaacattggtccactatgaaaatcgtgccgcagcacgctccatacaacgatgcatcaaagcaggatacggatgccacccagcaccggcaccggccgctccacgccccggatagccccggtaaggcccatgcaccaccacaccgccacaaagacggcccacacccagcccacgcaggggatgacccccagcaggccgaaaatacccagcaccagcgactggttcaggtggaagcggctggcctcccggttccccgccagcacggcgacgagcagaccgccccatgtgcagtagcagacgatatctgtggtgcgcttatccatagaagtcatccttttccatatgctatatggcattgtagcacattctccccggtgtttcaagagacagggcgctataaattcccttgcaatcccgtaaaaatctgctataatgacagcatattgcatcagtaatatatattatccctatttatgaggtcctgcatcatgtctgtgaaattggagctttatcgtgtattcaaggaggtggccgaggccggcaacatcaccgccgccgctcaggccctgtatatctcccagtccgccgtcagccagtccatcaagcagctggagggcgagctgcagacccgtctgtttgcccgcaactcccgtggcgtggccctgacaccggacggccggatgctgtacgagtacgtccgcagcgccatcggcctgctggagaccggcgaggagaagctgtcccagagccgggagctgcagatgggacacctgaccatcggcgccagcgacaccgtcaccagccagttcctgctgccgtatctggatcgattccaccggcagtatcccgccatccacatccagatcgtttccggccgcagccacaaggtactgggcctgctgcaatccggcaaggtggatattgcctttgccagcaccccccaggagtccgcctcgctggagacgcacccctgcttcgccacccactccgtgttcgtggcggcggcggactatccctgcgacttcggccatgtctattctctggcggagatcgccgccttccccctgattcttttggagcgcaaggcctcctcccggctgtatctggagaagtacttcctgcaaaatggccagcggctgcatccggagatcgagctgggtgcacggagcctgctggtggatctggcggccatcggcttcggggtggcgggcgtcacggaagaattcgtccacgaagagctgtcgaaaggtcgactgcggaagctggctacggacttcgagatcccgccccgcagcgtggatctgtgcgtcctgcgggacgtgcctctgaccccggcggcccagcggtttgccgacttcgtaaaggacagcttatcccagcgttcaggtgcgcctctgaactgggagaactgacaaataccgggagaaaaaccaagaaaagcttggtttttctccctattgtttttcccccggaaattgggcagaatagggtcaatatggtggagtaccagcgactataataaaggagtgtagatcgtggaagcattgaaagagcgcatccgtcgggagggccgtgtcctgcccggcaacatcatcaaggtagacgggtttttgaaccatcgggtggacaccgccttcatggaggaactggcggacgagttcgctcgctattttgacgtcagcaagatcaccatggtgctgaccgccgaggccagcggcatcgctctggctaccatctgcgccaataagtacggcgttcccatggtgtttgccaagaaggccaagagcgacaacatcgagggtggcctgtaccagagcgagatcttctcttatacttacaagaagaaggccaccctcatcgtggcgcaggagtggctggggccggaggacaaggtccttatcatcgacgacttcatggctaagggctacgccatgcagggtctcatcgacatcgtccatgccgccggcgccgagctggtgggcatcggcgtggcggtggaaaagggcttccagcacggcggcgactccttccgggagcagggctacaacatccactctctggccgttatcgaggaggctacgcccgaccacatcaccttccgggaggatgatccggtatgaaaaaggttttagtgctggacttcggcggccagtataatctgctggtggctcgccgtgtccgtgaatgcggtgtatactgcgagatccgctcctggcgggagtctatggagaatatccgggccttccagcctgacgctctcattttcaccggtggccccgccacggtgtttgagccaaatgctcccatggtggatcccgccctgttctctatgggcatccctgtgctgggcatctgctacggtcagcagctgatgatccatctgctgggcggccagtgccgccgggccgagacccgtgagtacggcaaggtagagctgacccataacggcaagagccctctatttaaggatatccccgccaccgccgtgtactggatgagccacggcgtggaggtggagacgctggcccccggcttcgaggtggtggcctccaccgatggctgccgctgcgctgccatccagtgcgccgagaagcagctttacggcgtgcagttccacccggaggtactccacacccagtacggcaaggagctgctgcagaatttcctatacggcatctgcggcttcaccgccgagtggaccatggcgtcctatctggaggaggccgtggcggagtgccgggccaagatcggcagtggccgtgtgctgctggctctctccggcggcgtggacagctctgtggctgccgccctgctgcagcgtgccgtgggcgatcagttgacctgtatcttcgtggatcacggtctgctgcggaaggacgagggcgatcaggtggaggaggtcatgacccaccagttccatgtggacgtgcgccgggtcaacgccaaggaccgcttcctctccaggctggccggcgtcaccgatccggaggccaagcgcaagatcatcggcgaggagttcatccgggtctttgaggccgaggccaagaagatcggcgccgtggatttcctggcacagggcaccatctatcctgacgtggtggagtccggtctgggcggcgagtccgtggtcatcaagagccaccataatgtgggcggcttgccagactgcgtggacttcaaggacatcgtggagcccctacggcggctgttcaaggacgaggtgcggcagctgggtatcgagctgggcctgccggagcagctggtgtggcgccagcccttccccggccccggtctggccatccgtgtcatcggtgagatcaccgaggaaaagctggagattctgcgggatgccgatgccatcttccgggaggagatggctctggcgggattggaccgtaccaccagtcagtactttgccgtgctgaccagcgtccgcagcgtgggcgtcatgggcgacgagcgcacctacgactatacgctggccctgcgggcggtgcagtctcaggacttcatgaccgctacgtggtcccgcctgccctatgagctgctggataaggtcagcggccgcatcgtgggcgaggtgaagcatatcaaccgcatcgtctacgatatcacctctaagccccccgcaaccgtggagtgggaataaatcgagttgcttaaaaaagccagtgtttatgcgggtttcagcgatttcgattagtcttttgataacaaattgataacagtcatagcaagtgccattattcttgttatccagtggtttatgggtaacggaacaattaacaggtggcttgcagactaaagttcggagcttggctctgaacaaattccatattataaactaagcccttagctgtggttaataaccatagttaagggcttttttgtcgttgccaaagcatctgtagggagctgccagtggcaggtcctgtaggtgcttatttatctttcaagtggtctttgaatgcttccacgagagcgtca

SEQ ID NO: 12437 - DNA, 865 bp, Unknown
  gut microbiota DNA sequence
aagcatctttcccttggccgcttcttttgctttcaggggaaaatacctctgcgatccctgcaaaaattaccagccgccgcatcgcatattcgtccaccgctgggaaaagctatgtgtgcgatacccaaccagcgcaaaagcgcaaatcagacatgaaaggagaacgacacaatgtccagtaagaacaacaacaagctgaatatccccgaggcccgtgccgccatggataagttcaagatggaggctgccaacgaggtgggcgtgtatccaccttaaagaatttttgcaaaccccgatttttggcttaaacactggaaaaatgacttttcgtaaaatgtcattttttgaggtaaaaacaccaaacctgtaaaggcttttttcttcaaggtaaatatttttcacatccccgcagcatgggcggcttcttcacgatctctatttgcctgcatttcacgcaggttgtcccccgaaacttccccgataaagcggtagaaaattcggatgctttgccggtatggggtgcgcggcccggcaatttttttgccctccggcaatatcttttcaccgatctctatgcggtcgatgaaagtgtgcaggatatttctatccagcgtttctacacaggtataccgcttgacaaggtcgaagaaatgtccataggtatcgcgtatctccttcgctgtggtttcgccttccaccagcttcttgcggcgtgcggccagctcgtcaatctcaatgccaaatttcctgaccatttcctcatggatatcgtcactgagcatccctgcgatgttgtcgcgataggaacgctcgatcatcttcttgagtcgggcggtctgcttgtcgatatgttcgatctgtgtgg

SEQ ID NO: 12438 - DNA, 464 bp, Unknown
  gut microbiota DNA sequence
tggtgcgaattttgccctcatcaaaggccagcatcttattgaggtcacagcgaataatttccatcaggtcatcgtagcggatacgcgccccatgcgcacaccggtgctgcgcccgggaggtcagattgttgcacaccagataccagtatttttcccgctctccgttgtagacagagccgccggagcacatagctgcgccgcagcaggcgcagtaggcgatgccgccgaagatgctgtggcggaaggcagggttcgccccgttcgccttggtgttctctcccataaagtgggcggccagatcgaatttctcctgcgtcaccaggggttcatgggtgttttttgtgaatacccactcttcctccggcaccttgatcttcttcttggacttcacgctgaccttgcggctcttgcccagcagcgtgtgccccaaataaacccgattgcgaaggatgcgctttacggtg

SEQ ID NO: 12439 - DNA, 236 bp, Unknown
  gut microbiota DNA sequence
atcttcatcgtggcctgcttcatcggcttcgccaccggtacctcttggggtaccatcggcatcatggttccgctggtctgcgctgtgttcaactgggatacccagatgaccctgctgtccgtgggtctggctgcttcctgcgccggcggcgtgtgcggcgaccacctgtcccccatctccgataccaccatcatggcttctgccggcgcccactgcttccacctgaaccacgtggc

SEQ ID NO: 12440 - DNA, 1588 bp, Unknown
  gut microbiota DNA sequence
tccaagacatcgtacatagggacaatgtaagatatgcaccgggagatgtcaagtcggggcgaatgacggaggttttctccattgcaatatgtcatatcctgtgctataatgcactcaaactgaacaacgggacagcgtgagccgggtttatcccggtggcggaatggggtgagaggccccgcgagacggtcactgtgatgccgatttattcggctaagtcagatacgcaaggcgttgctcccgggcaccgccatctccggagccgaagctgtcgtatagaatttgcttcacccggctgctttttggcggccgggtgattttttgctgccaggcaccatggctatcatgctttccatggaaagcatgatagccatttcaagccgccggggcgggggaggacggcagacctttcccgccccgctttcaagaaaaatttttgcgctatttgtcgttcctttcaagttccctctccccgggccgtgctgcaaagagtgcggcccggggggagggaagcagggggcgtgagatatagggtattacggatcgccacgggcgcggtgcgccctcgcaatggcaaaaagtgtgtgattgcttcggcatttacataaataaaaagaacgaaaggaagaagaaatgaaaaaaagaatcatttctctgctgctggcgcttatcatggcgctgtcactgcttcccgtgagcgtgctggcggcggacgaccacacaggtcaggtccatgtgacggtggaaaacaccacctgggccgaggccgacggcgcaccctgggaggggatgctggtggacgagtgggtcacactccaggatgactccaccatgatgagctgcatcgtggacgcactgacggccgggggctattcccagaccggtgcggacaccggctacatcagcgaaatcaacggcatcgaggagaaggccgccgccgagggctccggctggatgggtaccctcaacgactggttcaccagtgagggcttcgccgcctacaccgtggccaatggcaagctgaaggccggggacgagatcgccgtgcagcacacctgcaacctgggtgcagatatcggcggtgcttttggggatagcaacaaaaccctgaaggccatcgccctcagcgccggtgagctgaaccccgccttttcctccggtgtgcatgactataccatgattctgcccgagggcgtcaccgccctcaccgtcacccccaccgccagcaacaagcaaaatcgcgtccgcatctatgtgggcggcacggagtatggccgcaaggatgccattcccgttcaggtgggcaccgtcatcaccctgaaggtgggcaatgacggcgatgccgccccggagacctacaccatcgccctccaggcggcgggcaccctcctctccggcgacaatgtatccctcacctccatccatcaggacggctccgccggtaccaaagtggccctgacctttgacaaggaaaccgccgccttcaccggcaagctggcaaactatacccatctcaagcagtataacgacggcggcttcaccgtgacgctctccgacctgcccgcaggggccaccgcccagctcaaga

SEQ ID NO: 12441 - DNA, 497 bp, Unknown
  gut microbiota DNA sequence
gccaaggtctcccgtgagaagctggcctggctgtgcgactgcacctccgctcccgtctgcatcaccctccccttcagtgcttggggcgtgtatgtagccggtctggtggtgggcttcggtaccttcgccacggcggaggccggccagaacgccgtcatccatgcttccgtgttccagctgtacggtatcctgaccatcgtcatgatcttcctggtggctctgggcttcattcccgattttggccccatgaagaaggccgaggagcgtgcccgcaccaccggcaaggtcattgccgacggatccacccccatgctgtccaatgagctggacaacatcaagcccaaggagggcttcaagcccaatatcgtgctgcacttcctgattcccgccatcattatcatctgcaccaccatcggcacctacgtcgttatgggctccgccaagacgctggaggccttcgtgctggccgttacctatcaggccatcgtgctgctgat

SEQ ID NO: 12442 - DNA, 164 bp, Unknown
  gut microbiota DNA sequence
cttttcccaccagctggaaaagtgggcaaaagagccgtttgaaaccgatggtttcaaaacttcctttgctctcaagagttgcgttcgctatgggctgtaaagggaattgactctgcaacagacccgctgccgctcccactcaggtgaaggggcgtgtgggtcta

SEQ ID NO: 12443 - DNA, 231 bp, Unknown
  gut microbiota DNA sequence
ggtgaacatctcgtcgcagtcaaaccaggcggtgaagctgccgccggaggtgacggacaggctcgtcatgctgatccgccgggccagttcttcctctgtgatggggtctgtttccggatcgcgggggttttcctcatcctgggaaagccagttgttagccagttcggtcaggttcttggctgcaagctcccgcatggctttgtcccaggtgtcacagtcggccagcagctt

SEQ ID NO: 12444 - DNA, 170 bp, Unknown
  gut microbiota DNA sequence
acccatgatgatcccatctacttcgtggacggcgtgatgcactactgcgtggataacatcccctccgccttctcccagaccgcttccgtgacgctggccaatgccaccctgccctatctgctgcagatggcggataagggctttaagaaggccatggaggataaccgcct

SEQ ID NO: 12445 - DNA, 445 bp, Unknown
  gut microbiota DNA sequence
tcccaaaaacagtctacgacgcccaaacagatgaaagcataacctaaccatatgatgctggaataagtaaacttggaaacgttgaccagtgccagcccataaaatagaagcatgaccgaagccaggatgtcataatactcgtgcataaggatggaaatacataaaacacctccggtcagcatcggaagagagaaattccacaatgcccggtaagtgaggcggctgaaaaatttttgccctgtcttcttggatttgtaataggacaggatgcaggcagtgaccgcagcagctaccaatacaagcgaggctattatagccatcaattcaagggcaacaattaaatgagtgcccggtgtaataacttgtgtggcgatatatgcgccaactaatgcgtaaatgcccgccatgattgcagcgagaccacttagagagataaactttgagg

SEQ ID NO: 12446 - DNA, 2232 bp, Unknown
  gut microbiota DNA sequence
atgcagtagtagttgaaggggatctggctcaggaacatgctgatacgggagccggggaagccgtcgggtacgtaggatgcaacggcggcggcccaagaggacacgggagccagcatacaaacgggagcggcggtggcatcgatgatgtaagccagcttggcgcgggagatcttgtggctctccgtcacgggacgcatcacggcgcccacggtcaggcagttgaaatagtcgtcgatgaagatcagcacgcccagcagcatggtcagcagctgcgcaccggagcgggtcttcacggccttcttggcccagcggccgaaggcagcggaaccgccggccttgttcatcaggtccaccatgatgcccaggatgaccaggaagatcaggatggagacgtcaatggcgttgatcatgccgacgccctcaccggcgccgatgaaattcacgaccatctgccagggctggaagttggccagcagcagggcgcctaccacgcagcccagaaacagggaagaatacacttccttactgatgagggccagcgcaatagccacgatgggggggaacaacgcccaaccggtggctacgaagccggaaccgtcattggccaccttggcgatgaccagtgcgatcacaacgatcgccagcgcaacaaaatacgctatacgagtgcctttcttttccattaggtgatttacctcctcaaatttggtgactttatggtagcgttttttggaggtattgtcaagattccagaaaccgcttccggcctgaattttgaacaaattatgaatcaatcttttggacgttcctctgaaaattgcgctgattctcactttcttaataggattttgcggtctatttacggaaaacatataaaaatcgtgctaatatttaaaaatctcttaacgcaaaattaacgcactttttgcgcctttttccttttctagcagctgacctgacaaaaatggaaatcgaaatatcgcatatttgcgttgcagacccattctgtccgtctcgcggcggacagctccctgcacgctgccctctcgaagtgtgtaggcgcttccgcaggccgcaagtccctcaaaaaagggagtggcgtaactcccgctgcgccacccccttagagaaagccctgtcctatattcaatagaaaaaatgagggcgcagctttcgctgcgccctcacgatgtaggatcggttcagaccaacctcaaaggaacgatattcttacttgctgtagagcgccttgtcggcctcggccatttcggcaaagatacctgcgtgcttcttggcggtgatagccttgatgaccagcagggtggcgatcatcagaacgatggcgatgatcatgcagaccacagcgttctggacgataccggcaatgatgaagctgacgaaggaaacggcagccacggtgataccgtaggggatctgggtggccacgtggttcaggtggaagcagtgggcgccggcagaagccatgatggtggtatcggagatgggggacaggtggtcgccgcacacgccgccggcgcaggaagcagccagacccacggacagcagggtcatctgggtatcccagttgaacacagcgcagaccagcggaaccatgatgccgatggtaccccaagaggtaccggtggcgaagccgatgaagcaggccacgatgaagatcacggcgggcaggaacttagcaaggctgccggtgttggccatgacgccctccacgaaggaacccacctgcagaccattgtcacggcacaggccgcacagggtccaggcgaagcagaggatcaagatgggggagatcatctggatgaagccgttgggaatggcttccatggacttgttgaagccaatcaggccacggcaccagtagtacacgaaggtgaacacaatggcgatgatggagcccaggcacaggccggtaccggcggtggcgtcggagaaggacatgatgaagttgccgtggttctcgctcccggcgtcccacataccgccggtccagatcagaccaacgatgcacagggcgatcagaacgataacgggaaccagcagatccagcacggaggagtgcttctcgccttcctcgtaatcatcagcaccggcgaagggacgctcgggggtggtgaacagatcgtccttgacctgagcattgtactcatgggtcagcatgggaccgtagtcaatgttcagcacggaggtgacgatgaccatcaccagcgtcag

SEQ ID NO: 12447 - DNA, 187 bp, Unknown
  gut microbiota DNA sequence
atgccatcaccccggagatccagcgagtggcactggccgcagaggtgttctggccctgtgagatctattatcatgctcccgccgatgtgcgggatggtctgatccatgcgctgttgtccgcggaatattccagcgcggcctccaacctgatgagttgccttgctatgcaaggagatgacaaggcaat

SEQ ID NO: 12448 - DNA, 16532 bp, Unknown
  gut microbiota DNA sequence
ctcaccctttttatgaacgaaaatacccagcaaggccccgccttttcggcggggccttgctgggtaataaaggaaggaagtctcccggcagtgccggaagaagtagagagtgaggaaaggggctttacgccagaatggcccggtcgccggagaactcgtcgccgctggcacgggcgaacatctccagcagctccggcacggtgagatccttcttctcctgaccggagatatccagaatgatgcgcccggcgtggagcataatgagacggtttccgtagcggatggcgtcccgcatattgtgggtgatcatcaaggtggagagcttctcctccgtcaccatccgctccgtcagttccatgaccttggcggcggttttggggtccaacgccgccgtatgctcgtccagcagcagcagcttcggcttgcggagggtggccatcagcagcgtcagcgcctgccgctggccgccggagagggtgcctaccttggccgaaagacgggtgtccagccccagccccagttcttggagccgctgccggtactcctcccgttccgctttgcggatgccgggccgcagagtgcgccgcagaccccggcgggccgccaaagccagattctcctcgatctgcatcccggcggcggtgccggtcatggggtcctgatacacccggcccagatacttggcccgctggtgctccgacagggaggagaggtcgatcccatccagaaggatctcccccgcatccggcagccacgtgccgcagatggcgttctgcatggtgctcttcccggcgccgttgccgccgatgacggtaacgaagtccccgtcgttgagggtgaaggacagatcgttgagggcgatcttctcatccacggtaccgggattgaagatcttggtcacatggcgcatttcaagcatgacggatccctcctttgacacggtgcttccgggccaactgcttcttcacatacggcacgcccaaaaagacggccaccaccagcgccgagaacattttcagcagatcggtgtcgaagcccacgaagatgatgacctgatacaccagatagtagataacggcgcccaccagtacgccggtgagccggacggcgaagttgggggagatgtgcttgaccactgcctccccgatgaccaccgccgccagaccgatgaccacggcgccccggcccatgttgatatcggcatagccctgatactggcacagcagcgccccggacagggccaccagcccgttggagagagacagcccgatgaccttgctgagatcggtgttgatgccctgcgcccggctcatgacggggttgcagccggtggcccggatgccgcagcccagctccgtgccgaagaacaggtacagcaccgccaccaccagcacggcggcaatggccagcaccaccagcgcaccggggacgtccatctggctgagaaggacgtggttgtcccggacggacaggccctgattggccttgcccatgatcttcaggttcacggaccacagggtcatctgggtcaggatgcctgccagaatgggggggatgcccagccagatatgcagcaggcccgtcacgaccccggccagcaggcccgccgccacggcgcacagcatcgccagccacaggctccggccgctcagcagcatcatggtgcagaccgccgcaccggtacagatggagccgtccaccgtcagatcggcgatgtccagcaacttataggtgatgtaaacgcccaccgccattatgccccagatgaggccctgggctacggcgcccggcagggaactcagcagatcgatcatattcatgtttccttccttttccgattcctgttttctcagggagtgcttcagccctccagagcggtgtagccctccggtacggtgatgcccagctcctggcacatatcggcgttgtagagcttggaggcattggcgtattcaatgggcatctgggagatatccgcctcgcccttgaggatctgagcggccatttcgccggtcttgtagcctagatcgtagtagctgatggagagggtggcaatgccgcagccgacgcagatgccctgctcaccggccactaccggggtcttggcggagcggacgatgctgccgatggtctcggtgcaggaggcggcggtgttgtcggtggggatgtagatgacgtcgctgtcggcggcggccttggtggtgacggcggccacgtcattgctgtcgctgaaggagtagcgggtgcaggtgaggcccttattggagaggtagtcctccaccaccttcacctgatattcggagttgggctcggcggagcagtatagcagaccaacattcttggcctgcggcaccagctccaggatcatgtccgcctgctccgtcaggggcgccagatcggaggtgccgctgatgttgccgcccacggtgccgctgaagtcggagagtcccagcgccacgccgtactccgtaacggaggtgccgagaatgggaatggaggtggtggcgttataggctgcctgcagggccggggtggcgttggccatgatgaggtctaccttcttgttgacgaaggagttgacgatgggggtgcaggtggtgctgtcgccggaggccacctgcacgtcgatgttgacgtgctcacttccgagaatggtattcagggcatccacgaagccctgtgtagcggcgtccagcgcatcgtgctgggtcagctggcacacgcccacctgatagaccttgtcggagtcgacgccggagctgccgttgccggcagccttctgaccgcagccggtgaggcataccgccgtcaccatcagtcccgccagcagggcggcgcaaagagaacgtttctttttcatgacaaattcctcctgaatctggatgtgggagattcctccggcccggacggaaaataaaatcgccgcccggacatgtgatccgaacggcgtctctcgatacggtttgttttcaaaagtagaaaatcggtatcaagcactttttcgctgctgggcatcacaaatcgcttttacttttgcaaaataaaagtaaaagtaggaatatccaaaatacagatttgcagatgcggcgaacttcatacccgattttgctcctttcaaaaatcttgtctgtactttagcacagcagacgaccatatgtcaatgcttttattcacaaaatgcggaataaattttcatgtagatatcgtcaagagagctaaaaatgccgaaaagtttccttaaagtatgcgctgtcccaacccggcagccttgttcccgacgggaaagtttggtagaataggcccgaagagaaaccggagccacggccccggagaggaggatatatcatgagaaagacaaaaatcgtctgcacactgggtcccgccaccgacggcgagggcgtgctgcgggagatgatgctggcgggcatgaacgtggcccgcttcaacttctcccacggcacccacccggagcacaaggcccggctggagcaggtgaaggctctgcggcgggagctgaatctgccggtggcggccatgctggataccaaaggcccggaggtgcggctgaagaactttgccggcggctccgtgaccttgcaggaggggcaggagttcaccctgacggtggaggacgtggagggcgacgccacccgctgcgctgtcacctacgccgagctgccgcaggacgtcaaggcgggggacaccattctgttagatgacggtctggttcggctgacggtgctctccaccaccgcctccgccatccgctgccgggtggaaaacggcggcgtcatgaaggatcacaagggggtcaacgtccccggcgtgtccctgtccatgccctatatgagccagcaggatcgtgaggatatcctcttcggcatggaggagggctttgacttcatcgccgccagctttgtccgctccgccgccgacgtgcgggagctccgcaagctgctggagagccgcaagtcccgcatccgcatcatcgccaagatcgagaatcaggagggcatcaacaacctgacggagatcctggcggcggcggacggcatcatggtggcacggggcgacatgggcgtggagatcgacttcacggagatccccgccatccagaagaatatgatcgcccagtgcgtggccgccgggaagccggtgattaccgccacccagatgctggactccatgatcgagaacccccggcccacccgtgccgagatcaccgatgtggccaacgccatctacgacggcaccagcgccatcatgctctccggcgagacggcggcgggccggtacccggtggaggcggtgcggaccatggacgccatcgcccggaaaaccgaatcccacacagacgatgccagactgctgggactgcggtgccgcaaccgcatgaacatcaccgccgccacggcccacgccgcctgcaccactgccaaggatatcggtgccgacgccatcctgacggtgagtcaggcgggtatcaccgcccagatggtcagctccttccgtccggagaccacggtggtggccctgctgctggaggagcaggtgcagcgccagatggccctttactggggcgtggagcccatcaccatgccccgtgccgagaacaccgacgagctggtggagctggcggtgcagtcggcagagaaggcgggccttatccgccacggcgatctggtggtcatcaccgccggtgtgccggtgggcatctccggcaccaccaatatgatccgcatccagcaggtgggcgggtcgctggtgaatgccgtgggcataggtagccggacggcctccggcccgctgtgcgtgtgccgcagtgtggaggaggtggcggagaagttccacgccggcgacgtgctggtggtgccatataccaccaatgagctgctgccgtatctgcgggatgccgccgccatcatctgcgaggagggcagcgccgagtgccacgccgccacggtaggcctgctgctgagcaagcccgtgctggtgggggcgggcgatgccacccgccgtctggaggacggcgtccgggtgtcggtggactgcgcccgtggcgtggtgcagaccatgccccagtaagagagaaaaatcaagaggggagcaagccttcgcttgctcccctctttgcatctcacctgcctccgccgccacagccggtaagtgccggtgcctgtatgaaaaaaggggccgcaggcatttgcctgcggccccttggcctgactgcaagacctccgggccttgcggtttttacttctcgatgaccaccttgccgtccttcaggcacacatgagcggtgtcgccggactggagcttgccctccagcatctgctcggccactgcatcctccacctccgtctggagggtgcggcgcaggggacgggcgccgtagcgggcgtcaaagccgtccttggccagtgcggccacggcgtcgtcgtcggcctgcagggtgatgccctgctgagccatgcggccgccgatgatgtccagcatccggcgggcgatgctgcggatgttctcctccgtcagctggcggaacacgatgatctcgtcgatacggttcaggaactccggccggaaggtctggcgcagctccgtcataacggcctcccggatacgggcgaagctctgggcctcgtccttctgggcgtcgggatcgctgccgtcaaagcccagcggcttctcggcggcggtgatgttcttggcacccacgttggaggtcatgacgatgatggtgttcttgaagtccacccggcggccctgagagtcggtgacgataccgtcctccaggatctgcagcagaatgttccacacatcggggtgggccttctcgatctcatcgaacagcaccacggagtaggggtgacggcgcaccttctcggtgagctgaccgccctcctcgtgacccacatagccgggaggcgagcccaccagccgggacaccgtgtgcttctccatgtattcggacatatcgatccggatcatggcgttctcatccccgaacatggactcggccagcgtcttgcacagctccgtcttgcccacgccggtggggccgaggaacaggaaggaaccgatgggccgcttggggtccttcagacccacacggctgcggcggatggccttggccacggcggccacagcctcgtcctgacccaccacccgctgatgcagagtctcctccagcttcagcaggcgctggctctcgtcctcggtgagacgggtgacggggatgccggtccaaccggctaccaccttggcgatgtcgtcctcggtgacggtgccacggttggtggacatctgcttatgccacttatcccgctcgatctccacctgctcctgataattcttctcgatatcccgcagctgagcggccttctcgaagtcctgagcggcgacagcctcctccttctcccggtgcagggcggcgatcttctcctccagatccttcagatcgggggaggcggattcggcggccatacgcacctgactggcagcctcgtccatcagatcgatggccttatccggcaggaaccggtcgttgatgtaccggcgggacagcgccacggcggcctccagcgccccatcggtgatggtcagacggtggtgagcctcgtacttatcccgcagccccttcaggatctccagcgtagcctccggggagggctctcccacggtgacgggctggaaccggcgctccagagcggcgtccttctcgatgtacttgcggtactcgttgagggtggtggcacccaccacacggatctcgccgcgggacagagcgggcttgagaatgttggcggcgtccacggcaccctcggcggagccggcgcccacgatggtgtgcagctcgtcgatgaaaaggatgacgttgccggccttcttcacctcgtcgatggcgttcttgatgcgctcttcaaactcgccccgatacttggtgccggccaccatgccggacagatccagcgacaggacccgcttgtccagcagctcctccggcacgtcggcagcggcgatgcgctgggccaggccctctgcgatggcggtcttgcctacgccgggctcaccgatgagcacggggttattcttggtgcggcgggacaggatctggatgacccgctggatctccttttcccggccaatgacggggtccagcttgccgctgcgggccgcctccgtcaggtcacgggtatactcctccagagtgcccttcttgccgccctcctgtgcgggggcggaagcgctgccggacacggcggcggtgcggggcgcctcattgagcttcttcaccacggcgctgtacagcttcttggggtcgatgcccacggtgcgcaggatgcgcagggccatgttgttgccctcccgcagcagccccatcagcagatgctcggtgccgatgtagccggcgccggtgcgggcggcctcggagacggccaactccacggcgctcttggcacggggcgtcagcccctgagagggtgcggcgccggagacgccggtgcctacgctgcggtgcaggatgtcgcagaccatctcgtcggtgagcccgttttcctccagcacacggtgggcaatgccctcctcctcccgcagcaggcccagcagcagatgctcggagcctacatagccatgtcccatatcctcagcggcctcctgggccagacgcagagcctcctctgcacgaggggtgaatttattttccatcataaagaaacacttcctttcaaaaggtgtggtgatctatcaaaattattgccggggcattattgctgaggcagtgccttcagctgatcccgcagcttggcggcggactcgaagtcctcggcctctacggcgtgacacagctgcgtctgcagggcgttgcgctgacgctgcagggagaagcgctcctgctccgccttgtccaccagcgcatcctccggggcttccgccacggcctgttgggcctgccgggtcacatccaccggctccgggaactccgtcagcaggcgattgccaaacccgcccagcagcggctcgaagagccggaagggatgggaaaagaagtcgtcgccgaagaagctgtccggctgcatccgctgcacatagcccagcttccgggcgcagtcggcgcacaggtgcgtctccgtgacccgtccgttgatgctgctcttatagtagtaagtcgcttcatttcttccgcaattctgacatttcataatgatttcctccttatcgaaaaatcaaaccggtcaactgtaccgatccgacgctataccagatggatgagggcctgcttcagcaggtcggcccgcaggacgctgcgctgatccttgggaacggatcgcagagcggtgtccgacaaaaggctcgccagcagctttcccgtctgggcggggatggcctccgactgcaccagattggagaggatggctctggcactggccggatcgatctccgacccgatggagttgatgacgtgcatcatcagcgtctgccggtccacatggacacgggtgatgcggatgtagccgccgccgccccgccgggattccacgatgtagccgtgctccggagagaaccgggtggacatgacgtagttgatttggctgggtacgcacccaaatcgctgggccagatccccccgctgcatctccaaaacaccgcctgcatcgtccagcgcctcctgaatgaacccggcgatcatatctgtgattcccatatcgttcccctcctgatttgatattgcctttccttgatctttgtccatagtataccacgccggtaggaaatgtcaatagggtatttgaccttttttgatgtttattctgtaaacaatttgtgaatgggatggggcggtaaactccgcaaaagtttgccgccccggcgagatttttatttacatcgggtaataaagaagatataatttactgaacgtataaacagaaagagaacgggtgagagagaatggcgactgatttttcccgcacattgagcctgctgcggcaggagaagggcgtctcccagcggaaggcggccggggagctgggcatcagccaggccctgctgagccactatgaaaacggcatccgggagccgggccttgcctttgtggtgaaggcctgcgcctactaccacgtgtcggcggatttcctgctgggccgcactctgaaccgggacggctccatcatcgaggcggaggacgtgtacgactccagcggcgagaagggcagcctccggggcagtattctggcgactctgcaaaaaaagctggtggtgaacaccaccggggtcctctttgagctgctgggcaagaccggggaccgggaggccatcaccgccgccggggactatctgggcgacgccctgtatcagctgctgcggcagctataccggcagggcggcggcaacgaggatctgttcgccgtggccccctcggtctttgacggcggactggtggcggcggatatgcagctatgcgccctgcgctaccggcaagcgctggccgctcaggaggggctgccggagctgacgccggagagcctgacgggccagcccggcgtgggccagagcgcagcgcaggtgttccacagcgtggacgagcgctgcaagtcctatcagcactaagaaaccaacgacctaaggaggccttttccatatgtttgaccaatcccatatcagaaacttttccatcattgcccacatcgaccacggcaaatccacgctggcagaccgcctgctagagctgtgcaacgccgtctcggcacgggagatggagaaccagatcctcgacaacatggacttggagcgggagcgtggcatcaccatcaagtcccgtgccgtccacctgttttacacggcgcaggacggggagacctacgccctgaacctcatcgacacgccgggccatgtggacttcaactacgaggtgtcccggtctctggcggcctgcgagggcgccgtgctggtggtggacgccacgcagggcgtggaggcacagacgctggccaatacctatctggccatggagcacgatctggagatcctgccggtgttcaacaagatcgacctgcccgccgccgaccccatgaaggccaagcaggaggtggaggacatcatcggcctgccggccatggacgccccggagatctccgccaagcaggggatcaacattcaggcggtgctggaggatatcgttcagaatattcccgcccccagcggcgaccccaaggcccccctgcaggcgttggtattcgacagccagtatgacccctatgtgggcgtggtggtgtacttccgggtgaagcaggggaccctccgcaagggccagaccatccgcatgatggctaccggcgccgagtataccattctggagtgcggctacctgaagccgctgggcaatgagcctaccgatgccctgcaggccggtgaggtgggctacttcaccgccagcatcaaaaacgtcaaggatacgcaggtgggtgacaccatcaccggggtggaggaccccgccgaccagcccctgccgggctaccgccccgcccaatccatggtctactgcggcatctacaccgaggatggcagcaagtacccggatctgcgggatgcgctggagaagcttcagctcaacgacgcctccctgaccttcgagccggagagctccgtggcgctgggcttcggcttccgctgcggctttttggggatgctccacatggagatcattcaggaacggctggagcgggagttcaatctggaccttgtgaccaccctccccagcgtcatctaccacgtctataagtccgacggcaccatggtgaaggtggataacccccacaactacccggaccccggcaccatcgagcacgccgaggagccctatgtgaaggtctctatcattgcccccaatgagttcgtgggcaacatcatgcccatgtgtcaggagcgccgaggcgagttcaaggatatgcagtatctggatacccatctggtggagctgcactatcagatgcccctcaacgagatcatctacgactttttcgataccctgaaggccaacaccaagggctacgcctctctggattatgagctctccggctaccgcaccagcgatctggtgaaggtagacctgctcctgaatggcgacggcgtggacgccctcagctttatcgcccaccgggataaggcctatccccgcgcccggcggctgtgcgaaaagctgaaggagaatatcccccgccagctgttcgaagtacccattcaggcggccatcggcgggcgcatcatcgcccgtgaaacggtgaaggccatgcgtaaggacgtgctggccaagtgctacggcggcgatatcacccgtaagaagaagctgctggaaaagcagaaggaaggcaagaagaagatgcggaacctgggaaccgtacaggttcccaccgaggccttcatggcggtcctcaagctggacagcgattgatgcaccctcatcgcccaaatggctctgcgccatttgggcgaacccatctcacattcgggaaggtacatgatatgagcgaattatatgagctgctgacctttgaagcctttggccagcgctatccggagctgacctcccggcaccagatcctgccgggacggggcgtattctgcaaggcggagcggctccagagcggcgtcatcgggacctacgccatgccccagcgcatggcccccaccggcgaaaagcacttcttcggctactatctgacggagaaaaaactgctgctggtggaaaagggcagttttttgcagggcctgctgccgggccttccgggggagaccccggctcagctgctgtcggagctgctggcccggctgacggcggaggacatggaaagcctccagcactacgaggagcgcctgacggcattggaggaagttctgctggcgcaacaggcggaggatttcgacaagaagatcttccgcatccgccgggagctgtcggtgctggcgggctactatgcccagctggacgacctctatgccgtgctggccgatgctatcccggacgcagaggagcacgtccagcggctgctggagcatctctccggcaaggcccagcggctgctgaccatgacggagcaggagaaggagtattccctccagctgcgggagatgcaccagacgcaggtggatatgcggcagaaccagatcatgaagatcctgaccattgtcaccacggtgttcctgcccctgtctctcattgccggctggtacggcatgaacttccggaatatgccggagttgacggcggagcacggttatctggtgatctgtatcgtcagcgccgtgtgcgtgctggtggagctgtggattttcaaacggaaaaaatggttttaaggaggcggccctatggcggagctatccaccaacgtgcgatatatcaaaggtatcggagagacacgggccaaggctctggagaagctgggcatcaccaccctgcgtgatctcatcggatactttccccgcacctacgaggatcggacactgacccgccccatccgtgacctgacggagggggagaatgtctgcgtccgggccatgatcgccgccgaccccaccgcccaccgcatccccggcggccgcaccatcgtccgcacccgtgccgtggacgagacgggaacgctggatgtggtatttttcaatcaggagtaccggaaaaacagcctccatcggggtgagatctacatcttctacggcaaggtggagggccagcgccgtcatcagatggtgaaccctctgctggagccggagggccgccagtacctgacagggcgcatcatgcccatctactccctgacggcaggcatcagccagctgatgctggcgcaggcggtgcggcaggggctggacgcctgccgggagctgctgccggacgtgctgccggatgaggtgcggcgggagcaccacctgtgctacatcaactatgcttacgaaaacgtccacttccccgactcgccggaggcgctgacccaagcccggcgccgtctggctttcgaggagctgttcctgctgacctgcggcctccggctgctgcggagccgccgggaggacgtgtccggcccggtgtgccggtgggtctccatggattccttttataacgccctgcccttcacgctgacggacgcccagcgccgtgccgtggaggatgccataggtgacatgaccgccggccgccccatgaaccgcctgtgtcagggggatgtgggcagcggcaagaccatggtggcggcggcctgcatctggttcgccgcccagagcgggtggcagtcggccctgatggcccctacggagatcctggcccggcagcattttgaaacgctgtcgcccctgatggcccggctgggcctgacctgcgccctgctcacaggctctacccgtgccagggagcggcgggaaacactggcgggactggccgccggtaccatcgacctgtgcatcggtacccacgccttactgacgggggacgtgcagtacgggcggctggggctggtggtaacggacgagcagcaccgcttcggcgtcaaccagcgggcggccctgagccagaaggcggaggccccccatatgctggtgctgtcggccacccccattccccggacgctggcgctggtgatctacggcgatctggatgtgtcggtcatcgaccagctgccgccgggacggcagaaggtggatacctttgccttgggggagagctaccgcccacggatcaacgccttcctgcgcaagcaggtgcaggaggggcatcaggtgttcatcgtctgcccgctggtgggggacggtgatacccttcccgacgagcggaaggccgtcacggcctacgccaaaaagctacaggaggagaccttcccggacctgcgggtatcggtgctccacggcaagatgaagcctaaggaaaaggagaaggtcatggagacctttgccgccggggagagcgatattctggtgtccaccaccgtggtggaggtgggcgtggacgtccccaacgccacctgtatggtggtggagaacgccgagcgcttcggcctgtcccagctgcaccagctgcgtggccgggtgggccgtggtcaggttaagagctactgcatcctgctgtcggagcatcccagtgaggagacccggcggcgactgaaggtcatgacccgcaccaataacggctttgaaatttctcaggaggacctgcagctgcgtggccccggcgacttcttcggccagcgccagcacggcctgcctaccctgaaaattgcggatctggcctgcgatatgcagctgctggaggaggcccagtctgccgccagagcactgctgcgccgggacgaggatctctcccggccggagcaccgccccctgctggagcgtgtccgggagctgttccacgataccgccgactccatgaactgatgagaataaataaggaagagggaggagctaaaaaggctcttccctcttcttgccatttgctgcacccaaatgctgcacgaaaaccaccgccctgaaaatagctgtctcccacggacagcttttcaggacagtatgaccgcatagaaaattttccatatgttggtattgcgatctctcaaaaccaatattggcgcatctgctccagaaattctctggtgatgggatacccgctatgctccccgatgacggaatctatgccgcaatacgggcagatcgccgtaccgcccacgtcctcgatccaactgctgatctccttgggggcgaaaattttcagacaataaaagcagccgcatttcctgtcctgtaacagccgcttccggtggccggtggaaaaatcgtgcgcctttatatagtcgatggtatagtcgatcatatgcacctccggcatccgctgaaaggtcctgcctcactcctcttgcaatgccgcctgatacagttcgttgcgggagaggcctgtgtcctccgccacccggcgaacagcgtccttcatccgctggccctgctgccgcaggctctgcaccatggccacgccctccgccagcgtcagggccggggcctcctgccggggggctcccgccaccaccagcacgtattccccccgtggctccttctcccggtacagcgccacagcgccggacagggtggtgcggatggtctcctcgtggagcttggtcagctctcgacacagagccaccggccgatctcccagcagctccagcatatccgccagcgtgggccgcagcttgtggggcgcctcgtggaacaccatggtgcgctcctccgctgccagccgggtcagtgcctcccgccgctccttcttattggcggagaggaatccctcaaaggtgaaacgcccggtaggcagacccgacaccgccagagcgcacacggcggcgcagcagccggggatggcctgcaccgtgacgctgttttctccgcacagccgcaccagatcctcgccgggatcgctgatggcaggggtcccggcgtccgtcaccagcgcacacgtctctccggccagcagccgggccagaatggcctgcccggcggcggcccggttgtgctcgtggtagctgaccagcggttttttgatgtcgaaatggttcagcagcttcatggacacacgggtgtcttcggcggcgatgaagtctgcctcctgcaaggtctgcaccccacggggggacagatcccccagattgccgatgggggtggctaccagatataacgttccgctcatagcgcttgctcctcctcacgaaaataggcacggcgatgctccgccgtctcccggccgtcggggccgtagagcagcagtgtgggctctgcccgcagcccaggcttcccaccccggcggcactccagcagcaccagaccgggagccccgacggcatcgtgctgcaccagccgcagccgcttgggctccagcccgaagcggcgggccatctccagcagttccgccagccgctcggtggggaatactacgcagaagcgcccgccccaccgcagcagccaaccggcggcccggcacacatcctccagcgtacacaccacctccgaccgggcgacactccgtgtctcctgcggagagacacgccccgccttcggagggaaatagggaggattggacaccacaaggtcgaacccgcccgccgggggcaggtcctcccgccgccgcaggtccccctgccggcacagcagccgctcctgccagccgctgcgctgggcggtgcgccgggccagacggcaggcgtcctcccgcagctccagcccggtgacggtgagggatggctcccgtgtcagcagcagcgcccccagcagacccgtcccggcccccagatcacagacctgctccccacgccgcaggacgggaaagccccccaacagaaaggtatccgtggaggggcggaacagaccgtcatcccagtaaaagccctgatcgccccgcagccggtcccagtgctccatgtgtacccctccttttcctgtgcagagataccctattatatttgccgccacgcatgagatgacgatcggtattctgccgggatcattaaggg

SEQ ID NO: 12449 - DNA, 92754 bp, Unknown
  gut microbiota DNA sequence
ggagcgcctccggcgcaagacggcaaaaaaacaccggagcatccgctccggtgtttttcgtccttgctatgtaattattcagcagggctgatagcgccattggggcaggtatcgctgcaagtaccgcagtccaggcaggagttagcgtcgatcacgtaatgatcgtcaccctgagaaatggcaccaacaggacatacgtctgcgcaagcaccgcagctgacgcagccggaaccgatctgataagccatgggaagcacctccattaagatttgtactgttattgtatcatgaaaatgaaaaaaagcaaccccttcccctatggaaaattttgttttgtcgatttttgcggcgatcaggcgaaattggacaaaaaacggacagaaacaggacagcatctggacaggaaaaaatgtccgaaaacgggacagccggacagggcttttgtccaggagagactgcaaaaaatgccgggagacattttctctgaccccggtacatagaatggagggtatggaaacggagaggagtggagcccatggagcgaaagcccgatatcgacgatctgatcttcggggacgagcgcccgataagtcagcgctgaaaatggaaaaacaggacgccccgtatcggcgtcctgtttttatcatttagcggtgaggaggtaactcatgccgctccagaggatgaaataaagggttacagctgtacccgattctccttggtccaggtggtgagacccagacggggataccgatgacgcagggcctcgatctcctccgtgctgccgcccatgagggagatgcgatcgaccttggccagatcggcggcgggcatcgtgtggttggaggtggccccgcaggcctcgcagtggtagtacttaccatccgccatcagagagatctggctgctgccgcagacggcgcagcgattcattttcgtaaccagtgccatattcaaacaactcctttctcttactgtctatactttatcacaggaaatgcaatttgtaaaacgcatcattttcatctgaaacatgagagtttttcatacattaaacattgtatacaatatgaatcgacaggcagaggcaggccgttggcgaaacaatacaaaaggcgaaaagagcgctcaaaagggaggttttcggaagctgcatacagacctgagaggggacggggagagggcgactgtaagtatagcgggacgagggcaactgtaagtatagcggggcgagggacggaacatagctggcgaaagaagagcggggccattgggagtatggaggggggagagccggggggatcggcggacctgcgcaggaagaaacgatggaagcagcggtgctggggcaggaaatatatggaaataataactggatgcggtgagggcgtggtatacaggtaagggcgaatataaggggacgatatgcagcgaaaatgtatatcaccggcagacagacaggagaatatgcaaaagagtgcatacaaaaagtgcgtcgctgcgtgaccattcgcagcgacgcactttttgacccggacggcatgaagaaggaaaagaaagaatctgccgtcctcgacccactcgacggctggggaacatggtccgccgcaaccacatggcagacaggatcatccagccggaggacttccgatccggtgctgtatgatcgtcctctttacggtacacgcagagatatgtaccgaaagccctctgagatggtcttagtgtaacacagaaaaagagatatgtaaaacgcatgattttcataaaaagcatgagacattttcatatatgaggaaaaataccgcctgcccttcatgggcaggcggcagaggtgataaaggttcagtcgtgcggggcaaatcagcaggggagacagaatgatacatcgcaggcagagcgggcccggtaactgcgttgtcagtgggctcagcggatcgctgcacgcacagccagcgccacaacgatttcaagaacgaataatccagccaacatccagtccaaaagcataaccagatcctccttcaaaaagttttagagccgaggttccttggaaacggttggccaacctgctttcttaaggtaactatagaatatcatgatctggaaaataagtaaagcgaatgaatttcattgatcttatgaagaaaagtttgcatacgggggcgggatatggtatgctggaaaacaagggggcgaggaaatggacttgaccaaatatcaggtatttctgaaaaccgtggagtgcggcagctttacggcggccgcccagcagctgagcttcacccaatccggcgtcagtcacgccattagtgggctggaggaggagctgggggtaacgctgctgagccgcagccgggggggcgtgaccctgacggcggacggttgggcgctgatgccttatattcaggagatctgccgccagcaacggagcatcgaggaacgggccaaggatctgcgggggctggagaccggcgtggtgcgggtggcggtgttcaccagcgtgtcggtgcagtggatgccctacatcctgaaaagctttcgggagcagtatcccaacattgaatttgagctgctgccctccaactacaacacggagatcgcccggtggatccaggacggtacggcggactgcggctttctggtgctgcccacggagccgaatctggactgctggctattgcagcgggaccagtggaaggccattgtgccgtgggatcatccgctggcggggcgggagccgtttccaccggaggcactggcccagtatcccttcattctgctggaggagggagacgactacgaaattcaggaggtgctggacacgctgggggtgcagcccaatgtgcagtaccgggtgcagcaggatcaggtgattttggccatggtgtcctgcggactgggcatcagtatcatggaggagctgatgctggagcagaacgaatatccggtggtggcctgttccttcgccaagcccttttatcggaacatcggcatctgcgtcaaggacaagcgggccatctcccgctccacctaccgttttgtggagcacgtgcggcggtgggtgctggagaagtacagcggatgagccatacggcagccggcgacagggcggggatacaccatatatataatatatacccggattttttgacagggcggggaggcgaggcttgctgccggaaccagaaccgtaactcatcggaataggagacgaaaccatggtttttatggtaatcatttcatcggtacttttggccgtttgcacctcattgaagccgatctatctccaaaatgccattgatgcggtggacgcaggcgcagacggcgcacttaccatgtttctgtgctatgtggccagcattctgggcatcctgctgtttgagacggcccggcagctcagcacggggaaatatcggaacagcagactgttcagcctcaagcggaaggtcatggcgcatattgtttatatgccgccccggaaattccgggaacagcagggacagaactatgtcaccacgctgaacaatgagatcgagatgctggtggacagctattatgtcacccgcttggaattggcctacagcattctggtattgatcacctgtgtgatcgcattgctgtacatcaacggctatctggcgatgatcatcattgtttccaccgtgtgccccattgtggcctccgccgtgcaggggaaggcactggaaaaacggaccaatttctatacgatgaccctggaaaagctcaatgtcatgatcggcaatctgatccacgggtaccccaccatcaaggtaaaccacatagagcgggaatacctgcaaacgctggaacaggataacgagaaagccgcccacgcagagtttgccaaggcgaaaacaaaaattcgggtgaatatgatcatcggcctgctgtcctatatcggcgaggccgtgatggtgggattcagcatttacgagatctccaaggggcggctgtccgtgggcgctttggtgggtgcgctgcaattatcggaaatgctggtgatccccaccaacagcatttcctatcagatatcggaaatgcggagcgtcaccggtattcgccagaagatccggcagctgctgtctgtccctgacagcgctgcggcgttgacagcagttcccacgatcgagtacatggagcttgacaatgtgtccttccggcatgaagaaaaggtcattctttcccatgcgaattatcggttcgaggcggggaggaaatacctgattttaggcgaaaacggaagcggaaagagcacgctgttcaagctgctgaccgggctggaaacagagtatgaggggtgtatctcggtgaacggaacggatatccgccagctgtggcccgctctttatgaccagatcggcgtcgtgcttcaggacgcgtttatctttgatgatacgtttctccggaatgtcacgctttatcgccctgcattgcgggaacgggccgtatcggcgatgcattctctgggaatggacgcctttcttgcgtctcatgatctggatcaggtattccagaacacgaagggcaatctgtccggtggagagcggcaaaagctggcgctggcccgggtgctgaccgagaataagcgtgtcatcttcctggacgaagccactgccaatatggacaagggcagcagccagaaaattttgtcccagctgctccggacggacggcttgaccgtcatcagcatcgaacacaaggtgagcccggagatcctgccgctgtatgatacgatccttgaattgagggacactcacttggaagaaagggcatagggcgatccggctgccgggagatgaaggtggagatgggcttttaccggcggggcggagaggcaggccttgacaagcgggcgtccggcagatacaataaaagttcaggagcgatccgtgaaaaacgataacaatataaaggattgagagaattatggcaaaagatcagagaaacgtggaagccatcacccccatggaggtggacttcgccaagtggtacaccgacatctgcctgaaggcggagctggtggactacgcctccgtgaagggcttcatgatcctgcggccctacggctacgccatctgggagaacatccagcgcatcatggacgggatgttcaaaaagaccggacacgtcaacgtggcgatgccggtgctgatcccggagagcctgctgaagaaggagggcgagctggtggagggcttcgccccggaggtggcgtgggtcaccatgggcggcagcgagaagctggaggagcggctggccttccggcccacctcggagaccatgttctgcgaccactggcacaatgtattgcagagctaccgggagctgcccatgctgtataaccagtggtgctccgtcatccgctgggaaaagactacccgccccttcctgcgctccagggagttctggtggcaggagggccacaccatccatgagacggcggaggaggccattgccgagacggagcagcagctgaactgctacgccgacttctgccgggatgcgctggccatgccggtggtgaagggccgcaagaccgacaaggagaagtttgccggggccgaggccacctacaccatcgaggccatgatgaaggaccacaaggccctccagtccggcaccagccactatttcggggacaagttctcccgtgcctacgacgtgaccttcaccggccgggacaacaagctgcagtatcccttccagaccagctggggcagcaccacccgcctcatcggcgcctgcatcatgacccactccgacaacaacggtctggtgctgccgccggccattgcccccattcaggtggtggtggtgccggtggcccagcacaagcccggcgtgctggacgctgcggcggctctgcgggaccgtctgacggcgctggagctgcgggtgaagatggacgacagcgagcagtcccccggctggaagtatgcccagtatgagatgaagggcgtgccgctgcgggtggagatcggccccaaggacatggagaagcagcagtgctgcatcgcccggcgtgacaccggcgaaaaggtgttcgtgccgctgtcggagctggaggctaccgtgcaggctctgctgaaggaggtacatgacaacctctacgccatggcggagaagaatctggaggacaacaccttcgacttcaccacatgggaggaagtgaaggagatggcccagggcaagggcggcttcgcccgcaccaagtggtgcggcagcctggagtgcgagctggccatgaaggagaaggctggcgtgtccagccgctgtatgcccctgaagcagtccggcaccgtgggcaaatgccctgtgtgcggcaaggagtgtaccaccgacatctactggggcgtggcgtattgatgccgggaactgccttgtcttgcccgggtttacgggcgggggcgaggtttggcgggctccacaaaaaatattgaaaaatttcatgaaaaaagcgaaaaatccccttgacaaaaggggatttttcctttaatatagcagggtacgtgcgctgagggtgctgcacacccggaggcgtgtacaaatgcgatgaaccgggagattgctccgagaggaggtaacttccggggagtatgtccgatcatcgggcggctgagaagtttctgcacgtcagcgtagatcgctgcgccagaaggacaccggccggattttgcgccggtgtttcttatgagccggaatgatacgcacggaacggcgtataagaactctcgccgtacggcagttggtcacgcaatcaaaaaccgtacgaaataatggaggaacgaaccaaatggcaaaagaaatgatccgcattcgtctgaaggcctatgaccatcaggtcatcgaccagagcgcagagaagatcgtcgagaccgccaagcgcaccggcgctaccgtctccggccccatccctctgcccaccaagaaggagatcgtcaccatcctgcgcgctacccacaagtataaggatagccgtgagcagtttgagcgccgcacccacaagcgcctgatcgacatcaccaactccacccccaagaccgtggaggctctgatggctctggatctgcccgccggtgtggagatcgagatcaagctgtaagtacctttatatataggtacacgctgtggaaaaccacggcacccggcgcaatgggcgccggaacaaatgaatttgcttgctacccgaccgtcggctgacttgcgtgaggccggcgggggttacgtcggcagagcaagcgatctgtacccaatgcagattgaactatgccgaccaataacctttaaggaggatcatacatgaaagcaatcatcggcaagaaggttggcatgtctcagatcttcgacgaaaacggcaaggtcatccccgtcaccgtcatcgaggcgggtccctgcaccgtcgtccagaagaaaacttccgataaggaaggctatgaggctgttcagctgggctatgaggacattcctgagcggaagctgtccaagcccgaaatgggccacctgaacaaggctggcgtggcccccaagaagtacctgcgtgagttcaacctggataacgccgccgaactgaacgttggcgacatcgtcaaggctgacaccttcaaagagggcgactttgtggacgtgaccggcaccagcaagggccacggctatcagggcgtcatcaagcgctggggcgcacagcgcactcccaccagccacggcggcggccctgtccatcgtcacgctggttccatgggctccaccaccgatccctcccgtatcttcaagggcaagatcggcgcaggccagatgggtgttgaccaggtcaccatccagaatctggacatcgtcaaggtggacgcagatctgaacctcatcgccgtccggggcgccgtacccggccctaagggcggtctggtcctcatcaagagcaccgttaagacccatcgtgtcaagcacgctgacagcggcatcagcaacaacccgcagaaggcttccggtcgtaatccccagaaggcttccgcccgtaataagtaaggaaaggagtgcttgtaatgtctaccatcaacgttttgaacatggccggcgagaccgtcggtaccgtggagctgtgcgacggcatttttggcatcgagcccaatcaggccgttgtgcatgaagtggtcaagaaccacctggcgaattgccgtcagggcacgcagagcgctctgacccgtgccgaggtctccggcggcggcaagaagccctggcgtcagaagggtaccggccacgcccgtcagggcagcacccgtgcgcctcagtggacccacggcggcatcgtgttcgctcccaagccccgcagctactcttacgttctgaataagaaggtcaagagactggctatgaagtccgctctgtccgccaaggcggccgcaggcgagatcatcgttgtcgattccatcaagctcgacagcatcaagaccaaggacttccgtgcgttcctgaacgccgtcaaggccgacggcaagtccctggtggtcactcccgccaaggacgagatcgtcgtcaagagcgcccgcaatatccccggcgtcgagaccaccatggccaacctgatgaacgtctacgacattctcaaggccaagtatctggtcctcgataaggaagccctcgcagtaatcgaggaggtgtttgcgtaatggctaacgtttacgacatcattattcgtcccatcatcaccgagcgctccatggaggccaccggcaccaagaagtacgtctttgaagtggctcccaccgccggtaagatcgagatcaagaacgccgtggagcagatcttcggcgtgaaggtggccaaggtcaacaccatcaactatgatggcaaggccaagcgtctgggcgctgcccgtcccggccgccgcaagagctggaagaaagcttacgtccagctgacccaggactccaagaccatcgagttcttcgagggtatggtgtaagaaaggaaggagtgtaagaaatgtctatcaaaacttttaagccgaccaccccttcccgccggcatatgactgtctccggcttcgacggcattgataagcacgccaagcctgagtccagcctgaccgaggtcctgaagaagaacgctggtcgcaacagctatggccgcatcaccgtccgccatcgcggcggcggcgagaagcgcaagtatcgtgtcatcgacttcaagcgtgacaagacggatatgcccgccactgtcctgcgtctggagtacgatcccaaccgcagcgccaacatcgctctggtgcagtatgaggacggcgagaagcggtacatcatcgctcccgtgggtctgaccgccggtgacaaggtggtctcctccgccgctgcagatatcaagcccggcaactgcctgcccatcgccaacatccctgtgggtaccgtgatccacaatgtggagatgcaccccggcaagggcgctcagctggttcgttccgccggcgcctatgcacagctgatggcaaaggagggcgagaacgcccagatccgtatgccctccggcgaggtccgcatcatccgcaccaactgcaccgcctgcatcggtcaggtgggcaatctggagcacgagaacgttcagatcggtaaggccggccggaagcgccacatgggttggcgtcccaccgtccgtggttccgtcatgaacccctgcgaccacccccacggcggtggtgagggcaaggctcctgtgggccgtcccggtcctgttaccccctggggtaagccggctctgggctacaagacccgcaagaccaagaatcctactgacaagtttattgtcaagcgccgcaatgtgaagtaagggaggcaagtagaatatgagcagatctgtcaaaaaaggcccgtatgttgcccctgagctgctgaagcgggtcgaggaaatgaacaagaagggcgagaagaacgtgctgaagacctggagccgcagctccaccatcttccccgcattcgtgggtcacaccatcgccgttcacgatggccgccgtcatgtacccgtctatgtccaggaggacatggtgggtcacaagctgggtgagttcgctcccacccggaccttccgtggtcacgccaagtctaagtaaggaggatgcacagtacaatggaagctaaagcttatttgagatacgtccgcatctctccccgtaagatccagatcgtgtgcgatctgatccgtggaaaagatgctcagactgccatggcgatcctgatgcagacccccaaggctgcctccgagcccctgatgaagctcctgaagagcgcttgcgccaatgcggagaacaacttcagcatggaccctgagaagctggtggtcacccaggtgttcgctacccccggccccattctgaagagaatgatgccccgtgctcagggccgtgcctatcgcatcaacaagagaacctctcacgtgacgctggccgtcgctgagaaagagtaagggagggagacagttttatgggacagaaagttaatccccacggcttcagagtgggcgtcatcaaagactgggattcccgttggtatgccagcaatgagaaggtcggcgatcttctggtcgaggatcacaagatccgtgtgtacctgaagaagctgctgttcgctgccggtgtctccaagatcgagatcgagcgcagcaacgaggtcgtcaccgtttacctgcacgtggcccgccccggcgtggtcatcggcaagggcggcgtgcagatcgaggagtaccgcaagagcgtggagaagcttatcggcaagaccgtgaagctgaacatcgtcgaggttcgcaaccccgatatggacgctcagctggtggccgagaacatcgccgctcagctggagaagcgtatctcccaccgccgtgccatgaagaatgccatgggccgtgccatgcgtgccggcgccaagggcatcaaggtcaactgctccggtcgtctgggcggtcgtgagatcgctggctccgagcactatcacgagggtaccatccccctgcagactctgcgtgccgacatcgactacggcttcgctgaggccgccaccaccttcggccgcatcggcgtgaaggtgtggatctacaagggcgagatcctgtctcaggctctgcggactaccccccgcaccctggataccagcaagccttatcaggagcgccgtgagcgccgtggccgccgtgatggcgatcgccgtggcggcttccgccgtgatggtcagggcttcaaccgtgaccgccagaacggcggctataaccgtggtccccgccctgagggcggcttccgcaagcccgcagaaaagaaagaaggaggcgctcagtaatgcttctgcccaagagagttaagtaccgcagagtacaccgtggccgcctcaccggcaaggccaccagaggcaacaaggtcacctacggtgagtttggcctcgttgcgctggaacccgcatggatcaccagcaatcagatcgaagcagcccgtatcgccatgacccgttacaccaagcgtggcggtcaggtctggatcaagatcttccccgataagcccatcaccgagaagccggccgagacccgcatgggttccggtaagggctctcccgagtattgggtcgccgttgttaagcccggccgtgtcatgttcgagatcgccggtgtctccgaagaggtcgcacgtgaggctctgcgtctggccagccacaagctgcccatcaagaccaagatcgtcaagcgtgaggatctggaagctcaggaagtaggtgaatgagatgaaggcaactgaagtacgtgcaatgagcgtggagcagctgaatgagaagctgacttccctgaagaaggatctgttcttcctgcgtatgcagcacgccaccaatcagctggacaatcctctcaagatcgctgaaaccaagcgtgatattgcccgcatcaagaccgtgatccgtgaaaaggaggagaactgaaatggaagagaagagaatttcctcccgcaagacccgtgtgggtaaggtcgtgtccgacaagatggataagaccgtggtggtcgccatcgaggaccgtgttgcccatcctctgtataagaagatcgtcggccgcacctataagctgaaggcccacgatgaggagaacacctgcggcgtaggcgatatcgtgaaggtgatggagacccgccccttgtccaaggacaagcgttggcgtgtggtcgagatcgttgaaaaggcgaagtaaggaggtaaccgagaatgattcagcaagagtcctatctgaaggttgccgataataccggcgccaaggagatcaagtgcattcgcgtcctgggcggctccaagcgcaagtacggcaacatcggtgatgtgatcgttgcctctgtgcgtaagtctgctcccggcggtcaggtgaagaagggcgaggtggtcaaggccgttatcgtccgcagcgccaagggcgtccgtcgtgccgacggcacctatgtccgctttgacgacaatgccgccgtcctcatcaaggacgacaaaaaccccagaggtacccgtatctttgggcccgttgctcgtgagctgcgtgacaaggattacatgaagatcctgtccctcgctcccgaagttatttgatggaggggccagagaatgaatagtctgaaaatcaagaagaacgacaccgtcgttgttctgtccggcaaggacaagggcaagcagggtaaggtgctgggcaccatccccagcgaagccaaggtcgtggtggagggcatcaacaaggtcacctgccacatcaagccccgcaagcagggcgaggagggcggcatcacccagcgtgaggctgctatctacgccagcaaggtgcaggtcgtttgccccaagtgcggcaagggcacccgtgtggcttacgtcatcaaggacggcaagaaggcccgcacctgcaagaagtgcggcgctgagctgtgagaaaggagagagtaagaaatggcacgtctgaaagtcaagtatactgaagaagtggctcccgctctcttcaagaagttcggttacaagagcaccatgcagatccccaagatcgagaagatcgttgtcaatgtgggctgcggcgaggctcgtgagaaccccaaggtcctggacgccgtggtgaaggatctgtccgccatcaccggccagaaggccatcatcaccatcgccaagaagtctgttgcaaacttcaagctgcgtgagggtatgcccgtgggcgccaaggtcacgctgcgtggcgacaagatgtgggagttcctggatcgcctgttcaacgtggctctgccccgtgtgcgtgacttccgtggtatcagcgccaacgccttcgacggccgtggcaactatgccctgggcgtcaaggagcagctgatcttccccgagatcgagtacgacaagatcgacaagatccgtggtatggacatcgtcatctgcaccaccgctcagaccgatgaagaagcccgtgagctgctgaccctggtcggcgctccctttgaacgctgattaggaggagaaacaccatggcaaagaagtctatgatcctgaagcagcaggctcccgctaagttctccacccgtaagtacaaccgctgcaagctgtgcggccgccctcacgcctacctgcgtgactacggcgtttgccgtatctgcttccgcacgctggcttataagggcgagatccccggtgtccgcaaggcttcctggtaatctttttccgccatacttcgttggtgcggctcgacgtacacaaagtacgccatcgcctcgccgcctcgtctggcgaaaaaatcctggatctatctcatacggagctggcatggcttgctgtgcgcaaagtacagcggtaccctgccgcctcgtatgacgaaagagtccattccgttatatactgccggtgggcgggccgcacaggtgcggcggcgctgccggtaggacgggaaccgtgtgggaggagctatctccctgcaaagcaagtgcctaagagcgctgtgcgctccggcgataaaggatggcgaaaggtcactggtaattaaacatcgctggtcatcggacgatgcctaaattatcagtgatacctcgctacctcaacagggctttccctgtaactctaaattaggaggaaacaagtatgcacatcactgatcctgttgccgatatgctgacccgtatccgcaacgccaacaatgccaagcatgagaccgttgacgtccctgcctccaacatgaagaagagcatcgctcagatcctgctggatgagggctacatcaaggcctatcaggtcgtggacgacggtacccaggggaccattcacatcaccctgaagtacaacgccggcaaggagaaggtcatctccggtctgcgccgtgtgtccaagcccggtctgcgtgtgtacgtgggtgccgatgagctgccccgtgtgctgcgtggtcttggtattgcgatcgtatccacctctaagggcgtcatgaccgacaaggctgctcgtgcagcacacgtcggcggtgaagtccttgcgtttgtttggtaaggagggtattgaacaatgtcgagaattggcagaatgcccattaccgtccccgctggtgtggaagtcaccattgcggagaacaacgttgtcaccgtcaagggccccaagggtactctgacgcaggctctgcgtccggagatgatcctggagcaggagggcaacgtcatccatgtcaagcgcccctctgacgacaagctgcactgcgctctgcacggcatgacccgtgcgctgctgcacaacatggtcgtcggcgtcagcgaaggcttcaagaaggagttggaggtcaacggtatcggttaccgtgccgccaaggagggcaagaacctggtcatgaacctgggctactctcatcaggtcatcgttcctgagatcgacggcatcaccattgatgtccccgctcagaacaagatcgtcatctccggtcccgataagcagaaggtgggccagtttgcggcggaagtccgtgaaaagcgtcctcccgagccttataagggcaagggcatcaagtatgtcgatgaagtcatccgccgcaaggtcggtaagaccggcgccaagaagtaaggaggtgtgccgtaatgattaaaagacccaataccaacgctcagcgtctgaagcgtcataagagagtccgtgccaaggtgttcggcactaccgagcgtccccgtctgaacgtgttccgcagcgagaagaacatctacgctcaggtcatcgacgacgtggccggcaacaccctggtctccgcctcctccctggataaggagatcgagggcaacggcggcaacaagaccgccgcccgtgccgtgggcaagctggtggccgagcgctgcaaggccaagggcatcgacaccgtcgtgttcgaccgtggcggttacctgtatcacggccgcgtggccgagctggccgaaggcgcccgtgagggcggcctggaattctaagagaggaggataactgacaatggcaagatttgaaagagaacccagcgagtatatcgaaaaagtagttgctacgaaccgtgtatccaagacggtcaagggcggtcgtgtcatgaagttctccgctctgatggtggtgggcgacggcaagggcaaggtcggtttcggccttggtaaggccgccgaggtccctgaggccatccgcaagggcatcgaggatgccaagaagaacatgatcaccgtgtccctgtccggcagcaccatcccccacgagatcatcggtgaggccggtgcaggccgtgtgctgatgaagcccgctgctcccggtaccggcgtgatcgccggcggccccgtgcgtatcatcatggaagctgccggtatcaaggatatccgtacgaagtgcctgcgctccaataccgcagtcaatgtggtagccgccacctttgagggcctgaaggccctgcgcaccccggaagaggtcgcccgcacccgtggcaagagcgtggacgagatcgtgggctaaggaggcgtgaacaatggctaatctgaacatcaagctcgtcaagagccttaacggcagactggaaaagcacattgccactgccaactccatgggcctgcggaagatcggtgacaccaccgttcagcccgacaacgcccagaccaagggcaagatcgccaagatcggctatctgctgcaggtcaccgaagtagaataaggaggtgcgagagcatgaaactgaatgaactgtctcccgcagccggctccaccaaggaagcttaccgcaagggtcggggcagcggctccggcaacggcaagactgccggccgtggtcacaagggccagaaggcccgctccggcggcggcacccgcattggctttgagggcggccagatgcctctggcccgccgcatccccaagcgtggcttcaacaacatttttgcaaagcccctggaaatcatcaacctggccagtctcgacaagttcgaggatggcgatatcgtcaccgcagaggccctgcttgccaagggaattttgagcaagtgtgaatacggctacaaggttctgggtaacggcaaagttaccaagaaggtgaccgtacaggccgctgctttctctcaggctgctaaggaagcgatcgaagcagccggaggaaaggcagaggtgatctaagtgattcagacgatcaaaaaggcgtggggtattcctgagcttcgcaaaaagatcattttcaccgcactgatcctgctgattttccgcatcggcaatgccatccccgttccctatgtgaacacggatctgctgagcagctatctggagggtatgagcaccaccgttctgggcctgtacaatgtcatgtccggcggcgccttcgctcaggccaccgtctttgcactgggcgtacagccctacatcaacagctccatcatcatccagctgctgaccatcgccattcccgctctggagcggctggcccgtgacggcggcgaggagggcaagaagaagatccagtccatcacccgttacgctacggtggccatcgccatcctgcagggctggggctactatatgctgatgaagaactacggcatcctgaccgagaaatccttctgggtggctctggtcattatcgcctccttcatcgccggttcttccttcgtcatgtggatgggcgagcagatcaccgagttcggtatcggcaacggtatctccatcatcctgtttgccggcatcctgtcccgtgtccccagcatggtctcctccatgatcagcggactgcgggccggtacgctggcctggtgggcagcggtgctggtggtgctgggcatcctggctctgatcgtcctgatcacttgggtcaacggcgctgagcgccgtatcccggtgcagtatgccaaacgtcaggtgggccgcaagatgtacggcggtcaggcatccaccctccccatgaaggtgaatatgtccggcgttctgcccatcatcttcgctcagtccatcgccatgatcccctctaccatcgccgctttctgcaagcagccggcggagggtaccttctggtatggcttcctgaacgctattgacaccaagtccgtgctgtacatgatcttctacttcctgatgatcattgctttcagctatttctatgccaccattcagttcaaccccgtggagatctccaacaacctgaagaagaatggcggcttcattcccggcttccgtcccggcaagccgaccaccgacttcattaagaaggtcctgaacaaggtcaccctgttcggcgctatctatctgggcgtcgtggcgatcctgcccctgctgatcggcaagatcgtggggaactcctccctgtccatcggcggtacgtccgtcatcatcgtggtgggcgttgcgctggagaccgtacaggcgctggagtcccagatgctgatgcgtcagtataagggcttcctggaataattgaggtgcaacatgaaactgatccttttgggcgctccgggtgccggtaagggtactcaggcagagattctgaagaagaagctggagatccccacgatctccacaggcaacattctgcgtgccgctgtgaaaaacggcacgcccacaggtttgaaggccaaggagtatatggacgcaggcaagctggtgccggatgaggtcatcatcggcatcatcaacgaccgcctgcaggagcccgactgcgccaacggctacattctggacggggtgccccgcaccatcgctcaggcggaggccatggagcaggccggtatcagcttcgatgcagtggtggccatcgagatccctgacgagaagatcgttgctcggatgggcggccggcgtgtgtgcgagcactgcggcgccagctaccacattgtgaacatccccccgaaaacggagggcgtgtgcgatgtgtgcggcggcaagctcgtgcagcgcaaggatgatgaccccgagacggtccgtgaccggctggaggtttatcatagagagacagaacctctgaagggcttttacgaggcccgtgggattctgaaaactgtggaggaccagtccactgtggacgggactacgcaggcgatcctgcgtgcgctgggagttgacgcatgatcactctgaaatccgcacacgagatcgaactgatgcgccgggcgggaaaaattaccgcggctgcccgtgctctggcacgggaaatggtaaaacccggcgtaacaacccaccaaatcgataaggcagtgtttgactttatccgctcccatggagcgaccccctcgttcctgcactacaatggctatcccgccagcgtatgcgtctccgtcaacgacgagatcatccacggcattcccggtccacgggtattgcaggagggcgatgtcgtcagcgtggacgtgggcgcctacatcggcggcgtccatggcgactgcgccggcacatacccctgcgggaaggtgtccgacgaggacatggagctgatccgtgtgacacaggagagcttcttccaggggctgaaatacgccagggagggctatcgcctgtccgacatctctgccgctgtgcagcagtatgccgagtcgcatggctattccatcgtgcgggagtatgtgggtcacggcatcggtcaccatatgcacgagccgccggaggtacccaacttcggcaagcccggacatggcccccgcctgttgcggggcatgaccatcgccgtggagcctatggtcaacgcaggctccgcagccatccggcagatgccggacggctggacggtgaaaactgcggacggcaagaaggcggcccactacgagaataccatcctgatcaccgccggcgacccggagcttctgacggacgccagcgagtctctggtataaagtctatggacattgccatatccaacatcgtaagatccacggccggcagggacaagggagatctcttcttcgtgcttgcgacggagggagacttcctcctgctggctgacggaaaacggcgccgggtggaggaccccaagcgaaagcgacggaagcatacggagctttacggggagggccacagcccggtggccgagaagatcagaagcggcgaaaaaatcaccaatagtgagcttcgtaaagccttagccgcattcagcggcggtaatcaagaccaggagggataacgacttggcaaaatccgatatgatcgaagtggagggtgtggtagtcgaatcactgcctaacaccacattccaggtagacattggaaatggacacacgattttggcgcatatttccggaaagctcagaatgaatttcatcaggattctgcccggcgacaaggtgacggtggaaatgtcaccctacgacctgacccgtggccggattacctggcgtagtaagtaggaggtttatgaacaatgaaagtaagaccgtccgtgaagcccatgtgcgagaagtgcaagatcattcgcagaaagggccgtgtaatggtgatctgcgaaaatccgaagcataagcagagacagggctaagtagaaagtggaggtgctttaagagtatggcacgtattgccggtattgacctgcccaaggataagcgaatcgagatcggtttgacctatatctatggtattggcagaaagagcgctcaggacatcctggcgcagacaggcatcaaccccgacacccgggtgaaggatctgaccgaggccgaggaagccaagcttcgtgaggccattgaccagagctataccgtggaaggcgacctgcgccgtcaggtggctctggacatcaagcgtctgacggagatcggctgctaccgtggtacccgtcatcgccgtgggctgcccgttcgtggtcagcgcagcaagaccaacgcccgcacccgcaagggtcccaagaagaccattgccaacaagaagaagtaaggagggaagatagaatatggctaacgctaagaccggtaagaaggttattcgccgccgtcgtgaaaagaagaacgtcgagaagggccaggtccatatccgctcttccttcaacaacaccatggtcaccgtcaccgacgcacagggcaacgctctgtcctgggcctcctccggtggtctaggcttccgtggcagcaagaagtctacccccttcgctgcccagagtgccgctgagacggctgccaaggccgctatggagcatggcctgaagaccgtggaggtctttgtcaagggccccggccagggccgtgaggctgccatccgcgcactgcaggccgtgggcctggaggtgacgatgatcaaggacgtcacccccatcccccacaacggatgccgcccccccaagcgtcgtcgtgtgtaatcggaacaaggaggataagtagaatatggctaagaatatgcagcctatcgctaagcgctgcaaggcgctgggcatttctcctaccgtcatgggttactccaagaaggagaccaagcgcaaccccggcggccagatgagaaagaagaagagcgagtacgccatccagctcaacgagaagcagaaggtcaagttcgtctacggtattctggagaagcagttccatatgtactatgagaaggcttcccgtatgcccggcaagaccggcgagaacctgctgaccctggtggagcgccgtctggacaacgtggtgtatcgtctgggcttcgccacgacccgccgtgaggcccgtcagctggtgagccacgctcacttcaccgtcaacggtcagaaggtgaacatcccctcctacctggtgcgtgtgggcgatgtcattgaggtcaaggagagcagccgctcttccgccgccttcaagcgcctgaccgccgaggatgccccgatggtgaccgttcccacttggctggagcgtgacaagaacgccctgaagggtaccgtgtctcgtatgcccgcccgtgaggacattgatatgcccatcgaggagcatctcatcgtcgagctgtactccaagtaatagggtcgagaccctcaccaaacgcatgaaccaaatcaggtgcagactcgtctgcgccgcatagagaatgaaggagggtactgcatgatcgaaattgagaagccccagatcgagtgtgttgaaacgcccggcgatgcttcctatggaaaatatgtgatcgaacccctggagcgtggctatggaacgactctgggcaatgcgctgcggcgcatcctgctctcctccctgcctggcacggcggcgaccagcatcaagatcgccggtgtgcagcatgagttttccaccattcccggtgtgaaagaggacgtgacggagatcgttctgaacgtcaagaacctgctgaccaagctgcattgcgagggcactaagaccgtctttatcgaggcggctggcccctgcgaggtgacggccggcgacatcaagcccgatggcgaggtggaggtgctgaatccggagctgcacattgcgacgctggacgtgggcgccaccctgagcatggaaatcaccctgagccacggccgtggctacgtctccgctgaccgcaacaaggctctgcgggccggcgtgatcggtgtgatccccatcgactccatctacacccccgtgtacaaggtcaactacacggtggagaacacccgtgtcggcaacctcagcgacttcgacaagctgacgctggaggtctggacggattccaccatcaccgcccgtgatgccgtgtctctgggcgccaagatcctctgcgatcacttcgcactgttcaccgacctgtccgacaccatgggcgataagtccacggtggtggagaaggctccggacgataaggacaagatgctggagatgaccattgaggagctggatttgtctgtccgcagcttcaactgcctgaagcgtgccaacatcaacaccgtggaggatctgatctccaagacggaggacgagatgatgaaggtgcgtaatctgggacgcaagtcgctggaggaagtcatcaacaagctggccatgatgggtctgtccctggccgacgaagagaacaactaactcgcactctgtgcgaatatccttacaaggaggaaacagaaatgcccggaactcgtaagctcggtaagactaccgatcagcgtatggcgatgctccgtcagcaggtcaccgatttcctggataacggtcggatggagaccaccatcacccgtgccaaggagatccagcccatggctgagaaaatgatcaccttgggcaagaagggtgatctggcagcgtatcgtcaggctttgagcttcattaccagagaggatgttgcccacaagctgttcaaggagatcgctcctgagtatgctgagcgcaacggtggctacacccgcatcatccgcaccggcatccgccgtggcgatgcagcggagaccgctctcatcgaactggtgaagtaaactgccccaactaaaaaagcccttttgtatggcactgccgccatacaaaagggcttttttgcgccttggcaggggaggacagattccgaaagaggtttggcagatctggcacggcattccccttgtgtttcccggcaaagcatggtatactgtcacggaagaaacggcgacgggaggtgcgctatggctaacgtacactgtcagtcctgcggcaggacctatgactatgagaaatacggctgctgccccaactgcggcgcttacaaccgccgaccccggcgggagtgggtggatgtggacggcaccgttcaccacggtgccagcaagcaggagaaggtctgctatgaaaaaaagacctgttacgagaagaaggtctgcttcgaggagcaggcccgtcccgccaagaaaaagaacccgctgcgccagctggagcaggagctccacaaggcggagcgtaccgtccggcagacggctccccggaagagccatgcatccgggaaggagaaagcgtccggcggcatatttatggcggtgttcattgtggcgttcctgtctgcgctgctgccgtccatgatccgcagttgtcaggcgaaaatcgatgagggagagcatcgggtgacggtgacgcccgctcaggaggagataccggccgagcctgcggaagtgtactacctgagtcagggagagtcctttgagtggtacggcgagacggcatgggtgtcgggctataacaccaccgagctggaggatggatacatggaggtgtcggtgctgctgtactatccggaggagcgagaggagctgccggagatgccggagctgtaccacagcgatggcatcagcccgccgttgacgctggatcctcccgacggcggcgatctgtggcggctgaactaccacatctctacgcaggataccagctggctcatggtggagttcacagactcggacgacacggagtatgacgtcattctggaataatgcaagcgcccggcggaattgttttccgccgggcgcagagtctgtcaaaaaagggagagccttccatcaacggggaggaagggtgtgtgcgggaaacccgggaagggtgtcctgcacgatgatgatccccatttttcagagcttttgaagttctgaaaaatgccgcagcgtggcgaaaagactttttcgacacgctgagcgcccggcggaatggtctttccgccgggcgcatatatttgtttcggtgatgctatgaaacgaatcctgcccctgctggtactgtgcctgcttctgacgggctgcgtggcgctgccggttacggctccggcggagcctatgtatctggcactgacctttgatgacgggccatcgccccagtatacgccccgattgctggatggcctgaagcagcggggcgtccacgccacctttttcctcatcggtcagcaggtgcaggactatccggaactggtgcagcgcatccgggcagagggacaccagatcggcaaccacacctatgaccatgcgccgctggaccgcctgtcctgcggtgaggccatggcggacctgagccgctgcgacggcgttttgcaggagctggcaggggaggggacctactgggtccggccgccctacggcttcatcaccgaggaggagctggcggcatggagcacgcccatgctgtactggtctgtggatacctgcgactgggagtgtcgggatgtgcagaaggtgttcgccgccatctgtcaggcgagggacggggatgtgatcctgctgcacgactgctacggaaccagcgtggaggcggccttgcaggccattgactgtttgtcggagcagggggtggaattcgtcaccgtggaggagctgtttgctctccgggggcagactgccgaggccgggcatctgtaccgacgacccgagtgagaaaaatgggcaaaagaaggtccccgaagcaatgcttcggggaccttctttcaagcaatagatcttacagaccggcggcgaccatgcagttcagcaccagcgtcaggataacgaagatggcacccacccacttggtggccttagccagcttggcatccacggagcgggccttgctgcggctcatgtaggaatcagcgatgccgccgatggcaccagacagaccctggctcttaccggactggaacagaacaatgaggatcagcaccaaagcagacagcagctgcagaatcgtaacagcaattttcataatctttccctccaacaaaataaagcccaaagaggctattcttcaaagtacaacccatcataccatatcgtccacggaatttcaaggggaaactccctttttgcccgaaaaaattcggaaaaatccatcgaacatctgttgcaaacggagagaatatatggtatactatgaaaaaccttatgtaaacaaaggagacggcgcacatggtacagctcacgaagatgcagcagcggatctatgactatatcgcccagaccatccggacgcagggctatcccccctccgtgcgggaaattggggacgccgtggggctgaaatccccctccaccgtccattttcacctgaagcacatggaggagctgggggtcatcggcaagggggccggcaagggccgggcgctgaccctgacggagccgctgccggaggagaaccagatccccattgtggggacggtggccgcaggtacccccattctggcggaggagtgcatcgaggactacctgaccttcgacgccggcggcgacagcagccagtattttgccctccgggttcggggggagtccatgctcaacgccggtattctgccggacgatctggtggtggtgcgccagcagcagaccgctaacaacggcgagatcgtggtggccctgctgggggacgaggccacggtcaagcgctattcccgccgcaacgggcaggtgtggctcctgccggagaatgaggcgtacagccccattgacggccacgacgcacaaattttggggaaggtggccgccgtcatccggcgctattaaggggctggtgtgtcccacagatttcggataagcaagaaccggccgcagggagattctccctgcggccggttcttgctaaaaagttcattttccggaggacttagcttttcatattcagctgccaatcctgaaaatcggcaaaggggtcagagacggtggggtggatgtcgtttttcaccgccccgtccggcagcagcacggagttggacttgaagcacactgccaccaacggcgcctgctccttcagatagctgcacagctcatgggccgccgtctggcgtccctcgccctccgatgccgttcggaaggccgtcagcagggtctccagctgtgtgtcccgcacgccgccgtagttcagggccccgcccggagacagcagcggcgacagatcccaatccgccgtcagcttgcactccccgtagtagaggtcgaaatctccggccttcagcgccgccagatagtcctcatagggcagggtctttacgtcgatcttcacgtcgtattgggagaggtccgacgccagcttccgggccatggacaccttgaagctgttctcctcgttcaccagcatggtgacggagacggacttttcgccggaggtatagcccgccgtctccatagcggagcggtagctgtccggggaataggtctcctccagatccttggggtagaccaccgccgagggggacagggggaactgggccgtctgcccatgccccagcaggaaggcactgacgccgccggcccggtccatgccaagactcagggctgcccgcagcttggggtcgttgaagggcgcacgggtgacattgaagccgatatactgcatcgtcgaggtggggatgtccgtatagctgccgctgccgtagacgttggaggtgttggtgccggtcaggtcgcataccagcatctggatgtcgtgggtatagaaggcgtaggccatggagtcggtgttcttgcaggcggtcagctcgatgcgctccagcggcatggtcttatcctgccaccagtccgttcgccgggccagatacaccccgctctcgtccttggcatagcggtaggggccgctgcccaccggcaccgtgtcctcctgagtgccgcctttgatgataggaatatccagccgggcggcgaattgcgggtcgttgcgggtgaggtagatgcggagggtgctctcccccagataggacacggagtccatctccgccagccgctggccgtaccgcacggactccttggcccgccgcagggcagccaccacgtcccacgccgtcagggccgagccgtcggagaaggtgacgccggagcgcacggtgacggtcagggcgtagctttcggcgtcgtaggaggcgctctccgccagacaaggctggggcaaaaagtcggtacccagcgtgtacagactctcatacagcagcgcacccagtgtctgctgggcgccgtcggcgcaggtgatggggtcccatgtctccccctgcagatagggcagaccgaaggaggtgagacgggtatcctgcttggtgctgtcgctctgctgatagtattgggagagggtgtcgtaggtctcctccggctcctcgccccagtcgcagccggacagcggcataagacacgccgccgccagcaaaagggatagtaaacgctttttcatggcagtctcctgttcagatcagggcgatgagtgccgcctgcgctccccggcggtcccccatcttccgatgggaccaccagcgctccgggtggcagccggtgcagtcggggcatacgtcgatgcgctgtacccctgcctgccgcagccacagggcattgatgcccttcaggtctatgtgccacttttcgccccggcgcaccatgtacggctccgccgccgcacccagcgcccggcgcatggcctccggcacgtcatcgtccgtctcaaaacagcaggccccgatggacggtcccgtggcggccagcagatcccccggctccgtgccgaaggtctcctgcatccgccgcaccgtcttggcggccagaccgctggccaccccacgccacccggcgtggacggctccgatggcctcctgcaccgggtcgtacagcagaatagtgccgcagtcggcggagaacaccaccagcgggatgtgcttctcccggcagatcatggcgtctacgctggtgtagtcccgctgccggaacagtcccttgccgcagtccgcctccgtcaccagacggatgttgtcctcgtggacctgcttgctgagcaccgcccgctgatgggacagacccagcacgccgcacaggcggcggaagttctcctgcacattggccagatcgtcgccccggcccacgcccagattcaggctgtcccacggggcgggactgacgccgccggtgcgggtggaaaagccgtggcggatgctgccgcacagcagatcgctctgcagcacggtgatgccgttttccgtatggtcatgaaatgccatggcagtcctcctgtccggggatttttacgcatcccggccgcagcagttcttgtacttcttaccgctgccgcaggggcagggttcgttgcggccaatcttcttcaccttgcggggctgcttcttcacggtgccgtcgccgcccacgctctccgacgtggtcttggctacacgctcccgcttgacctcttcgttcttccgcagccgtacggagtacagccgccggacggtttcctcctgaatggcggagatcatctcctcgaacatctccagagattccttcttataggcgatgatgggatccgtctgagcataggcccgcagaccgatgccctgccgcagatcggtcatggcatcgatgtggtccatccagtactcgtctaccacccgcagcagcaccacacgctccacctcacgcatgacaggggaggtgaactcctgctccttcttttcgtagaagtcggcagcggcggcggtaaaggcgtcgatgacctcctccgccgtcagctgagggatgcgctccggctcgaagcgcacggtgtacctggggaagtacaggccctccacctgacgcagcagctcccgcatcccggcctcgtccatgtggctctcgccgccgaaagcgctgctgacctgatggccgatggcggtggacatcatgttcatgatgatgcccttgacgtccatgccctccagcacctgcttgcgctggtcgtagatgatctcacgctgcttgttcatcacgtcgtcgtactccagcaccgacttacgggactggaagttccgggactccaccgtggtctgagcctgctcaatggcacgggtcagcatcttgttctcgatgggggtgtcctcgtcgaggttcatccgctccatgatgctgttgatgcgctcgccgccgaacagacgcatgaggtcgtcctccagcgagatatagaaccgggtctcgccggggtcgccctgacgaccggcacggccacgcagctggttgtcgatccggcgggagtcgtggcgctcggtacccacgatgaacaggccgccggcctgacgcacctgctccgcctctccggcgatctcctccttgtgctgctgcagcttctgggcaaacaggcggcgggcatccagaatctcctggttgtccgtctcggcgtagccggtggcctcagcaatgagctcgtccgacagccccgccttccgcaggtcgctggtggccatgtactcggcgttgccgcccagcatgatatccgtaccacggccggccatgttggtggccacggtgacggcgcccagcttaccggcctgcgccacgatctccgcctcacgctcgtggttcttggcgttcaatacgttgtgcttgatgcctgccttggtgagcatccggcttaaaagctcgttcttctcgatggataccgtacccaccagcaccggctggcccttggcgtggcactcctccacctgacggatgaccgcccggaacttaccctgctccgtcttatacacggagtcctgatcgtcgatacgggcgatgggacggttggtggggatctccacaatgtccagcttgtagatggtggcaaattcttcctcctctgtcagggccgtaccggtcataccggacagcttctgatacaggcggaagtagttctggaaggtgatggtggccagcgtcttgctctcccgctgcacggagacgtgctccttggcctcgatggcctgatgcagaccctcggagtaccgacggccgaacatcagacggccggtgaactcgtccacgatgatgatctcgccgtccttgatgacgtagtccacgtcccgcttcatgacgccgtgggccttggtggcctgattgatgtggtgggcgatggtgctgttctccgggtcggagaggttctccagattgaaaaactcctcggccttggcgataccacgggcggtgagggtggccgtcttggccttctcatccaccacatagtcggcgtcgatatcctcggcttcctcctctttggagtctacctccgccaccacgtatttcttcatccgggccaccagcgactccgccatgtcatacagctgcgtggacttgtcccccatgccggagatgatgaggggcgtccgggcctcatcgatgaggatggagtccacctcgtccacgatggcgaagttatggccccgctgcacctgctcgttcttatagatggccatgttgtcccgcaggtagtcaaagcccatctcgttgttggtgccgtaggtgatgtcggcgttgtaggcggcctgccgctcctccttgctgaggtcgtggacgatcaggcccaccgacagccccagaaagcggtggaccttgcccatccactcgctgtctcgcttggccagatagtcgttgacggtgacgatgtgaacgccacggcccgtcagtgcattgaggtaggagggcagcgtggccaccagcgtcttaccttcaccggtcttcatctcagcgatgcggccctgatgcagcacgatgccgccgatgagctgcacccgataggggcgcagacccagcacacggtccgccgcctcccgcacggtggcaaaggcctccggcagcaggtcatccagcgtctcgccgttggccagacgctccttgaattccggggtcttggcctgaagctgggcatcggtgagggccttgtactcgtcggccagcgcctcgatcttgtcagcgatggggtagatgcttttcagctcccgctgactgtacgttccgaaaattttcgtaatgagtcccatatgtatcgtgtcctttctgtttccaaaaggaaagtatgcgtattgctcccgtttctcttccgccgggcgggagagccttccggcatcgctgcggcgaatagaaacaagaatacatcctgtatcataccacaaattcctgtcagatgcaaaggaaaaacggcaacaagagcaatttcactaaaataaaatggcgacgatcggcactctttacgaaaaaacacactgggcggcgaatttgcttgcaaaaagcggaaatcgtgatacgatgaagctgaaaggggaggagtccgatgcacaggtagaaatataaatgaaggcacagaaaaacacaaaatgggttcttgcaatttagataataaacaggacattttatgaaaaggctgtgatcctttatatttcttttggcgatgttgttcaccatgactaccgtggccggagccaccgaagagagtatttatactctggcaagacgtactatcacggtcaaggagacgattcaagataatggtgtagtggtatctacctatgaacatatggatgccttcacacaggcggcaagacgacagtatccgaatctctctgactatgagcccgcacagtttctcatggattacatgggcatggatagtgaagggattccggaagaggaggcattgaagcttctgacctatgacaatttgtctcttacatccacatatctgaaagtcaatgaggaaggtatcgtagaaatgacagcggaagaaatggagcggcaaatacagatagccattttgctacctatctatgctatggcgttgtaacatcaacggatgcagttatgcaaccaagctacgcccataagacccttggagccagtaatatttctgtgtcgatagattccaagggaggtgtaagtttctctgttggcttgggtagtaagattaccacatatttggcacgcccagtaacacttgagtaacaggagtatcaatgttggaggaaaatttatgaagccagagtgtcccatagactggaaaacagcatttaccgccgcattgctcggctttttaggagcgtatctgatcggcggctacctgaatatgccggacgccggggccattgtggccatcgcctatgtgggcgggcgcatcctctggtatctgaaacggctggaggcccgtcaggagccgaaggacaccgttgcggatgctcccgccgataccgcagctgccgatacgacgccggagggcagtggcaccgaaggataacggatatccccggacggcggcggggcgagggagcgtatcccggcggacataggcagcagcccatgcccgctattgcacatcgcaaaaaagtcatcgcctgaatgtccgattcaggcgattattttgtcattttttggaaactgcggaaaaaagccttgcaacacggaaacaagtgatataatatattatcagatatagtgtatataatatttgcaatctatgcaaataatagggatgacaagaggagaagtaccgtgagaaccagagatcaagaggaatttcagcgcaaaaaaatcatgctgatggagaagtgctacgactgctacgccgaaaacggtctggcctccgtgggcatccggaagctggcggagtcctgtgggtgcagctccgccgtgctgtatatctattttagagatttggacgatctcattgtccagtccaccgcctactgcatgaagaaggtggaggacgacttcatggccaaggcccccaccgatccgcaggatctgatgcgcttcatcgacgagataccctactggacggcccggcagcacggcaagaagtaccgcctgatgtatcaggtctacacccaccccaagtatatccgctacggcaagcagttcttcgagggggtcaaccgccgctacaccgaatacgccaaatcgctggagcccaagctgggcatcccctataccaccatcaccccgctgatcttcatcctgatccagacctgcgtccactacgccatgttcgaggatgaatgctatctgcagtcccagctggaggcgctgaagcaggccattcggctgtttatgacccagtaccgcacggagggcgcaaggcccgacgtcaaggcggaaagctgacggttccgccgcagcggccgcagaaaaaaccaaataagacagaagcacccccctcggctatggccgaggggggttcgtttgttatctctgcatttggccgcttaccgcttgcgggccgtaggcgcatcaggtcacagtgcgattgatgcgcttgacctcgaaggaggtctgggacagggtttgccgggagcggtccccgatctccagggtgacggagaaaatgtcggtggaggcatcgtagcgcagggtaaaggacttcaccttcagccccttggggtaggaggccgagcccagcaggtgacgatcgcccagcgccagctggccgtcttcaccgatctgaaaggcatcgcccttaccctctacgctgcccacgttttggatgaagatctgcgtcaggccgccgttttcatcctgcgtcacggtgccgcagaagcgcagcttgtcgctgatgacgctggtgagggtggagcaaagctcctgcgcctccgatagccgcatggattccgtataggtcttgccggcaaagcggatgcccactaccagcagcgccgtcagcagcagcacgatcagcaccgtacacagcatctcggtcagggtgatgccccgccggtcacggagttttctcatggcgtatcctccgacacatagtagcggtagccgttctcctgatagacctccaccgaggtgctgccggtctggccgctgcggccggagaggcgcagctgggcgttgccctcggactgggcatcgctgtaccggaaggagacgtcggtgtcccggatcttggcgttgatcttggcggctgccacggcggagcccgtcagaaagacgaacaccagcacgatgatcagcagggacaccagagtctccaccagagtttcgcccttctggttcttcagctttttcatccggtgacccccttttcaatgagcggtgtgtcccaagagatggtggtggtggtaacggtggtctgtcccgtctcggtgttgccgccggtgacggtggtgacctgctgcttccgctcgccgctgagggtgagggtcataaggcagttgccctgactgctgtccgccagagaaagggtcacggtgatgtcgtaggcgggtgtcatggtgaactccgcctgtacggcgtccagaccgctggcagcatccggggtgagggtgatgacgtcggtataggcgatgccacggcccacggcctcgatgccccgctccagccaggccttcatggccccctggggggtctgagttacctccgtccgctcgatatagctgccggtggcagtggggcggcgggtgaccttctgctcatagccggaggagaggatatcgtcccgcaacagctccgcagcggagctgacggtgagataggtctgctggctctggcggtcgttggagatgtgccgggcggcggtagtggccgccgtaaggatcactacgctgaccatgctggctaccagcagcaggaggagggccatcagaatggtgacgcccttccggtctgtacactttttcattccaatggcctcctttctgcaaaacggttatcggctccagcgccagcggagcagaccgggctcctccgtatcctgatagatgggttcaaaggtggtatcctggaacaggggcaggtcgggactgggggtccagcccacaacgggccggagcgccgaggcaagctcctcctccgtggggaggaagccggcggcgggctggccgaagggaacggccttctccagccgcaggcggcccaccacgaaggtggcggtgatctgcgtatcctccgccgtcaggggataggggatatccagcgtatagggccggccggtgcgggtgtcggtgagggtcacctgcagggtgactgtctcctgctgccgtccgtggatggtgatggggcgatagctgaagtcgccgtcctgctgggcggccaccacgtcgcctacggtgacccggtagtcctcatcggcggtggagagcatatcgtgggaagtgccggtgctatccagaacggtaagggccgttacggtgaagtaccggaagtccgccgccttgccacggctgtacaggtacagaccctcgtgatcggggacatcgccctcggcggggccgagaggggtatcccagtcggtggcgtcccgattcaggatgccctgacgatacacggcgtctccatcgcccacatgggcgatgcccagcacgccctgcatatggatggtggcggtgaggcgcaactcactggtgaaggtgcgctgacccacggtgacaccggcctgcaccagcagagtctcctcgccctcgcccttaccggtgacggtgacctgctgatcccgactcaccggggacagcgtgaccacccggtcagagccgctgaccacgtcccatttgacgccggtgagcacttgggcggtgccgtcccgtgcggtgagggtgagggtagtgctctcgcctacatactgctctacggagagttgatccacggagatggagagcttggcggtgacgtccactgccagacgggcggtgtaatcccccagtgtggcgatgatctcggtggagccgatggcctgtcccacgatgcggaccttgtagtggcccgtgccgtccggctgaagctcggcagtgacgatgccgtccttggtataggacagggtggggagctccgtgccgggatccgtgccctcaaaccgcagatccagcgtcacggcggattcaccgccggcggcatcgtagtcggtgatcatgtccagcatcagcaagcccttgctccagtagaggccagatgacggccaccagccgtagtgtagacgggcccggccaaagacgttatcctgcaccagtacggtggggaaggggaagtcctgaccctgcagggcctcgtcgctgccggggaagctgtatttaccgtggacctcggcgccgttttcctcggtagtgacccacgcaaagctgctgcccagagcggcggcgaagctatcgtagcgctgtgcagtgccggtgccgttgttctgggtgacgatgctggcaccggtgcgctgggacatctgctcataggtcaggcccgtcaggcccttgatgctatacgtgttggaaccaccgttccagccgtaattacggaggtagctgagatcgccgttgagcatttttccccgtgccgcttctgtacgcagcagcccgctaagggagttgcttctgaaattacccttgccgtagtatttgggcagatcgtcgaaagaaatgctgttcttgctgctgttgaggtagtagcagttattgatatagagctttgcattggtgctggcaccggcccggtcggcaatactgcccataagggagatgccggtgatggtacccgccatgtccgggaactccatgtaggtgtagcagttattgaaagtgggctgaccatccgaactgtcggagcgattgacaaagttggtgaagctggcggagaagccgctgccgcccataccgccgatatagacataggtatcggggccggggacaccgccggaattcatcttgacccggacggcagagctgccgtcggcaaagacattgttgctgctgcccacggggacacgctccttcagggtctccttcccaacggtgatggtaccgccggtgtagcagtccgttaccgcaaagcgcacaccgccggccagaccgcctacacgcacatagttgccgtagcgggcggcgttcatgtagccgttggtatcgacgtgggtgcagttgatctgcagatccaccacggcggaacacttgttgaggttgacgctggagacacccaccagcccgccgatggcggcctcacccagatgctgcttgttacggctgttgtcggccacagtgtagccggcgatggcgcagttggtgatgctgccgttgcccatgctgctgttgtagtcataggcgatgcccaccagacctcccaaggcgtaggaggtggaatactggcgcaccgtccgggtgccgctggagggcgtgggatcggtattgcgctggatgacggcgccgttgtcactataaaggacgatgttcgcgatctctgcgccggcggtggtgccgaagaggcccacgttgtagcagtaggagtcgatgttcacgttcttgatatagtagctctggccgtcgtacttgctgccgaaccagttgtacagcaccatacggtagtcggtgctgctgccgctgtcatagacagaaccggcgatgggatggaagctgtaattcagggaggcatccgtgggatccgccaggctctggccgttgaggtcatggctttgcttccacgtgcggatgggccgggtgccgccggtggagtcgccggcgatggcgtcctccttgctctggtagccccaggtgacacgggtatattgcaggtaggggtagtacttgtacatactcccgctgcccgtcacgtcacgggtggagctgccctgattgccgtagtagctccagttgatgtattgcagctgctccacggaccgcacctgatagggcagggcatccgtgccgggctccacgccggtggtgccgccggtagtaccggtgctgacggcggtgacggcataggactctgcgaagaagggactgacggtgtaggtgaaccacacatccccctgagacaggaaccagtagccgttgccggtggtgccgctgaggagccgcagaccggtgtcggaggtctgataggtgacgaagctgaactgaggcatctgcttctccagttccgccgccgcctcggtgttgcggccgtccagagcgatgtgctgggtctccagcaggggctccgtctcgcccttggaccagtagtagccgtagccgtaggcggtgatcttgccgccgtcgtcgtgggcggtgcagaggctgctgccgtccttgcggacgccgttttcaaagccgatgtatgagaagtgatagccggggttactgccgccctcctcgtgctcccagtacaccatgcccagcgtacccagatcggcgggggtcacccagtcgccgtagtggacggggctgccgtggccggtgagactggtgggatagggataggcctgcccgtcggtgttcagggttttgctgtggtgataggtgtggctggcatcggcggaagagaagccggtgagggtcagggccttcagcccctgctcattgacagcccgtgcgccggactggtcgctgtaatcatacagatggacctgtcccacgaagcgataggtaccgccgctgagatagtagcagccggaggtgctgccggtggccggggcgaagccgtaggtatcggcaccgggggaggtaagggccgtggcgcagtagctgctgcggatcgagccgatgttctccccggcgaagccgctgagggccacgccgccgccacggatctggagtacctccacgttggccatggcgtagctctggctcaccagaccgctgttgccgccggtgaagccgcccatcagcagacgggcatagttgctgctggcggtgagggagggagtactgacgctgccggagcggatggtcccggcgttatagcccacgaagccgcccatatacaggacgctgccctgataggcgtgggctgtgacggagtagcccgccgcagcgcagttgtagacggtgccgtcattgcggcctgccagagcgccgacataggcggtacgcaggcgcaggatgccccgaagcgtcacggagtagtcctgctctccggtggtgagcaccacattccgcagactaccctgattcaggccgaagagtccggcgtagtcgccgccgttgggactctggagcggcacagcggcgatgggataggtgccgccgtcatagatgtgggtaaaggggacgacggcactgctgccgatgggctgctggctggtgacgacggtatcgttgcggccataggctgcccagtcatagccggaataatcgatgctgcgctcctgctggaaggtggtgtccttggccagcagggggctgtactgctcatagtacagactcaggttattcagctgccgggccgtgcggatgccgatctcgctgggggcctccggggcctcggagccctccgatacccagcaggtgaaatggggattgaagtagtaggtggtgtcctccacctgcacccggcggtagaagtccgtggatacctcggtggtgttcaccagtgtccggggcaggggcagcaggtagtagcccccgcccatgtcgatggcgttggcacggtacagggtagaggtgacctcccggccccccagcgaatagcgcaccgtcagatcctgctccggcagcgtgctgtacaccatgccgtagccgtcgcccaccaccgtgccggtggttttgacggtggatttgttggcgccacggaagccgtagctgccgtcggaatagacctcgtagtacaccagtgtaccggcctcgaactgagcctgccagtcgccgtagtgggtcagccctgtcaggcggggataggagtaagcgcccagacccatgccgtccaccagattgtaggccacggtgtcgctgccgccggtctcagcggtgaaggcgtcgttgaggtacttttcgatggcgtcggcccggctgcggccgctccactgctcatagtcggcaaagaccgtgccgtccatgtcgtggtcgccgtgggacatatagtaggtgctggtgatatcgggcttgccggtggtgacatccgcaggcttggcggtggagtaggtgagcttttcactgccgttcagccgggcgctggcgctgtaacaggtgtcgatgacgtcgccgtaggacaactcaccgcccaccagacccgccatgacgtcggcctcctgaaagccggcggtgtagcagtcccgcagggtgatgtccgccgtgccgatgcagctgccgatgaggccgccggtggtgccggaggcgtagaggtagcagtcagcgtaggaatgttccacatagacggtgcgggcgccgctgatatagcccaccagaccgccggcgtagcggccgccctccagcacggaggaggcgaagctgttgcggacggtgagatcatagtcgcaacgacccaccaaaccaccggcggtggcgtcgctgatccagatatcctgctcacttttgctgctgagcttgtcacgggtggggctcaggtagacctgacagccctcaatggtggtgccgccccggagggagccagccagaccgccggcattgccgccggcgctgatctgggctccgcacagacggatgtttcgcaaggtaccccggaagctctcgaacaggccgccgtcaccgtcggtatccaccggcagctcatagaccacagggtgataggactgggtgcctacggcgacggtgctgtcgtaataggcgaggttctcgttatagatgggggtgaacctccggcccggatagcagctgtcccagccgtcgtccatgccggtgttgacgaactggatatcctgctcctgcagcgcccgtgtgatggcggtgggcagaccggagccctcgtccagattttgcagatgccgggcataggtgaccacggcagtggtgccgccgtcccgcacctcggcaaagagactgttggtggtgagcttgccggtgacggagtccaccagacggctgtcgctctctacctccaccttcaatgtcaggtcggagccgggggtcagctgccggaagcggcgctgctgggagaagcgcttgccctccgtcaggtcgtccagcaccatggtgacggtataggtgcggtaggagacgttgacttcggagccggtgagctccatccggccggtggagtggccctgtgcatccgttaccgtcacatagaagtgcagggggtcacggggcgtgtcacaggtgaccttcagcagcagacgctccttgttgatgatctccatcttgggggtcagcttgccggtgtcctcgctctggacgctgtcgccgccgtagtagcccacggtagccccctcctgcacccggcgatcccgtgagcgcagggggttgaaggcgtcgaagctgtactgcatgggcttttcgctgtaaaacacggcgtaaacactgccgctgccgggatcatactcgatgacccagttggcgtcccacagctccgcctccacctgctcacggggcaggatgctcccggcggcggaggtgtcggtgcttttggcggcggaggtgacgtagtacagagtactggtggtgtacttatcctgctcggcgtcccaggggatgttgttcagggccgtggcccggtcctttccgtactcgtcgctgcggccgctggcctgcagctgagagaggcggttctgggccgccagatagatggtctccgccttggaatccagctccgtctggcggatattgcgctggtggcggctgatggggatcatggccagcgccagcaggatgatgaggatggccagcgccagcagcacctccgtcagcgtgaagccccgtctattccgttgtagttttctctcagtcatagaaaaagctccccgccccacggcgttctcagggcatgatctcgaagtaggtgatgaccagcgtggtctccacagtgccgctgttgcggccctcggtataggtgttcatattcatgtcggagatctggctgatgttctcgctggagcacagccgatccacgatctgccgggcctgcgcataggtggaggtccggaaggtcatgacgatgggccgcagcatgatatagtcctgctgcacggtacccgcagagcagtccagcgaatagtccagcgtgtcactcatgatctcgtggagctcgatcatcagcttgccgctgttgtcgtactgggggatggtgcgcttctcacccgccgccttgatctcttcgatggccttctgcatcttctgcatctgggccattttcccctgattggcgtccagctccgtctgctcggcctccatgttcagccgatagctggagatctgatcgttgatggggatgaggatcagcttacagtagcccgccaccagcaccaccacgatcagcaccagcagcagggtcttttcccgtcttgtcaattcccggttcatttgcctgcctcctctgcgctgcgtagggtgatgcggacggtgaagtccagaatggtggagacgttgccgtcctccgtggaggccagattcagctccacattgctgacgatgggggactgctggatcacgtcaaacatccgggagatctgatccagactcatgccggacatggacaccaccatcttgttgccggacacttgcagggagaccagccgtccacgggacagcatctcctgctccagcagatccagcgccttctggcggtccaccagagtgccgttgtcctcgctgccgtcggtggcccactccatggagtaggtgcggtattccatcagcagacggtcgtagcccttcagcagctcctgcatctgggtatactccgtgtgaacggaggcgtaggcggcctgcgccgcatccagccggcgatactggtcgatgacgccgaacttggccacgcagcccgccagaatgacgatggccagacagcccaccagcagggtcagacggggattgcccttctgttcccgcatattcagattgatgccctgcttatgggggcatttgagggtcttgcgaccggcctccgaaggcccctttttcatcttttctgccattatcgcaggccccccttgatgccaagatccacgccgccgatggcccgcaggtacatccacggctcctcggtggacatccgctggcccagcagctcggcggaggtgtgcagcgtcatgccggtggtatcggcgatggtgtcgtacagcggctgaatggcgctgccgccgccgcacaggcacagctgcgtcagctcccgctcccggttgttgtagttgaagaagttcacggccttcaccacctccacggcgatgcggccatacaactcacgggcctgctccgactccagcacatggttgtagttctggcgcacatactcgtgagccacgtggacgtccacgctgcactgatcggccaccagatgctccagatcggacatccccacctcgatctcccggcggctggcgaagtggccgccccggtagatatacaggaaggtggcgctgtggcccagatttaccacgcacaggtcacggccctcctgccgggtgcggcggtagtaggcctgcagcacggcgctgtacgcgcactcgctgggggtcagcacccgcaggcggaagcccgcccggcgcagcatggcccgatagctctccacggtgctcttcagggtggcgcaggccagcagattcatctccgtgggctggccggactcgtcccgcagcacctcccgcatggaatagtcgaagaagtacttgttcttctcctccgtcagatagtcccggaactcatagggcaggttatacagcagctgctgctccgtcatggcgggcatcaccagctcacgggtgaacacctccgtggagggcagcaccagcgccgcatgggtcagggggatgccgttacttttggccgtctggcgcaggaaatccgccatggcgtccatggacaaaatcctcgaaccggagaccatgttgtccggcagctccgccgtgacggcctttttcaggtccgcaccggcgaaatataccagcttgacgctgctctcgccgatgtcaaagccaacgatcttttccaaaatgctcgtcctcactttcaagaattacagcagccccagataccagtcgatgatctgttggccgcacagcgccgtcagccaagcgccaagggcgatgctggggccccacgggatggcctcgccgccgtcccgttttttttgcaggagtccccacacgatgccgatgacgcaggctgccaccagacacagaaggttccgcttccagcccagaaacagccccgtcaggaacaggagcttgatgtcgccgccgcccatggcctcacggcccagcagcttctccatccccagcaccagaagcagtacgccccctgccaccgccagaccgccgatggcgccgtccagcgcccgccggagcggctgggggtcgaagaaaagagtggtgataaatagcacaacgccgaccgctataaaacggtcggggatgatgtacccctccaaatccgcaaaggagcagaccagcaggatgccggccacacaccagccttcaagggcttggagcgaaatatcataatgcagcagcagcgtcacgaacactgctgccgagatcacctcggccataacgtgacgccgggagagcttggccccgcagtagcggcagcgcccgtgggcagacagatagctgaccaccgggatcaggtcccgcaccgccagcacgtggccgcaggtgtcgcagtgggaccggccacgcagcacgctctccccatggacgatacgccaggctgcacagttcagaaagctgcccatgcacgcacccagcagggcggccagcaggcagcagtaaacagttaggaagggatcggcatacagcatggggaaggctctcctttagatgggactgctctcacggagcggggagggacgccaacccacggccatccccgcccgatgagagacgggtcgccccgcaccggcccggccgggccggtgcgggagctgtgcgtgtgaatgtgacaaatggatgtcagtggatgtcgggcgtacccagcgtccaggtgaaggtctttgcaccattctcgtcggtcagcttggtagctttgtaggtgatgatgccggtaccagcatcgtaagtcagcttgtcgtcaccatagttcaggacgatagcagtgccattatcaggtcccttcaggaaggcgtccttgtcggtgggagccttggtgttctcggtcagcatagcggtctgccactcggcataggtagcacggacattggccacgtcagcggcctccttggacttggtcagggcgccgttgaacacggggatggcgatggccaccagcacagcgatgatggcgacgacgatcagcatctccatcagagtgaagcccttcttgctctgcagtttcttcaacatagttctacatctcctattatttttttgcggtttttatcttgatccgtacagggttgttatacggataggatatgaatttgggtgcggcggccttacattccgccgtagagggtgaacagcggcagatacaccgccagcagcagcaccaccacgatcaccgccagagcgatggtgatgatgggctccagcaccgacagcaggcgggcggtggtgacctccacctcgttgtcaaagtattcaccgatgacgtccagcgtctcctccagcgagccggactgctcgcctacgcccaccatctccgtcagcattttggggaagtactcgatctggcccatgctctcggaaatggtgcggccacgctccaccttctgcttcacctcctgcacggccagtgcgaaggtgtagttgctgatcacgtttccggtcacatccaaggccttggggaccggcaggccggccgtcagcatggtggccatgctgtgggcgaactgtgcggcggcgttgaggctgtggagccggtggaggggggccttggtgaggctccatgcggcgatagccctccggccccggatggagcggcgggccaccatataggcgatgcccagcccggcggcgatcagcagaagcagccaccaccagcctatgaagaagtcactgatggccagcagcacacgggtgatgcccggcagctgggtgcccatctcggcaaagacatcgttgaaggccgggacggccacggcgatgatgataataaacacgacgatggccaccacaatgaccatggcggggtaggtcagggtgctgaccaccttggccttggtcttggcggatttatcatagtaccggtgcagccgctggaagcactcctccagcgtgccggactgttctccggcccggaccgtctcgatgaaggtcttggggaggtacggggcgttgttttcaaagctctgggccatggagtagcctgcgcccacctcctcggccaccttctccagcatctggcgaatgtggcggttcctggtctgggccgccaccatctccacacagtgctgaatggacatccctgcggagaggatgatggcgaactgggagcagatcagggccagctccttttccttgatcttcaggccgatggggcggttgaagatgttttccttcttctcctgtacctcctccagccgggtgataacggctacggtctcccgcaggcggctggcggcctcgaactcgtcataggcccggatgacgccggatacagccgttccgtccttggtctggcccttgtaacggtatgtggtcatggcgtgtctccgctccttccgtgccgggttttacgcaattactcgtctactgtggtgttgatgatgcgggcggcctcctcggcggaggtgacaccctccagcaccagccggcggcagctctccctcatggagcggaagccgtttttgcgggcctcctccgtcagctgctcctcgttggcgccctcactgatgagccgccgcaggcggccgttgagcatcaggatctcgaaggcggcccggcgaccggtatagccggagtgatggcactccggacagccctcgcccttatagaaggtgacgtggctgtcctccggcatccccagcagggccagctcctcggcagagggctgatagcccttcttgcagtgggggcagaccttccgcagcagacgctggctcaccacgccccgcagggcgctggccaccagccacggctccacgcccacgtccttgagccggtatacggcggacacggcgtcgttggtgtgcagagtggagaacaccagatgaccggtgatggcggcccgcatggcgatggaggccgtctcgccgtcccggatctcacccacggagatgatgtccggatcctgacgcaggatggctcgcaggccgctggcgaaggtcatgccggtcttttcgttgatctggcactggctgacgccggggatgtggtactccaccgggtcctccagcgtgacgatgttgatctcctcacgggacagatcccggatcatgttgcacatggtggtggacttaccggagcccgtgggacccaccagcagaatgacgccgctggtgtttcgcagcagagcgttgtagttgtcaagatcctgcccctccagtcccagctgggatttgctgagggcctgagcggacttgtccagcagacgcagcaccatcttctcgccatacaccgtgggcatggaggagatacgcagatccagactgtggccccgcaccgactggatggcgtggccgtcctgcgggatcttatgctcggcaatattcataccgcccatgattttcaggcgggagatcacggtattctgcagatcggcaggcaccgtcaggatgcggcggagcagaccgtcgatacgcatccgcaccaccatctcgccctcctgcggctccagatggatgtcgctggcccgctcggtataggcccgctcgatgagggcgttgacgaagcggatggtgggggcggactcctgcgggtccgccgtgtcctgcgccatctgggcggggatgacatcgctgctgctgccggcctctcgcttcatctcctcgatgacccgtgccgtaccctcgttgccgtacaggcggctgatggcctgctccacggccttgcgggtggcgatcatggggatgatgcgcttgcgggaggcagtctttacctcgtcctgagccacgaagtccagaggatcgctcatggccagatacaggctgttgcgtaccagcttcaccggcaccacgcagtatttcttggcgatgttccgggggacatactgggccagctccacggggatggaaatggccgtcaggtccacaaagtccacgcccagctgcactcgcagagcgtcgatgagctgcgcctccgtgatgaagccgttctggatcaatgcgtcgcccagccgctgcttggtctccttctggagtgccagagcacgctccagctgctgccctgtgatggtcccggacgccaccagcagatcgcccaagcgcatataggccatttcactcacctcccggtcgaagattcccccgtctatggacaggggaaaaccgcacagtgcctaccggcatacttgccagggatcggatcctgtacgtttgtaggcataatatacctcaaactattcttgaagtcaaccgatttttcgtgatttattgaaaaatctccacaaattctccataaaaacgacatattggtccgatatgagaaaagtatgagaaaaatgttgaaaactggtactttttgactgaccgaatgacagaaatgacaaaaaggagccagtattttcccaaaggaaaagagggcggcccacaggccgtcctcttggaggtgaacagtatttcaattagcgagattttaacgggtcggcagatgcggctccagccagtgccagatgtcctcatagaccgtctggcgcatggggccttcgttgaggatctcgtgtctcagaccgggatacagcttcacagtcacatccgacaggcccgccttgcggaaggcggcggcggtgcggcggacgcccttgcccatatcgcccaccgggtcccggtcgccggagatcagcagcaccggcaggctgctgtccatgcgggtcaggttcttggggttctggttgaaggcaatgccatggagcatctggcggaacagccccaccgtggcatcggcgccgcagagggggtcggctatgtagcgatccacgttctcagagtccgccgacaaccagtcatagccggtgcggttgggggcaaaggccttgttgtagccgccgaaggccagatcattcaccagcttgctggcagaggagggtccctgtgcggcgcagaccacctccgccacggcacggcctccggccagcttggcctgaggctgccagccggtacccatgataatggcggcccgcagggtgccgggatagcggatcaggtagctgcgggccagaaaggagcccatgctgtggcccatgaggcacagcggcacaccgggaaactcccgacgcaactgttcatggagcagctggatgtccgccaccaccgtctcccagggggtgccgtcgccaaagtagacgggggtgccgccctccggcagagagccgccgtggcccagatggtcgtggcccaccacggcgatcccctgctcattgaggtagcgggcaaagccgtcgtagcggccgatatgctcggctacaccgtgggaaatttgcagcacggcacgaggcgtttccaccggcagccactgcatggcgtggagccgggtcttgccgtcgctggagagaaaggtgaactcggtgagatttgtcatggaaatttcatccttcctatggtaaaataagaatcattctgttggcagtataccacaaactcaccaaaaagaaaagaggagacggctatggcatcgtatattctggcactggatcaggggactaccagctcccgtgccatcgtatttgaccgggcggggcagatcgccgccaaggcccagtatccctttccccagatctatccgcaggcaggctgggtggagcacgaccccatgaccatctgggacacggagcgtctggcggcggcggaggccatccgggggctgccggagggcagcatcgccggcatcggcgtcaccaaccagcgggagactaccatcgtttgggacaaggccaccggccagccggtgtacaacgccatcgtctggcagtgccgccggacggcggagctgtgcgaggaactgaaacggcagggactggaggagcgcatcgtctccaccacgggactgctcatcgacgcctatttctccggtaccaagatccgctggatcctggataatgttcccggcgcccggcagcgggcggaacggggggagctgctgttcggcacggtggagacgtggctcatctggaagctgacggggcagcacgtcaccgactattccaacgcctcccgcaccatgctctttgatatccaccggctgtgctgggatgaggagctgtgccgtctgctgcggatccccgcctgtatgctgccccggccggtggagaacagcgccgtttacggcacggtgcagccggggattcccggcttggagacgctggcaggtgtgccggtgtgcgctgctgccggcgatcagcaggcagctctcttcgggcaggcctgcttccatcccggtgaggccaagaatacctacggcaccggctgctttaccctgatgaacgtgggggcggagccggtccgcagccgggcgggactggtaagctccgtggcatggagcgtagggggcaggaccacctatgcactggagggcagcgtctttaacggcggcagcaccatccagtggctgcgggacgagctgcggctggtggactccgccccggagtgcgaccggctggcggaatccgtggaaagctccggcggcgtggtggtggttccggccttcaccgggatgggggcgccctattgggatatgtacgcccgtggggccattctgggcatcacccgtggcacgggccgggcccatatcgcccgtgcggtgctggagtgcatcgcctatcaggtgacggatctgatgctggccatgcggcaggatgccgggtgcgacatcacggccctgcgggccgacggcggtgccagcgtgtcggacatccttatgcagatgcaggcagacctgctgcggatcccggtggatcgccccgccatggtggagaccaccgccttcggcgcagcatcgctggcgggattggcctgcggcctgtggcgggatacggaggagctggcggccctgcggcgcagccagcgggtgttcctgccccagcggccccaggcagactgcgacgatgagtaccgcctgtggaaaaaggccgtcagccgggcctgtcattgggcggagtgacagaggggcatggacgaatacacatatatggatacataagcccataacaaaggaggccggacagagtccggcctcctttgttatgagaatctgaaggctcactgcgccgtcagctgagctcggactggccggtatacagctgatagtacttgcccttctgggccagcagtgtctcgtggttgccccgctcgatgatctgcccctgctccagcaccagaatggcctgtgcgttgcgaacggtggacaggcggtgggcaatgacgaacaccgtgcggccctccatcagggaatccatgccctgctcgatgagcttctccgtgcgggtatcgatggaggaggtggcctcgtccagaatcagcaccggaggatcggacacggcggcccgtgcaatggccagcagctggcgctccccctgactgagactgccgccgtcaccggtgatgacggtgtcgtaaccctgaggcaggtggcggatgaaggtgtcggcgttagccagcttggcggcggcccggacctgttcatccgtggcgtccagcttgccgtagcggatgttgtcggcaatggtgccggtgaagaggtgggtatcctgcaggacgatgcccagcgacttccgcagagagttcttgcggatctcccggacgtcgatgccgtcgtaggtgatggttccctgctggatgtcgtagaagcggttgatgaggttggtgatggtggtctttccggcgccggtggagcccacgaaggcgatcttttggccgggctcggcaaagagggagatatcgtgcagcaccaccttatccggatcgtagccgaaggtgacgtggtcgaagcgcacgtcgccccgcagctccgtcagggagccgtcgggcttcttccatgcccagtggccggtgcgctgaggcacctcggtgagggtgtcgccgtttttctccacccggacgatggtggtctggccctcgtcctcctccggctgggcctccatgacggcgaagatacgctcggcaccggccatggcggccagaatggtgttcacctgctggctgatctggctcaccggctgggacacctgcttgacgtacagaagataggcccccagagagccgatgtcgaacacaccgcccatggccagcagtccgcctatgcagcaggtgacggcgtagttgatgcgggagaggttggcggtggcgggcatcatggacccggcgtaggtctgggccatggtggccgccgtctgataggcatcattgcgggcggagaactggtcgatggcctgctgctcatggtggaacaccttgatgaccttctggccctcgatcatctcctcgatgtagccgttgaggtcgcccagagcggcctgctgccgctggaagctgacccggctgcggccgccgatggtctttaccaccagaagcatcagaccgaggaaggcgaaggtgatcagagtcagcgcccagttcagatacagcagcatcccgatggtgcacaggaacgtcagggagttggacagcacattggcgaagctgttgttgatcatttcggacaccgtgtcgatgtcgttggtgaagcggctcatgaggtcgccggactggtgggtgtcgaagtagcgcagggggagcccctgcagcttatcgaacagatcctgacgcagggcggccaccgtgcgctgggacacccgcaccatgatgcgggagtacacataggagcacagagccgacagtacgaacaccagtcccatcagcaccagcagcttcagcagaccggcgaagtcgccggggaggatgtagtcgttgatggcgggcttgaggaagtagctgctggccacggaacctacggaactgagcagcaggcagatggccaccagtaccagcagccccttatagcggcccacatagtgcagcagcttcttcaccgtacctcgcaggtcctggggccgctgatagccgtggctgcgggggccgtggccgggtccgccgggacggcggggcggcatggaatttttctgttcagccatcgatgctcactccttcctgctgagactgatagacttcccgatagatctgattggacgccatcagctgttcatgggtccccataccggagatcttgccgtcgtccagcactaagatcacgtcggcgtccataacggaggagatgcgctgggcgatgataagcttggtggagccgggcagcgcctccttcagcgccgcacggatcttggcatcggtagcggtgtccacggcggaggtggagtcgtccaggatcagcaccttgggcttgcggagaatggcccgtgcgatgcacaggcgctgcttctgaccgccggagacattggtgccgccctgctcgatgcgggtgtcgtagccgtcgggcatccgggagatgaactcgtcggcgcaggccatgcggcaggcggcctccatctcctggccggtggcgttctcgtcgccccagcggaggttatcccggatggtgccggagaacagagtgttcttctgcagcaccatggcgcagccctcccgcagcgtctccatggtgtagtccttgacgttgtgaccgcctacatagacggccccctccgtggcctcatacagccgggggatcaggctcaccagtgtgctcttggcgctgccggtgccgcccagaatgcccacggtcataccgctggcaatggagaagtcgatatccgtcaggttccactcggcgctgtcgggatggtatttgaagtaaacgtggtcaaagcggatggaaccgtcggagagggtgagttccctcttggtgccgtcgccggtgatctccttcacggcatcgtcgtcggtgatctccggctgctcctccagcacctccacaatgcgcttgccgcaggcgatggagcgggtcagcaccatcatcaccatggccaccatcatcagggccatgagaatttcggaggcgtaggtgaagaaggccagcaagtcaccggagagcatctgaccaccggccacatagtgaccgcccagccacatgatggatacgatggtgccgcccataatgaggttcaccatggggatgaaggtcaccacgaagccgaaggcccgctccgccgtctggcggagcgtctcgctgcgctggaagaatttctccttctcccggtcctcccggacgaaggacttcaccacacggatagcgttcagatcctcctgcaccaccagattcagtccgtcggtggccttttgcagggaggtgaagaagggccccacataccgcagtatgatgaacaccatcagtgccagcagcggcaggatcaccagaaagatctggctcagctgcaggctgatgcgaagggccatcaccagagcggtgatgagcatcaccggagcccttaccagcatccgcatccccatcatcagggtcatctgcaccgacgagacgtcgttggtgagccgggtgatgagggaggcggtggaaaagtgctcgatgttggaaaaggagaagcgctgtacctgccggtactctgcgtcacggacgttggcaccgaagcccatgccggccttggcggccagcgccgctgcgcccacacccagcgccagacagatcagggccatcagcaccatcttcaggcccatggtaaggatgtagctgcggtctccggcgccgccgttgccgccgatgccgtagtccacgatgttgctcatggccttgggcagcatcagctccagcaccgcttcgcctgccgagcagaggatgcccagcaggatgtagacccgataccccttggtatacggggcaagcttgcgtatcatagttcggtttcctccatttgcgttgcgagattttgcgccacccgttccagatagcggtgcagggtggccagttcctccggggagaagccctgttccatctggcggttggtcttctgtgcgatgcggataaagtcgctgcggaagcggcggccctcctccgtcagccggagaacacggcaccgggcgtcctgctggcaggcatctctggtgagaaggcccttctcctccagacggcccacgatgccgttgatggtggaaggcttcacggccatatactgctccagctgccgctgggtgaccggctccggctggcggtgcaggtacatcagcgcccggcactggaccggagtgacgccgtactgccgcagcgagcggtccatgaccatccgcatccggtgctcgcactggcccagcagccgtcccagatgatcgctctgacaggtactgctcaaggtaaatcgctcctctctgaatcgttagctggctaaatgttagcgtgctaaatattaccacggaatggaagcatcgtcaagaacaaatggagcggcaccgtgtaaacgatttgtgaacggagaggtcagacggcggagcggcgacgtagaagttttttccagctcagcaggtcgatgtcgtgatattgaagcagcagacggacggtgaaaaagctgtcgacggtcagcagcagccacgctgccagcgtcagccaaggcggtacggcgttgagccatggccgcagcagggggtggatatagcgggcggtcacggccgccagcggcccccagatcagggcaaagggcaggcacacccggcggttcaggtccattttggtggaggagtagtcccagaacatgactcccagcagcctgtcgcagcagaagtggacggcgtactccacggcggtggcggtaagcccgccatagagggccaagtgccagaaggtgtccgtcatatccggcggcagagccagcaccgccagcatggcaaggccgtacaccggacataccggcagcagcagataccccttgcggacggtgtggcgggaacgggtgacaagggcatagaccttctccagcagatagccaagaaagccgtaggtcagaaagctccagaggtacatgggcagcgtctcctttctggagacagtgtgtcccggaggagagtgggtatccccacttgccaaagccatttttttctgctatgctgataccgtcgataagcaagggtcaatgcgcctgatatcgatggtactatcgaatgtgtgagagggggagcggccatggatcagcagtgggaacagctgcggcagcggtgtctggcctgccgggcgtgcagtctggcacaggagcggacgcaggtggtgttcggcgtgggcgatccggcggcggaggtgctgctggtgggagaggcccccggcgccaacgaggacaagcagggggagccctttgtgggccgggccgggaagctgctggacgatatgctgcaaatgatcggcctgtcccgtgagcgcatctatatcaccaacagcgtcaagtgccgcccgcctcagaaccgggatccgctgaacaccgagaaggaggcgtgcagcggctatctgcggcggcagatggagctgatgcagccgaaaattctggtgtgtctggggcgcatcagcgccatggagcttatcaaggccgatttccgcatcacgcaggagcacggtcagttcttccggcaggagggcatagaaaagatggccatgtaccacccggcggccctgctgcgggaccccggcaagaagccggagactttcgaggatctcaagcgcttacaggccaaaattcgtgagatctgcgtccggacaaagctggatttttaacggcgcactgggccatactactttcattattattttgtgggaggaacaccattatgtataagaatattgaaaagcagaaggttctgcgtatggcggagcaggtagactatcaggacggccagatcgtcagccgcacactggtgcagaacagcaagctcagcatgacactctttgcctttgaaaaggacgaggagatcagcacccatgctgccggcggcgacgccatggtgacggtgttggagggtaccggccgcttcaccgtgggcggcgaggtctttctggtgtctcagggcgagacgctgatcatgcccaaggatatcccccatgcggtgtacgggcaggagcggttcaagatgctgttgacggtgtcgttctaaaaatctggtgcaaaatccattggattttgcaccaaagaccccagcccgctgcgtgcatcatttctgcgtcagaccgcagaaattccatacttgcggtctgagaggtattttgactgacgcaccggtcgtcagccaaaatggatcagaccttttcgccgcctgcgggcggcgaactctgcgaggcttttgacgggcccaacggtctgcatggcctttccggagtggtcagaagctttttgctgactttccatcccgtgtgctgcggcacacgggatgctttttcgcaaaaaagcaggaaaaaccgcaaaatagggggttgcaactgccgcatccctgcgttagaatgaaacttacgaccatgaaggagggtgcagaatgcaaggtgaaggattgaaaaaattacagagcggacagcccatctccacacgggagcagctgctgctgatcgctcagctgagctggccggccattctggcccagatctcctccgtggtgatgcagtatattgacacggccatggtgggccagctgggctccaatgcctccgccgctatcggtgtggtggcgaccacctcgtggctcttcggcgatctgtgcattgcgctgaccatcggctttaacgtggcggtggcgcaggcgctgggagccagacagtcggagaaagcccgcggcatcatgaagctggcctttctggtgtgcatggccttcagccttgtgatgatggccatagcgctgggcatcaccgggaatctgcctcgctggctgcgggcagaccccgccatctggcaggatgccagcgcctactttctggtatttgttctgtcgctgcccttcatgcagatgaataacctctgcggcggactgttgcgttcggcgggcaatatgaaaacccccggcatctgcatggtggtgatgtgcctgctggacgtggtgttcaacgccttcctcatcttccccggcggaacgctgcgggtgctgggggtgacgctgccgggcttcggtctgggggttctgggtgcctccatgggaacggcgctgtcgcaggtggtcattgcggtggtgctgacctatatcctgctggtgcggtcgccggagctgcacctgcggcggggcgaaaaggcacggtttacggcggcacagctgaagcgctgcctgtctatctcggctcccgtcatgggggagcgcaccattctttccaccgcccggatggtgactaccgccatcgtggccccgctgggcatcatcgccacggcggccaactccttcgccataacggcggagagtctttgctatatgtccgcctttggcgtgcaggcggcggcctccacgctggtgggccagagcgtaggcgccgggcggaaggatctgacctatcggctgggctggctgacggttgcgctgggcatgggcttgatggtgatcacggggacgctgctgtatgtgctggccccggccatgatcggcatgatggcggtggacgaggccgtcattgagctgggcgtgcgggtgctgcggatcgaggcattcgcggagccgctgttcggggcctccatcgtggccagcggcgtgtttcagggaaccggcagcacgttggtgcctatgctgctgaatttcggcaccatgtggggcatccgtgtgccgctgtcggccattctggcggccaagtggggccttgtgggtgtttgggtggccatggccctgcagctgggtgtgtgcggtatctgcttcctgatccgtctggccggcaagcgctggctgcccaaggaaacgctgcaataagaaaaatacacggcacagggccggagcggtatcccgctccggccctgtgccgtgtatggaaaaagatggggatcaataggagcccaggtcggcggacttatcgcccacgggatcggtaccgaaccgatagtcgttgccgggcagaacagcgttgaggatcacgcccgccagggcggcgatggccagacccgtcagggtgatgctggcgctgcccacggtgaaggtgatgccgccggtagcgctgaagcccagtccgcagacgaagatgacggcggcgatgatgaggttgcgggacttggtgagatccacccggttctccaccacgttccgcacgcccacggcggagatcatgccgtacaggatgaagctgacgccgcctacgatggcggtggggatggagttgaccagcgcatcgaacttgggggagaaggagagaatgatggcgtagacggctgccagacgcacgacacggggatcgtagaccttggacagagccagcacgccggtgttctcaccgtaggtggtgttggcggggccgccgaagacgccggccagagcggtggccagaccgtcgcccagcagggtccggtgcaggccggggtcggcgatgaagttcttgccggtggtggaggagatggcggagatatcaccgatgtgctccatcatggcggcaatggcgatgggggccatcaccagaatggcggtgaggtcaaacttcgccagcacaaactgctgcagaccgacgaagctggcactcttcacagcggagaagttgatgaggggctgcatgacgccgttggcatccggcagctgggcgccgcagagggtagccaccagcgccaccagatagctgcctaccacacccagcaggatggggatgatcttcaccatgcccttgccccagatgttggccacgatgatgatgccgatggccaccagcgccagccaccagcaggtgctggcattgctgacggcagtccccgccagattcagaccgatgaggatgatcatggggccggtgacgatgggggggaagaaccgcatgaccttctgtgcgcccaccagcttgaacagcagcgccagcaccagatacagcaggcccgccaccacgatgccgcccatggcataggccagcttgtcactgtcggacatggtggcgtaccttccggcgttgagggtcgccatggcctggaagccgcccagatacgcaaaggacgagcccaggaaggcggggaccttcagcttggtgcagacgtggaacagcagcgtgccgagaccggcaaacagcagcgtggtctggatggacaggggcagaccgtagccctgcaccagaatggggaccagcaccgtagcgccgaacatggcaaacaggtgctgcaggcccagcaggagcatccgggggacgcccagctcacgggcgtcgtagatggcgtcgtgtccgagttttttgttcatgtgatagttcctctctttcgtttgtggattctatgaaaataattgctgactggctcaggcgcataaagcgcaaaaaaatgaccggtaaaaataccggtcaaaaagaagaaacagaaacagagggagtgaaaaatctggcgagcagcgtgcggaccttcattttcatcactcccttcgaattgtcctgcttattatacgggcctccagcaggaattgcaatgcactgttgttccaagaaatgccgacccgcccgccttctatttggcggagttatccaaagcccggcggataggtggcgtcagcatcgccgttaccagaattttcaaggcgtcaccgggaagaaagggcagcatccccgcccacaaaatggcagagaggtccatacccttgcccatatagccgttgaggatcatcgccatgtacggcagccccacggcatacagcaccgccagtcccaccagagccgccagcgcaatgcgccagaaggagcaggtgctgcgggccagacgaccgatgacccatgcggcggggatcaatcccagcagaaagccgaaggtggggtgcagcacataggaaaagccgccgccagcggtgaaaataggcagccccagcagtcccagcagcacatagatcagctgtgaaagcgccccgcagccgctgcccagcagacagcccgccatggcggtgaagaagaattgcagggtgatggcagagggacccaaggggattttcagaaatgctcccaccgccgtcagggcggcaaacagagcggtgcggacaagctttcgagtggtcatggcggtactctcggtattcaaataaagataacggcattatacaggaatccggcggcggatgcaagaggggaggtttacaaatcccgccggtcgtggtaaagtgttgcggaaagtgaggtgcggctatggaacggcgtgtatatcgctatgagacggtgggctccaccaatacagagctgacggagctgatccggcagggtgcggcggagggtacggtggtgctggccaggcagcagacggcgggccggggccgcatgggccgcagcttccagtccccggcggggctggggctgtacggatcggtgctgctgcggagcagcccggaggacgcccctcgcattccggcgctggcggccacggcagtgcgccgtgccatccgccgcagctgcggcctgtcctgcggcatcaagtggcctaacgatctggtgctgtcgggccggaaggtctgcgggattctggcggaggctctgccgggaccggagggcagcctgtgggtcgtcgtgggcatcggcatcaacgtctgccagcggcgggaggatttcctgccggagctgcgggagacggcggcatcgctgtccatgatcgccggggcggagatggaccggacagcactggagacggcccttctggaggaactggagtctctgcgtcaggagctgccgcaggagacggcggagcggcggcaggagtacagcgccgcctgcctgaatctgggccgccgggtccgggtgctgcggcccgacggagagcggtcagcattggcggtgtccctgacgccggactacggccttgcggtgcgctatgacgacggcacggaggaggtcctccgcagcggcgaggtatcggtgcggggcctgtacggatatacggataaggagtgagtgtatgaaggagctttggagcctgtttctgaccttcgccaaggtgggggtcatgaccttcggcggcggctatgccatgctgcccattttgcagcgtgaggtggtggagaacaagggctgggccaccgatgaggagctgacggactatttcgccatcggccagtgtacccccggcgtcatcgccgtgaacaccgccaccttcatcggccagaagagggccggcatcgccggcggcatcgtggccacgctgggggtggtgttcccgtccctgctcatcatcgtggcgctggcgggagtcatcaccagcttttcccacctgacatgggtgcagcacgccttcgccgggatccgggtgtgcgtgtgcgtgctgatcttcaatgcggtgctgaagctgtggaaaagcgccgtgaaggatgtatggggtctgctgatctttctggcagtactggcggcgtccctgctgaccagcctctccccggtgtggtatgtgctggccgccggtgtggccggcgtgctgatccagaatctgaagggggcgaagaaatgacctgtctgctgctgttttacgagttcttcaagacgggcctgttcgccgtgggcggcggtcttgccaccttgcccttcctctatgatatggccgctcgccacccggagtggttcaccgtgtcccagctggcggatatgctggcggtgtcggaatccacaccggggccattgggcgtcaacatggccacctatgtgggctacctcaccgccgggatccccggtgccgtggcggctaccatgggactggtagcgccctcggtgatcgtgatcctcattgtggcggccttcctcaagcgcttccgggagagccgtctggtgaacaacgtgttctacggtctgcgcccggcctccgccgctatggtggcggcggcgggcctgtccgtggtgggactggccctgctttacagcggccagacgggccttgcggcggtgaactggaaggccgtggcgctggcggcggtgctgctggtgctgacccgctggtgcaagcccactaagggcctgcaccccatcgtgttcattctggcctccgccatcataggcgtggtgttctccttctgaaaaacgaatacaaatcgcaatattcgcatcgaagattacgatacgttgtcacattctacgtaaaaatcgcccctccggcggaacggaccggagaaacgatgaagaaaaaggtatcccgacggcttttgccgtcgggataccctgagtctgcctccaaagtgagagcctttcgccaacggggcggaagggtgtgtgcgggaaacccggaagggtgtcctgcacgatgatgatccccatttttcagaacttcttgaagctctgaaaaatgcctctgcgtggcgaaaagacttttcgccacgcaaaaagggtatcccggcggcttttgccgccgggataccctttttcggcgaaattcccgtaaagcataattccattacagtgcgcctgtcgcacccatatacagcagagcggcagcctccctggcccagtagcctgggccaagcatccagatgctggcgcagcccagagagtagggggtaagcccgtccttctccgcccatacaccggcccgcagctggtggaaattatcggaggcgatggccacctccgtaggcagaccctcccgccggatgacctcagcggaaaaggccagattctcctccgtggagatggaggcgtcctccagatagatgcggccgggggcgatgcccatggacaccagtgtgtcccggatacaccgggcctcggtggtgggctcctgattgttctgtccgccggaggccacgcacaccgcctcctcatggatggagagatagtcataggcggcctgaatacggtcccggagcatccgactgggagtgccgtcggaccgcacctgacagcccagtacaatgactgtgaccggctgtgtgccatcgggatggtgggccgcccggatgcccatcagggtcaggatagtccccagcgccagcagcccggccaccagcaccacgcacaccgtgcgccgcagccaccggggtagccgccggaaaagaccggggaacaccagccacaccgccgccagcagcagccccgccgccgggtacagcatcccgatgtgaagcacccctatggacaggggtagcagaaaatacaccacccccagcacgcacagggctgccgccccatagcgaagaaccggatgcctcatgtcagttctctgcgatgtggttggcgatgcgctgcatgatgagatccagcgccaccagattgtgtccgccctccagcaccacaatgtcggcgtactttcgggtgggctccacaaactgctcgtgcatgggcttcaccgtggccagatactgctccaccaccgactgcatggagcgtccccgctcctccacatcccgcagcgcccgccgcaggatacgcacgtcggcgtcggtctccacgaaaattttgatgtccagcagatcccgcagcgccttgttctggaagatgaggatgccctccacgatgaccaccttggtgggctttatttcgatggtcctgtcggtgcggttgtggatggtgtagtcgtagacggggcagtggatggtctccccggccttcagccgcttcagatcctccaccatcagctccgtgtcgaaggcgtcggggtggtcgtagttctgcttgcaccgctcctcgaagggacagtcctgccgcttgtagtagttgtcgtgatgcaccacgctgatgtccggtccgaacgctgggccagatgctcggtaagggtggtcttgccggagccggtgcctccggcgatgccgatgaaaatggtgttcatactcgtcgtccccctgctggttttatcctttccattataggaaacctgcgtcggaaaagcaagcgctccccggcgaaagttgtaaaaaaagcttgaacttccagcaattacagttgacggagggcggcaaaacaggtattataacaaatataagtttactactgtgttatcgcccctacggcgtttttaattggaggagatcccatgagcctgttgaaatgccctaagtgcggagaaatgttctccgatagctataagacctgtcccttctgcgaggaggacgaagcctttgccaacggcggcaaaaagccggtgaatcccggccgccgggtccatcgccagaagagccccagcatcctcggccccacgctggtgctggtgctggtgctggtggcgggggtgctgctctataccctcatcggcagcggaaagcccggcgacgaccagcccgatccccccaagaaccccacggaggacgtggatcccaacacccccaccgtcaccctgtctctggaccagacggctctggagctgacagccggcggcaccgggaagctgacagccaccggcgctgagggcatcacatggacctccagcaatgccgatgttgccgccgtgggcgaggacggcaccgtcaccgctgtcgccgccggtacggccaccatctccgcctccgccgagggtgccgaccccgtcacctgcaccgttaccgtgaaggaggcccccaagaaaaatctggtgctgcgctccatctatagtagcgagggaactgcccagacggagtttgcaatgagcgtgggcgacccagctgttcctttgactgtggacggcacagattccaccgtgaagtggagcaccgaaaacagcggtgttgtcaccgttaacagcgccggtgaagtgacggctgtggcatctggtaagactacggtgactgccgaagtggatggtcagacgctgacgataactgtcattgtgtggtaactaaatccccaagagccgcctcccacaggaggcggttcttttttgcgcccccgcaggtctcacagagtttgccgcccacaggaggcggctcttttcgcatcttccacagccccgtctcccgcccgcagtgaaaaatcccttggatttttcactgcggctttacttccccggcaaaacccgctacaataggaaaaaacgagaggaggcgggtctatggagaccttacaggtggcgctgggacggcgcagctatcccatttacatcggcggcggtctgctggagcgggcggaggagctgctgcgcccgctgggtgtgggccgctgggccatcgtctgcgacgatacggtggcagccctgtacggcgctccgctggcccgccgcaccggctggccgctggtgaccttcccggcgggggagggctccaagtcgctggaggagtacgaccgcctgtgccgccggctggtgcagctgggcctgacccgcagcgacggcatcgtggccctgggcggcggcgttaccggcgatctggcgggctttgcggcggctacgctgctgcgtggcgtggcgctggtgcaggcccccaccaccctgctggcgcaggtggacagcgccgtaggcggcaaaacggggctggacctgccggaggggaaaaacctgctgggctgcttctaccagccccgcatggtgctggcggatacggcgtgccttgtcactctgccccggcgtcagctggcctgcggcatggccgaggtcatcaaatacggctgcatcgctgatgaggagctgctgacccggctggagcagcaggagccggactggccccggatcatccgccggtgccttgcctgcaaggcggcgctggtggcgcaggatgagcgggacgaaggcccccgtcgactgctgaacttcggccacaccttcggccacgccatggaggcactgggcggcggccgctatacccacggcgagtgcgtggcggctggtatgatggagatgctccgctggcagacggcccacggcagcgaccagacggccatgctggcccggctggggacgctgctggagcgctatgacctgccccggcggctggacttgccggagacggcgtggcggcagtacctgctgcgggacaaaaaacgcagcggcggcgagatgaccattgcggtgctggagcgccccggccacggcgtgctgtggtcggtgacgccggaggagctgctggaggaaacccgatggatgtgaagctgtatcccgccccgctggcagggttggtagcggccccgccttccaagagccgctggcaccgggagctgatctgtcaggcggcggctggccgttttccgccggtttcccccaacgccccggaggatatccgggccacggcggcgggcttgcgggtcttatacggtggcggggaggaggttccctgcggagccagcggcagtaccctgcgcttcctgctgccgttagctatgacgctgggccgtgaggtgacgttcaccggtacgccccggctgctggagcgggtgatgccgggcctgtggggcgtgacgccctgtcccggcggactgcgggtcacgggccgccttaccggcggtgtgtaccacctgccggggggcgacacctcccagctcattagcgggatgctcatggccctgcccctgtgccgggaggactcccggctggaggcgccggggccggtgtcccggccctatgtggacttaacggtgtgggtgctggagcgctacggtgtcgtgctgcaccgggcgcagggcggctggcgcattcccggcggccagcgctttgcgcctctgcccatagaactggagggggactggtcggcggcggcctattggctggtgctggcggcgctggggcaaggcatcacggtaacgggtctgcggcaggactcctggcagggggaccgcagggcgttgacgctatgccgggagcttccccaacaggtatccctccgggagaacccggacctgctgccgccgctggccttgctggcggcattgcggcctgacaaggaaacgaactttacagatgctgcccgcctgcggcataaggagagcgaccgcttggcggccacggcggccctgctgacggccttgggcggccgggtacaggagacaacggatggaattgtcatccgtggcgtggcgtgtcttcagggcggcgaggtgcagagcgccggagatcatcgactggctatgctggcggcctgcgccgcccccttctgccgggagccggtggtgctgcggggagcggactgcaccgccaaatcctacccggccttctggcgggactatgcccaactgggtggaaaggtggaacacttgacatgatggattataccatattcggggagtcccacggtcccgccgtgggagtgctgctgcgggatgtgccgccgggcctgccggtggatgaggagttcatctgccgtcagctgctgcgccgtgcgccccaagaccctctctccaccgcccggcatgaaccggatcaggtggaggtgctcagcggggtctatcagggcgtgaccaccggaatgccggtgtgcctgctgctgcggaaccgggacgttcgctcggcggattacgatgccctgcgccacacgccccggcccagccacgccgactacaccgcttgggtgcagagcggcgggcgcaacgatccccgtggcggcggggccttttccggacggctgacggcccctctggtggcggcgggtgctctggcaaaaggctggctgaatctacaagatattgaagtaaatgcacaagttattgacgaaaatgccctgcgccagcgggcggaggaggcccgacaggagggggactccgtgggcggtcaggtgcgctgcatcgtcacgggcctgcccgccggctggggcggcccggactggcgggagacggtggagtcggagatcgcccgccacgtgttcgccatccccggcgtgaaggcggtggcctttggagccggggaggagtttgctgccctccggggcagtcaggccaacgacccttggcgtacagatggtcggcgggtctggtctgtcaccaatcacagcggcggcatcaacggcggcatcaccaacgggatgccggtggagttcaccgtgaccttccgccccaccccctccatcgcccagccgcaggagaccatcgacctcacgaccatgaccaacacaaaaatcaccatcggcggccgtcacgatgcctgcatcgccctgcgggcgccggtggtggtggagagtgcggcggccttggccctgtggagactgaagggcgccgacggcggcggagaactggacaatttgcgtggtcagctggacattctggacacagagctgacggcgctttttgtccggagacagtccatttcccgccagatcggcgcctataaacgggagcatcatctgccggtgcaggatgccggtcgggaggagcaggtgctgcacacacggggcgatctggtcccggagcggcggcagcaggtggagcggctgttccgcctgctgatggagctgagccgggaggagcaggcatgaaaaagttgatcctcatcggtcttcccggcagcggaaaaaccaccgtaggcgggctgctggcccggcagttgggcctgcccttccgggactgcgacccgcaggtggagcggctggcggaaagaacggtggcgcagctgttttccagcggagaggagtgcttccgccgctgggagacggcggcattgcaggcactctgcgccggagaggactgcgtgctggccaccggcggcggggctgtgctgcggccggagaaccgtgcgctgctgcggcgcagcggcgtgctgttctggctggatcgcccggtggcagacattgagcggacattggaaatagagagccgcccgctgctggccgggggcggttcgctggagacgctgcggcggcagcgggaggcgctgtaccgcatctgtgccgactacaccatccgggaggatacagcgcaggcggcggcagaggccatcgccgccatatggaggaagcagacatgaaatttctcatcatcaacgggccgaatctgaatctgctgggcagccgggagccggatatctacggcaccggcacctatgagaccctgtgccgccgggtgcaggactatgccgccgtccacggctgggaggcggactgcttccagagcaatcacgaaggggctatcatcgacgccattcagcaggcggcgggggtctacgacggcatcgtcatcaacccggcggcctatacccattacagctatgccatttacgatgctctgcgggcggtagatgtcccggcggtggaggtacacctgtcggatatccgtcagcgggaacctttccgacaggtgtcggtaacggccccggcctgccggggacagatcgttggccatggctttgccggctatctggaggcgttggcgctgctggcggagggcctgtgatgcggctgtgcgtcatcggggatccggtgggccacagcctgtcgccccgcatccaccggcgatttatggagaggtgcggtgctgccggaagctatgaagcagtgacggtgacggcggaggcactggaggatttcgtggtgcagggccgccggggagcgtgggacgggtgcaacgttaccatgcccctgaaggagcgcatcctgccgctgctggatgcggtggagccgtggacagcctcctgcggcgccgtgaacaccgtatgcttccggaatggtcgggccgtggggtacaacaccgacgggccgggggtggtggagagcctgcggctgcggggctttacaccggcggggcaggcggcgctggtgctgggggccgggggagccgccaaggcggcggcgctggcactggcgcaggcgggctgccgggtgacggtgtgcgcccggacaccggaaaaggcggcggccttggctgcccggtgcggcggtgtgactgtctcatgggaggacctgccccgtgccgccgcagagcatgggctgctgctgaacgccacaccgctgggcatggagggctcgccggagttcgagtctttggatttcgtacaggcgctgccgacgaaggcggtggtatacgatttggtgtaccatcccacggacacggcgctactgcgagcggcggggagccgggagttgacggcggtgggggggcttgccctgctggtgcagcaggcggcgctggccttcgcccacttcaccggcatagtgccggatgcggccctgtgccggaatatcttgcaggagctggaggcggcgcagtaggggtgcggctgccgcttccgtaaaaaatgcaaaaaaatctgaaatagggcttgcaaaataaaaaggagtgtggtatagtaatcaagctgacgtgatgcagcaagtgaatatggtatccgggtgtggcgaagtttggtatcgcgcttgaatggggttcaagaggcctcgagttcgaatctcgacactcggaccaaaaaaagttccgaaatctgtggatttcggaactttttttgcgctttttgcgggactcttgaatcagaggaaaaagtcgtgcataacgcatgcataacggcggtgaaaaaagtgcgaaagcttggttttgaaaaagtcactttttgcaacttttttggagagcgtttttgtacgcacgcagaatttctttggcctgtggcaccatggcaaaggtgagatgatgggcggcgcactcgaacgtatcccccaggccggtgtcaaacagggattactcccgtggcagcgccgcctttccaaacagtatgcccagaaaagcctgagttgctccgcagcggtaacagaaatgccatctgcttttataaacttttggatctcccgcttggtgaacctcgccatacatttacggataagctctgcggtgatcttacatcctttgctgtaggcagcggtgccgactgctgccgctgggcgctgtaggatgcagcggcggcccgcaggtccccccggatttcctgacagtccatgctactgcatctccttgacccaccgggtcagggccggtgcggcctcgtccacgtggctgccgtggatggcaaggccacgggtgacggtggcccccggtgcggctttgcggatgtcctgctccgtctgggagaggccgctgccctcgtgggtgcagaaggggcagatgaccttgccggtgaagtcgtagtgctccaagaaggtatagaccgccatgggcatggtgccgcagtagttgggatagcccagatagatgcggtcgtagcccgccagatctttcggcagacccagcagctccggacggacactttgctgccagtcggctctggcctgcgccacgcaggtgcggtagtcgtcggaataggggtgggcctgacggagctccagcaggtcaccgccggtgagggacgccagctgctctgccacccggcgggtattgcccacagggatgcggcgataggagccgccgaagtagttctctcccgcacgggagtaataagcaattagaatagccatgtcaaagactcctttctatgttggctcaatacagggacaggcgctccggggggagggcggggttcgctaccgcccaggagaggtcggcccaagagacagggacctccgcccacaggagccaagtggccatgtcctgcgtgacgcactggttccgggccggcagggggcgctgcagccgcaccgtgccatgaccgtctgctatgtcggcggtgtggagggtggggcgcagggagccggaggcggtggtatccgacaccagcagcagggcgtggtcagtgaaaaaatcggggccgtaggcctttagctccggtacgtccggcagttgggacgctgaggtgatacatcgggcgtcgctgcgccgccgggtatagggcaggcgcacccggcccgccgtctgcaaaggatgctgcttcataagtccctccttgaaaacggtgcgccgcaccgggcctctccggccccgtgcggcgcaggggttatttgctggcgtacaggaccacgtccaccgtcagggtctggccgtcccgctggatggtcaggcggatggtatcacccacagagtggctgcgccgtaccgtcagcaggtcgctggtgacggagacgggctggccgtccgcctccagaatgatatcgccgggctgcacaccggcctccgcagcacccagggcgtcgtccacggtgtagacctccacctgcgtgccgccgccggacttttcgatggtgcggacggtgataccgatggtgggggtacccagaaactccccgtgggcgatgaggtcattgaccacgaaggacacggagctgatgggcagggcgaagcccagaccctccaccgtggcctcctcctcggagaggctggagttgctcattttcatggtgttgatgccgatgacctgcccatagctgttgatgagggggccgccggagttgccgttattcagggcggcgttggtctggatcatggtcatggtgcggccctgcatctccacctcacggttgatggcggagacgatgccgttggtgagggtcccccgcagctctacgcccaaggggttgccgatggcgtacaccgggtcgcccaccgtcagcaggtcggagttgccgaactccgccgccggcaggggattgtccgcaatggcccgcagtaccgccagatcctcgtcctcgtcatagcccaccagacgggcgtcgtaggtgacgccggtgtccagcgccacccagcagctcttgccgccggagataacgtgggcgttggtgatgatatagccgctctcggtcatgatgacgccggtacccacggcggcagagccgtcggactgctccgccaccaccgccactacagacgggttcaccttggcgtacacctgctgaatggtaagctcctcaccggaggggtcctgacagctgagcttcacgccctcctccccggagatgcgggggatggtagtctccttcttgcggaagatatccaccatgctgctggcggagtcgccgtcgtcgctgcccggcaggctgggggcgctggaggcggtggaggacaggagcaccgccaccacgatgaccacgaccaccagcgctatgccgcctatgcccagccacgtccacagacggcggcgcttgcgctgggtcttggcggcctgcttccagacgttctgaggtatggggcgctgctggacgaagtagttgacgacctcctccggctcctcctgccggggggtgtaccagctgacgatctcgtccggctcctcctccgacaggtccgtccggtcctgctgcggctggggcggcagatcgccgcctaccgggtcaaattctctgttttcgtcattatacataggatacttcctctcacggctcgttccgcatggggtgagccatctgaacggtaaagctgaaggcggtgacgccgttttcgctggtgacggtgatctgctccttgtgctgagacaggatggtctttaccacgtacaggcccagcccgtagccgtccttatcctcgctgcgggatttgtcggacttgtggaagcgctcaaacagcagggggatctcctcggcggggatggtctgaccgacgttgcgcaccgtgaccacggccttctccccgtggacggccagccccagatacagggatgagtggggggcggcgaacttggtggcgttttccagcaggttgtagatgacctgggtgataaggtcgttgacgccctccaccatcacaggctcctccgggatgtccgcctctacgtccaactcccggtcggtgatcttctgctccatggacagcagcgccagacgcatactctcgcacaggtcgaagtcctcttttttcatctcctgcgactggatctgagagatatccagcatccggcgcaccagacggctgagccgacggctctcgtcggagataatttgcaggtacttgcgttctttttccggcgggatggtgccgtccagaataccgtcggtgtagccggcgatggaagtcatgggggtctttaattcatgggagatgttggcgatgaagtcccggcgctggcgctccgtctccgccagagagtccgccatattgttaaagcccgccgccagttcgccgatctcatcgccccggtcggcgtcctgcatccgcacgtcgaagttcccggcggcgtaggcccgtgtggcctgcaccatctcccggatgggctggatctgccgcatggaggtcagggaggtgacgatgaacaccagcagcaggatgatggcggaggtcatgaggaacaggctgatgaaggaccgccacatccccatgacggagcgggcgttcatcaccgccagcaccacgccgatggtctggtcgccgtcctgaacggggacgcccaccacgaactgtttggaggtgtaggcgccgcccagactgctgcggccctgatacaggccgctgcccgtcagaacctcctgcgtgatctcctgcgggatggccaccaccttgccccccagccgctggtccgccgtcagcagggcatagccgctgtcgttgcacaccagaaactcggcgttggtcatggcgctacccagactgatgaagcgcttgaggttttcatcctccgtctggccgccggacttcaggtagtccacggacacctgagcaatgagactggcccgctcctgcagctcgtcccgccgctcggtgaagttatagttatagctcagggcgaaaaaggacacgcccagcagcagcagcgtcagcatcaccatgccggcggtcagggcgaactgctgccagtagagcccactgaaccgtttcttgcgctctgccatcacttcacttcaaacttatagcccacgccccacacggttttcagctcccactggtcggagacattctcgatcttctcccgcaggcgcttgatatggacgtccactgtccgggagtcaccgaagtagtcgaagccccacacctcgtccagcagctggttgcgggtgtagacccggttgggcgtggaggccagatggtacagcagctccagctctttggggggcgtatccaccttcttgccgtccaccagcagctcgtagctgtccagattgatctccagcttgtcgaacaccagacgcttgcgggtgtcgtcggggatctcgctgcggcgcagcacggcgttgatgcgggccatcagctccttcatctcgaagggcttgaccagatagtcgtcggcgcccatctccagaccggtgatgcggtcgttgacttcgcttttggccgtcagcatgatgatgggtgtcttggccttttcccggatgtgggcgcagacagaccagccgtccatcaccggcagcatgatatccagcagaaccatatccggcgcctgccggtcgtactcctccacggccttgccgccgtcataggcgatgcggacgtcgaagccctccttctccagatacatccggatcaggtcggaaatattgcggtcatcctcgaccaccagaatgttgcgtgccataggaaacctcccatttatatactatattaccattatacccggcagttttcgggcttcctgaacattttgtaaattggttcatgaaagtataccacactttcggccgtttgtatatgccccggacaatattttccgctggggcggcggtgtgtggacttttcggatattttgtgaacaaacataggtacttctgtgaacattagcactcgacacttgacagtgctaaaaacagtgctatgatgaagctgttccaagggagagagccaaagagctccaccggggaacggaaaacgcatacaatgtgtaagcggtgacaaaagttggcgccggtgagacaccggcacccggaattttgaatggaggtatgacttatgttgcccagcatttttggtgagaatttgtttgatgatttcttctctgatcctttcgggatgatggtacctcagagccgtgacccgctgtatggcaagcacggcaagaacctgatgaaaaccgatgtgcgggagacggagagttcctatgagctggatatcgacctgccgggcttcaagaaggacgaggtcaatgtggagttgaagaacggctatctgaccattcaggccgccaagggtctggacaaggaggagcaggacaagaagggcaagtacatccgtcaggagcgctatgccggcgcctgcagccgcagcttctacgtaggcgaggacgtggagccggaggaggtgtccgccaagttcgaggacggcatcctgaccatctccgtgccgaaggcggccaagaagcagctgcccaagcagacgtccatcaacattctgtaagcgctctgtgagcgtccgtaagagacgggaaagggtccccggcgagagccggggaccctttttgcgtgccgggatgtcagcggatcaggggcaggagcagctggcaggactcacagaagtaggtctctatgtcgtcgccctgcaggaggaccttggagacgacattgtgccggaagaagcccttttgcttgacctcgctgtcggtgaacacgcaggccataggggtcaggccggtggagcccatgaaggtggaggcgccggttttcatctccttaccgcatacgggacattgcatggtacattctccttgctgtgatagtctccggcggccaaagccctccgggaggtctattctatcacagcggcggaggattttccagaggggggagaaaaactccggcagcggtcgcctttctgcggggaaggcgccgggggaaaatcaaaaggtctttgtcccatgggacaaagaccttttttctgtcataactcaacactatagattttttgaaatttgctttcaaaaatcgtcgcatgacagcttcaacgaaaaacatggcacgtagagctcacttgtcttttgattcttcagttgtgtcagagactgctccttccagcagatctgtcactacctgattaagctgtgcggcattcttagcagtaatgaccggcgtgtctgactgggactcaatgtcttttctggttcgtccagccacctgaccgcccgccttggcaactgccaaattctcttggaaggtcgttggtttgcgatctcttgaaaactgagtggtagtggcctccgccagcatattcagtaccagttccagcgtcgtcatgttatcacgaaggttttcctttttcaagcccttcagatttttgtactgccgggtggacatgccagaccaggctcgggaaatctcgtccgtgaggatggcgtactctacgcctttctgcacaccgcgggcatcccattcatccgtcagttctttacggacctggatggcctgcagccgctgattgatccactcacggctgtaacccttcttgagataggtttccagagcgcggtcaatggtcagctccgggtcgatggtctcctcgatacgctctcgaccgacctgtgccagccacaacttgaacggttctgccttcggggaaggaatagactggatgattcggagaagctgctcggtatcggctacatcagtcaatcgttttttgccatccgaagcggtcattttcaactggttacaagctgtaaccgtttcatttccctcattcttcaggcgtttcttcgttaccttccagtagttacgagctgcctgataatctggctgatcagtcagcacagctaccacatcaacgacggaaaagtaccattcttccttttcctcatcccatgcggtccgaatacgcttgttttcgaacagttggatattatcgttttgtgccatttgaatcacctcgttctgtcatgaattctttcaaaagtccttggcagccatccagcacatcctgccaggtcgcctcgaagtcctcggtgtaccatgggtctgccacattgccgggatgggcggtgtgatccatcaggagggacatcttgccgacatagtcgccgccgcagatacggtacatatcccggaggttggcctggtccatgccgatcaggagatcgtattcgtcgtaatcccgatttgtcaactgccgtgcggcatggccttcgcaggagatcccatgctcggccagcttgcgccgtgccggaggatagactgtgttgccgatctcctcccgactggtagccgctgattcgatatgaaattgcgatgccagtcccgccttttttaccaagtccttcatcacgaactcggccatggggctgcggcagatattgccgtgacagataaacaggatcctcttcatactgcgttctctccgaaatctcatcgttgccctcattataccacacatcgaccttttcgtcgagaacactttccagatacgcagaatcctcgatcatttgcagaagctccgacttggatagattttgtgcagcggcctgccggatgtaccagcgccgctccactgcgggtagttctgcttccatgatcacaacgttctgtgtccaattcaagtgaagcgcttcgccaagcagttccggcgtgccgctgtacaactgccagaaatcccgcatccggcgcacattgcgcggagagaagccggtcatatccgggtattgttcttttatgaactccgcagcagctaccgctgcacccttttccgagtgggcacagacggccttgccgatttcgcagtacagctccatctgcggcagatctgctttcatgacagattccagtgtggcaaacattgtgctgtagtccacagcctttcggatattcatagtttctcctttccggcgcacagcgcctgattcaacgctcaaggcagagaaaagcacggtaacatcgccgtgtttttctctgccttgacctgtttcagataacttgtacgatctgctcccagagcagtatgtgcttttcatcaatggcccggttgtcgtggtaatggccgaacagccagtagtgataatgtgctctctccttgacctcctgcaggaaatctgtgagcgggtctgcctcattgtggcggttttccatgagagcaatgctggtgggagcgcagtgcgtgataacatagtccaccgcccaatcgaccttggccagatttttccgtgcttcagcgtactcctcctcagaaggcatctcctgcgcccaccacgaaatgtgattgatgcgatacctcgctcggggctttctctgcagcatcaggagctttcgctcaaaatccggagcacccagttccagaatgccgtcctccgtatcatggctttttgctccgcccatggtgaagaagtgatagccttccagctcgaagacctgtccacgcatcaggtgcaggacatgagagcgaatgcggtgtaccttgccgccgtgccagtctttcaccggatatcgttccagtgcgtcgtagttctcatgattcccgcagacgaaggccagcgtgaacggaagactttccagccagtccaatgcagcctcgtcacggccgtctccaaaccacacaccaccaaagtctccggcacaaatcacgatgtcccgctttgtcatttgtgcctgctccgggaaatatttcggcttgaagcgttcaaagtttccgtggcaatcaccggttacaaaaatcatctttccaccttctttcagtacataattttctggcaaatctcaatgccacccttcagggtgactgcgacctcatccttggagaggatttttactgtctccaccagttggcgaacggcgctctcgtcccactccgtaatgtggagcgatgcgttttccaatgtctgtgcggcatccatgatgcgctgattggcttttgtctgttcgttgttattcgcgaggatcacggaccgtttttccttcaggaaagtctgctcgtccagtatttctttgaactgaccgccataggcggcaggatcattcgtagccttttccaacagtgtttggaactgctgctccagttctctcagcctgcgttcaatgtctcccaggctcatcgtgccgccggggaatgggatgatctccgtttccatggcatctgtgatctgccggatcaggctattcttgtcggccatggccgtgttcagagcggcaaggattgcttgctggagcggcgcttcatccaatgtgggtgaattgtggcagtatttcttgccgtagtctaatcggctcacgcagcgccacacgactcgtttttcaccgtttcgtgtccatgtgcagcgacgatacagggtcccgcattcaccacagaccagccgttccgagagtgcatacttgctggcgtaggaggccatccccgtgactgcgttcttggaggggctctttgctgcattccgccgtgccatctccgcctgtacggcatcatacttttcacggctgacaatgccctcgtggtgattttcaatgaggtacatgggaagctggccaatagccttgcggttgataaagtcctgccggaaggtcttctgcatcagtacatcaccgcagtatttttcattctgcaggatgctgcggatgcgggagatggtccactccggtgaatcctcgaagcacttgacgccttgctgttccagttcgtctttgatcatccgcaggctggccccagtgagatagcgctcatagagccatcggacgatttcggcctgttccggaatgatctccggctggccatcctcacctttgcggtagccgtacagctttttatattggatgctgacctttccggcttccatggcgcggcgcttaccccatgtgacattcgcggagatagattcactttcagattgggcgaaggcaccggagagggtgattcgcagctcactgtcctcctccagagaattgatgttttccttttcgaagatgaccgcgataccgagctgcttgagcgcccggatataatagaggcagtccaccgtgttgcgggagaagcgggaaaccgacttggtcaggatgacatcgattttcttctggcggcagtgccggatcatccgcatgaagtcctcgcgcttcttggccgaggttccggtgatgcccttgtccgcaaagatgccggccatcgtccaagcggtgttggacatgattttatcggtatagtactctttttgcacctcatagctgtttgcctggtcctcctctttggtggagactcggcagtaagctgccacccggagctgtctgcgggcttctgcctggcgggtggtttccggtttggcagggattttgatcactctcggggcatcatctttcattgcaggtcactcctttctatgatttgcccattttttaatcgcagtttgacattttggcgggtcaccagcacctcggatacggtgcttttcagaagatctgcgttcagttccgccacacattcgaatgcggagaagagatgccggagacgatttgtttcatattcttcattccccagagtagcatattgctctgccgcaagccggaggatcagcgctttggcgttatcctcgtcgattggctgctgctccagagcattatccagcgcctcctgcgttttggaatatgtgactggcgtaggactgcgccgatgctgtatgtggtccgggtaatttgcgagaccattgagcaggtcggtgacactttgttccacccgctcagatggtggtgcaccgcagagcctacgcagcaccttttgggcttctgtctttttcggaagttgaggcttgtttgagcgtttttcatttgccgcgatgagctgttccttatctatgagcttgggatattctttttctccggtgtagcgtgcgtccgccagaatacgggcgaccatatttttgttccagagccgtccctcatcgtatgggatatcctgctggcgaagcgactccgtcaactcattcaaggattctcctgcaatatatcggaggaagatctcctgcacaagtttcgcctctgattcctgtatgacgatcttacccagagacatcttgtagccgaagggctgcttccggtttcccatcaccgcaccgtcctctctatggactcccgcagctccagcccatttttcaggcagaagcggacggagtcgttgctctctatgataattttctcaacgagttcagcaaacagttccgcgtcaaagctgtcgaggaattccggcccatcttccaggatgtctatcaagtctcgtgtttgcagggcggtcatgtcgctctcggcatccatcagcttttctttttccagcttggcctgctggagctgcttggtcagctcattggttttggctataaaaatgtcaggatcaacaaggccctgctgtttgagaaaggccaatgtctgattctgactggatatatctgatattcttttattcagggcgacgatgtcaggactccagagcatcctgcgattgcgaatcagctggagacttgtaagcatctgttccagaatagggatgctctgatgtttcagcttgtagtacagacggcagaaggatgcatggatctgagtctcacggatcggcgtgatcaagcaatccccctttgtgtcatgacttgtgcagcatagataccatttgctgttaacatttttaaaccgcatccgtgcgccacagatacaccggatttgtgagatgatctcgctgtgtacgggtgcttttcctaaactgcgtttttgccgtaggccttgagctcgtttaaatatctctggagagatgatcgcatcgttgctccctggcacaaaatacatttcacgctcaccatgattggttttctgctgcctcgagagcatatccggcgtatacctcttttgcagaagcgcattcccggcgtaacgttcgttttgcaggatgtaatctaccgctttataattccatactcgctcagtcaggcagctggcatttaggtcgtctgcgatttcttgaggatttttaccggataaatactcacggaaaattctttggacaatgtctgcttctggttcacatattttgagttttctaccatcaagccgaaatccccacggggctttacaggtattgaattcgccgctctccatcctgcgctgatagctccactgcatattaccggatatggactcgctctctttttgggcgaaggcagcgtagatggctgtgatgagctcactgctcacattgaccgtatcgataccttcacgctcgaatcggacattgacacccaactctttcagttcacggatgttctgaaggcagtctttggtgttgcgggcaaagcgtgagatggacttgacaagaatctggtcaatcaggcctcgacggcagtccgccatcatccgctgaaagtcatcccgtttagccaccgaagttccggtaatcccctcgtccgcatagatgtcgaccatgcgccattcggccttgcttgagatcaactccgtgtagtagcggttctgagcggcaaaggaattgagttgatcctcggagtctgagctgacacgagtgtaggcagcgacccgcagccgcacattttgaggccgttctgtaggttcgatttttataacacggggctgcttttctgccagtgctgttgttccgtctaccagtcgcttttcatccacacccgctcacctccttttttgtaacacaaacactaccacaactgcatccaaatagctactgaaagatgaagaaaatcagagaaaaaacacgacttcaacaccgctatccgcagcgatccgtgcggcgatttttttgagttctttttcggtaaaactgccgcattcccggagttttctgagcaggatgacgatcccatagtaactgatgttggggtccatagttggtctcctttctacatttgactatctctgcggcacaagcatgggaaccgttcaaggaagggaaaggcaggagagaatagcggggccatcggacaaaggaaagaggaatcgaatataagaatattgaaaggtgtagacagttcccatgcttctgccgcaagagtgtggtcgctccggcagcggaagcagatgctcccattaccggagcggccagaactttacggttttgtttgcctgtattcgacactacttccccaggcagggcggcaacttgaactgtgctggcgcacatcacgggactctcacccctccgaggatctctcgaagctgcgtacaggagtatcattgtgggctgacgggatcatggcggggacagcttgccaaagctgtcttggcctgagtgggtatcgctctgcaccttacttggccgtcctttgatgcggagtttctccgcacaggtggtcttcgcgcactcggcctgacgctggctccgtcagctaatgtattcaagttgccggatatgacctgggcggtatttttcaaggagcaaagccgctgatttatcagcagcggggggaggttcaaagccctctcactctattagccgttgaaaacaccgtttgcaccaaacttttttgtcatctcagcatctttttcaatttctgtaagatacggatcttccgattgtggatcgtcattcgatggacgcccatcatttcttccagctcacgctctgagcgctcgtcgaaaaacagtgcatggatcagaactctttcttcttcgctcaactgatccagcgcggcccgtaaacggcgtaaattatctttcctgatcacggcatcctcgacgccttcagcatcgtccgcaaactggcactttgcagaatatataagccgctccaacgaatcctctttgctggaaacataactctccgcaccattctcggcatttttcctgcgctgttcgattttcagatccacctccatgtatttcatcttgcggtcgcttttcttcaagacttccaacacatccggacgctcttttaagcagggatatatcttcaaataatcgacccgatatgggtcgttgtgatacgacattttctgtcctccgtttcatcattttaaaaatttcaaaaacgatgaagcggagggcctcggcatctctcgcaggcagaagaccggcaaaacaaaacgctcattcagttcctttctggaaccaaatgagcgaaaaaagccgcttgatctgccttcaccaccatggccgcattgattcgtctcactctctttgagagcaaggactgcaaatcaagcgacacatgggaaggtcacgcatcaagcggctccggggtacaaacttggatattcaatttttagttgtcaagagcaaggcgtttattacacgccgttacatcttaaaaccggttaagtcgaaatgccaccggcgggaaaaacacctgttctccgcaatgggggcatttcacataaactgcgccgtgatttcctttgcacaggatctctaacttgttctggcaatacgggcaaatcctcgccattgtaatatggctggaatactgttttttcagttcctgctgttctgtctgaatacaggaatagcgttgaggatccagttcccttgcattgatttttgccatactttctccctgccatatcaggcgatctcatttttctccggaaatatatctaccagtgcatacgggtcatacaaatcatttcttccaaccaagccgagctgagatgatcttatggccagtgctgttttggacacgccgagccgctttgcggcctctgaaaaacactcatagtctttgcgtgcatatatgcgattcagcacgccgatgccatctttcaggccaacatctgccatgtggcgatacaccagttcctttggcaaaaggagaaatgaagtcaacacattggtctgccactcctcccaatccagaacagggtactgcgtatgttcatctgccatgcgaaatacgcagcgaggagtttgcacctcatattcttctggatacagcatccaaaacagttgatgcgctgcttcgtgcatcatagtaaagttcaaacggccaatctgattttcagccacaaggctctgatcaatgaaggccgttttcccatctaattcatagtcgagctttgtgccatccctttgagggatcgttatgatcacccccgaagttgccgtaaggccgatggcatcatgtgcttcactgatatctgcaaaggtaaattgcaggccacacatcttctctgcaaaatctgccggatcaatatgatcgaccttttgagggactttttttaggtaatcacgaagcaatctacgggaaatgtgttcgatgtctttccgtgaaagccagagcatctacctgcgcccctttctattccaatgcgtccacaaattagaacatctgttcgcttcttgttaaggagtatagcacgcccgctaatctatgtcaagtgaaataaatcgctcgtattttgtacaaaaaataatcgccatttcctttgcattatcattacaccagctgttggtgagtggaggtattgatttggcatttttaataatgatagttcaagagttttcacaaaatcaacaaaaattccgacttgatattgccaaaggagaatatagcgtataaaataattggcagaaatggaaaaatatagccgaatcgcgagatatcactataatcaaaaattttgaagagagaatggttgtttgatgtgatcagataaagtagtacgcttctgctttaatcaacatcttctgatcgcagcatggggatcgtgtatgatttaagaacgcacatggaatggaaaagggagtgatgcctatccaatagaggttccaacggcgctatttcagaaaagagaaggaaaaacgtattctacttacaggaaaggaaggaataataaccttgcattcccccaaaccatcacatttattgaaatttttataggcttcgcaaatataattttattcaatcatgaccatgggcgtatatacaatggagatgcctacttttaatacacttgctacttcttgttgcggcgaagaaagtacaaaaacatatatggttatgagagaatctggagtattttgaccaataagagtgcagctgggaggagaatcattgaaaaagcaaaaatggaaatataaaatcacgaacggaataaccggagttataatatcctttattatgctcaccatatttggtagcctggcactttggtttcgtatcagccggaacggggcaatcatcattggcataatattggtgatctttgcatcgcttgcctttttcctagccttgtaccgcacattatttttcagggtactgattgataaagacggattcttctatcagaccgctccaggtaacggaagatactatcactactacacaatccgccaaatatgggtcagcagtggaaacgatgcaaatgcacagcaactgcaatattgcaactttgaaacgcaggacggaagaaccatgagatttttctttagaaatctagattgggacgccgtagactatttaatcgcccaagtagaaaacaccgaggaacaggcgcaaaggagcgacggtgaccttatgatcagcggcagggtacagggcggtgtcaggctcgtcgcagctgtctgtattctggcggcggttttgtttgtgaacatttatttccgaactcaaggcttgccacccattatctatgtaccgcctgtagtgctggcagtaacagccttttttgtgttggtgagtcataatctgttctacaaaattctgattcaaaaggacggattttactgccgaaccaacccctttgacggaaaatactataaatacagcgaaatttcaaattgccacctgacagaggtggtgcaaaggcaaggttccgtccgcaacggcaccagacggacgggatattcttactattttacattcactgactccattggtaagccgcataagattctgtatgataaggctttgtttcaacgggaaatggaggtgctgatggagcgaagcaagggaatatgaagattatgaagatgtggagaaatacaacattattcgcctacttccgattcatgggctatgtgatgatgattgtgggcatctacctgatcgtaaacgggattggagactatgcaggccaatcccgtcagaaggactggattcccatagaggccacggtcacggatgtctccagcgaggtagtcagctcttcgcccggaaggcatggtagcaacagcagtacctactacattatggcgtatgagtatgccgtggacggagaaacctatacgggccgcacagggcgtatgtcatcgccccgtctgattggtactgtcattactgtgaaatataacccagaagtgccggaagagaatacggcgattctctctcccaatacccacaatctgctggtccttttgattttgggaacggccatcgcagtggtgggctttttcctctctggggtgctggagctacttcgcagccttctgcgaaggacgcacacagaggagctgaagaaatcggttccggagacagacacgggatttgattcaacggccattgcaaaaatcccggcaaagcagtgggtcccccggcttgcggcttggcttcttgcgttcgtcgccctcgtccttttcgtgaaattcttcctcacggcgggagctgcggacttggatgagttccgcaatgccgcagtggcgaccggctacaccgctgtggactccacggaggacgttcgccagagatggggcgtcgggtccatgttgatccgctctgtttccgtgcatgaggactccttgcggttagacttctgtaggctggattccgcagacggctgccgccgcctctatgccgccgcgaccctcccaatcaccggtgaggtgacggagagcaatacctttactggtcaggtctatgccgtggacagccccacgaatttcgcagcaaaaatccgcagtggacagataatgctctatgtgtataccacgcaggagggcaaggccgatgtgcttgcgtttctggaatctgtgggctggtggagcgaataagaaacggaaaatttactactgcagaactatgaattctaatgttgaagtaattggagacatggagccagagacggcattggttttctcagctaaggcggagggtggttaccagccgtatgtatgggagtatgctatttacaaaggtgatactctatactatactctaagtggttcaacattcgactatcttgagtggtcgccaacagagacaggaaactataccattgttgtctgcgttatagataaaactgggtttaaggcaacatactcgaaacagttttctattatttgaatcaatcacagggaagtggcattagccacttccctgtgatataacaaatcgctatggattcaatatggagaataagatgaaagaaagaaactggaagtataaaatcaccggtaactggtttggacctatggtgattgcaatcacgacggcggtctccggaggattcacattctggctttacactgcacacgatggtgcctttgttggactcggcggcctaacagccttttttgctatcatctgcgttctgtccgcatacggtgcaatgtctttcaagttgcttgtggataaagacggcttttattttcggaccaaacccggcaacgggcggtactaccgctacagcgagatttgcagcatgtggctcagctccggcagagagacggacacacaggaagcaacctactgcaactttgaaacgatagagggaaagcggtcgagatttctcgtacttgacccccaccttgatgcggtggattatatgattgaacgggttgaggccgtgggaagcagacgtggggatgacgacttcgaccgcgagatcgtcattaccgggaagacggagagtgtggttatcataatccttgtgatttttggttttcccatactttacttgatgctttttggatggaccaccatgccgctgattttccgcatgattccggtcgccattttgctgttttcaattgtgcgggctttttctcacggactgttttatatgctaaagattcaaaaggacggcttttattgccgcaccaatcccttaaatgggcggtactaccgctacagcgacattctggactgctgtctggtcgagtcacagcggaacatgcgcagaagcgcaacgcgttacggttactacatgaaattcaccgactgcgaaaaccaaacacacagggttccttataacaaatcgttgtacgaaggggaaatcgacgaactggtcgccaggatcaagagggcaaatgaagatgaagcatgaatcggctgttcaggccgtgaaagaactgatgcggaaggactcagtttttcggtctgtaatacagggctggggcgttgcgacgctgcttatcggcctctttatgttttatatgggggccaatacttatattcaatcatacaagcagacggattgggtattcggcagcgcatacattacggatatttccgagttgaacagaagcaaagttggcaggggtggcatcaactattcgatgacctacgaatatgaagtggatggaacgcattatacaggtaaatatggccccctggcaaactctatcgaggtgggcaggtccatccgcatcaaatacgatccgagcgccccggaaaactccaccggctttctggcgccgagtggcaatgatcttgccctggtgatcataggaacgattcttgccgtgcctggatttttcatgtcgggcatcctcggccttctgcggaggcttctgcggggactgcatcgaagcgagattccagactacgcaccgccggaagagaaacgcactgcgccccccaaagcccccgcgccctccgcctgcgatatagttatgggggtacgcaatatcctccgaacccttgcgccgatactcatattcctgcttttcggatttatcctcatgctcatccaaaacgcaatatcctaatcacaggaaccatgtgaattacattgaatgttgcccgcagaaaagatcgtgtaattgcaaggttaaatataagctcaaaagtcaggcgcttataaagggccgccatcttaagaggccgtttctcacgactttcgggacactcacgcatagcagttttttcggcccaaactggtggcgttgtcaagatttatacgcaaaaaggattttatgttcaggctgaaagaaatttaccgagttttcctccagatattgcatagaccatatccttccttgttggcatcaccgattttttataagacatgttgcttgttcttttctctgtcttaatacctccgatagagtgctcttttccatgccataggctttatatcccccggcaaagcggggggtcctcttttgcggccaaaaggcatcccggtcactggattacgcagtgaccgggatgtttaatacattttatccgaatgtcttcattttattttcaatagcgttcactccgaccatcgtgtttgttgatgcaagactctgcaatttagccacattagtcctcgaaaccatcggttttactgtaacaactccctcattgactccaatcacttttccccgtgcaattgtatcagtaatcctaacgccagataagctatttgtttttcttaccatttcaaccttcgctctcgacggaattgtaacaactaagctatccccaaattttggagttttactaatatccccaattctaatcacaaacttatcattagaggccgaaacaatttttgcttgcaatttttttcttttttccatcatattttatatcaatgtacagacgcctaccaatgagccggcttgctctggatcgcggatatgagacgggcgctgttcaccgagggctggagcttctgggcattaccggatatatccccgcaattcagttctccaatccacctgagaaatatggattctcctacgatccacagctcgacgcattcatctgtccggaaggagttcctcttacataccacaggctaaattgcagcaaatcgacgggcaaatatctgcgttgctaccaggtcgagggcgatgcctgtatgcgctgtccaaaacggccgagctgttttgacaaggctggaattcggcgcagagtgctggccagcagttgct

SEQ ID NO: 12450 - DNA, 23222 bp, Unknown
  gut microbiota DNA sequence
acccaggatgaccaggaagatcaggatggagatgtcgatggcgttgatcatgccgacgccctcaccggcgccgacgaaattcacgaccatctgccagggctggaagttggccagcagcagggcggctgccacgcagcccagaaacagggaagaatacacttccttgctgatgagggccagtgcgattgcgacaacaggggggaacagggcccagccggtacctacaaagccagagccatcattggtgaccttggcaatgaccagagcgactacgaccaccgccagcgcaacaaaatacgctatcttggtgcctttcttttccattaggtgatttacctcctcaaatttggtatccctatcttactcgtcctaacggactattgtcaagttcttagcgtgcttttccctctttttaacaaattgtgaactggccttttggattttttcacaagaattattcacgatatggtggatactttacatgctgactggtaaaaaatacaaggattgtatacaatggaaagaaaattaaggcccttaaccggcaaaatgctgaaacaccacgcgtagttctatcatgcagaataaacgaaacggcgataacagcatgggagaaggactgtcccaaacccggcggagcggccatgataccccgcaggaacagggagctaccgtttggtcgaaacagctttttgttctcctataaaagacgatataacggaaatctgtgcgcctgcagcgtgcagcaggcaaaggccgcatcgtccatgatgatctgcacgctttcagcactggcggaatactttttgtcaacaacggtgctttgcgcaaggaacgtgtctccgacggcatactttttgccaacagcagcaaaaagtatgaaaaaatgccgccagaaaccgatggtttctggacttcctttaccgtcaagaggcttgcttgttatgggaccgtcaagggaattgaatcagcaacagacccgctgccgctcccgctcaggtgaagaaaatatttcatttactgctgggagtacggactcccccggtagaacagtaagcttcttcaactgaccgggtagcggcagcgtgagcagaagcagatcaattccctttttcgacgggacttagaccacagctcttgcaaacgagaaggaagtgcagaaaccatcggtttctgctggcgttctttggtgactttctttcgctattgaaagaaagttacccgtcggagacaaaataagattacttccccaaaggtatgccgccggaggcaataaaataagcaactgcaaaaacatcccccgccgcaggccaaagcagcacaaaaacacaccgccccggcgcatgacgcagccggggcggcaaagagagggagagagagcatttttcaagcggcgccgggcactcagtcgccctcacgcatccggtagcccacgcccacctccgtgaagatgtacttgggctggccgggattttcctcgatcttgcggcggatattggccatattcacccgcaggatctggttgtcgtttttggccttggggccccacagctccttgatgatgaagtcgtaggtcagcaccttgccggcgtatttgcccagcagggacacgatccgatactcgttggcggtgagccgggcattttccccgtggatcagcacctgatgcttgtcatagtcgatgaccagatcgccggtggtaaagcgtccggactgggcgatttccgggttagagagggaggtgcgggtgtggcggatggcggtgcggatgcgggccagcagctcggaggtgccgaagggcttgaccagatagtcgtcggcgccgtagtccagcgcctccaccttgtctcgctcgtggttccgggcggagaccaccacaatgggcagactggaccacttccgcacggagcgcagcacctccaggccgtccatatccggcagccccagatccagcacgatgaggtccggacagtgggaggagatcatggtcagcgcctcttcgccggtgttgacgatgatggtgtcgtagccgttggccgtgaggatcatagagatgaagctgctgatgctctgctcatcctccacgatcaaaaccttatccttgatcttcatagctgtctacctcctgttgaatttctttatccaaaggcagctccacggtgaatcgtgcgccgccctcctgtctgttttcgcccctgatgtgaccgccgtgagcccgcaccaccgtccggcaaacggacaggccgatgcccatgctgcggccccgatctccctgctgaccctgcagggtgccgtcaaagagatgctccagccggtccggggcgatgccctgtccgtcgtcctccacgatgaaccgggcccagtctccgctgcggcacagggtcacggtgatgtgccgggtggtcttgccgtggagcacggcattttccatgagattggtcagcacctgctccatcagcagcggatccatgggcaccagcagaaactcctccggcagacgtacctccaccgggatgtccgttccccaccggcgggtaaacttgcccaccgccccctcgatgatctcctcggcggcctccggtgtcttgttgaccttggcctcgtcaccgcccatgcgggtgatgctcagcagattctccacgatgcggatcagccactgggcctcctcgttggcgttgcggatcagctcatggcgctgctccggcgtcagggtattctcctgctccagcagcacattagtggcccccacgatgcccgtcaacggcgtgcggatgtcgtgggacaccgcccgcaggaggttgccgtgcatccgctccagctccgcctcccgccgcacctcatccatctgcttggcccggctggtaacgatgccggtcacaacggaaatggtcatggtcaccagaaaggtcaacgggaatcccgacagagtgaagctgacgttccagtagggcggggtgaagatgtagtccacgctgagcacggcgaagatggagatgatgaggctgaagaagaagccctccgtcagcagcgccgtcaaaaacacgtccagcaggaagatcatgtacacatacccggtgtcgccgtcctggctggctccccgcaggatcaggcacagcaccaccgacagggtgtataggctcatggagatgataaagtccttgccggagtaggaaaagccaatggaggggatacgctttcggcgcagccactgctccggccattggatgtgcggtttcttcaaatccctgccacctcccgaccctcaggtttttctgacctgattataccatacttcatgttaagatttcgctaaaaacctgttaagaacagagaaaacgccggaaaagacttttttcgggaccggttgacagagcaggagaccgtctgctatactatatataactaaagaaccagtcatgcagtgagatgctgagccatgcagaattgcccggaggagacgccgggcgcttttgcgtggcttttttgttttagaaaggagagatggatcatgtatgatgtactggtcatcggcggcggcgtcattggctgcgccatcgcacgggagctgagccgccgcagcggccgcatctgtgtggtggagcgcaatgaggacgtctgcaccggcaccagcaaggccaattccgccattgtccacgccggcttcgacgccgagcccggcacccggaaggcccgcttcaacgtggagggcagccgcatgatggaggccctgtcccgtcagctggactttccctatcgccggtgcggagcgctggtgctgtgtctggatccggcggaccgtgagaagctgcaggccctctatcagcggggtcttgccaacggcgtggaggggctggagctggtggagggcgaggccctgcaccggatggagcccgccctgtcccaacaggcggtggcggccctgtacgcccccaccagcgccattctctgtccctttggtctgaccatcgccttggcggaaaacgccgccgccaacggcacggagttccgcttcgatacgcaggtgcagcatatccgccgggagggggaccacttcgtggtggacaccggccgtggcccgttggagagccgtgccgtggtcaacgccgccggcgtatggggcgacgtgctccataaccagttgtgcggcgatcctctgcacatcaccccccgccggggcgaatactgcctgctggaccgaaaggacggcggtctggtgagccataccgtctttcagctgcccggtgccatgggcaagggtgtgctggtgacccccactgtccacggaaacctcctcctcggccccactgccacggatcagcaggaccgggacgacactgctaccacccagacaggtctggattacgccatcgccacggcgggccgcagtgtgccgaacctgcccatgcgggatgtcattaccagcttcgccggcctgcgggcccatctggagggcggcagcgacgacttctatatccgggagagcagcgagaacttcttcgaggccatcggcatcgagtcccccggtctgtcctcggccccggccatcggcgtgtacgtggcgggactggtggcggaaaagctgggccttgcggaaaagcccgatttcatcgctcagcgccgggatatcgtccacgtgagggagctgccgctgccggagcgtcaggcgttggtggagcgggaccccgcctacggcaatatcctctgccgctgtgagcagatcagcgagggggagatccgggacgccatccgccgcagtcccggcgcccgttctctggacggcgtcaagcgccgggtccgggccggtatgggccggtgtcagggcggcttctgcgccccccgtgtcatggagctgctgtccgaggagctgggagttcctcagacgcagctgaccaaatccggcggcgggagccttctgctgaccggcgagacgaaggaggtgcaggcatgaagcaggtgcagcttgccatcatcggcggaggcccggcgggcctgtccgccgccattgccgcccggaaagccggggtggaggatatcctcctcatcgagcgggatcgggaactgggcggtattctgaatcaatgtatccatgcgggctttggcctgcataccttcggccgggagctcaccggcccggagtacgccggagagtatgtacggcagttccgggagctgaacatcccctgtctgtctggtgccatggtgctgaacctgtccccggaccgggtgctgaccgtcaccggccgggagacgggcctcgtgcagattcaggcgcaggccgtcattctggccatgggctgccgggagcgcccccgtggtgcgctgaacatccccggcacccgcccggcgggcatttattccgccggtgcggcccagcgtctggtgaatgtggagggcctcatgcccggccgggatgtggtgatcctgggcagcggcgatatcggcctcatcatggcccggcgcatgacgctggagggcgcccgtgtccatgccgtggcggaggtcatgccctattccggcggcctgaagcggaacatcgtccagtgtctggaggacttccatatccccctgtacctctccaccaccgtggtggatatccacgggcgggagcggctggaggcggtgacactggcacaggtggacggcagccgccgccccatccccggcacggagcggcgcatcccctgcgacacgctgctgctgtcggtgggtctgctgccggaaaacgagttgagccgggaggccggggtgcagatggaccccgtcaccggcggcccggtggtgtccgacgacctgtccacctctctgcccggcgtgttcgcctgcggcaacgtgctccacgtccacgatctggtggacttcgtgtctcaggaggcggccaaggccggcgaaaacgccgcccgctacatcctcggcgggcagggcgagacggccaccgtccggttggaggggaaaaacggcgtccgctataccgtcccccagcagctggacccccaccatatggcggacagcgtcaccgtgcgcttccgggtggggcaaccctatcagaaggcggccctgtgcgtctataccgacggtaagctcctgcgccgggtacctaagcgcatcctgacccccggcgaaatggagcagttcaccctgcggcgggaggagctgccggagagcgttcggaccgttacattccagatcgaggagggggaagcgaaatgaacatccgtgaactgacgtgcatcggctgccccatgggctgccagctgcgggccacgctggaggatggcgtcgtcaccgccgttaccggcaatacctgcccccgtggcgatgcctacgcccggaaggagtgcgttcacccggagcgcaccgtcaccggcaccgtacgggtgctgggcggcccgctgccggtggtgccggtacggacgcagggggaggtacccaaggagaaggtgctggaggtggcccgtgcgctgcacaccgccgccgtccccgctccggtgcaggccggtcaggtggtccttgccgacgtgtgcggcaccggtgtggccgtggtggccacaaaaaacatcggctaagcgttgaaaaagtcctctgtcccgtggtaacatagggacagaggattttttttgcatcttgcgggcggccatgggccgctgcgggtcatgggcctgccctgtgggcggcggaaaggagggacggccatgcgccatcccatgatgagcgtgctggagcagaacccggtgcttccggcggtgaaggatgccggacggctggaggcgtgtctggcccaaccggcgggggtggtgttcctgctgtgcggggacattctgaacatcgaccggctcattgaccgggtgcatcaggcggggaaatatgccgtggtacacgccgatctggtggcggggctggctccccgtgaaattgccgtggacttcctgcaccgctgcggggccgacggcatcatctccacccggcccatgctgctgcgccgtggccgggagctggggatgctgacggtgctgcgggtgtttgccatcgactccaaggccgtcagcaatctgggccgggagacggagggcgggatgcccgacgtcattgaaattctgccggggacactgtgcaaggtgctgcggcggctgagccgggagctgccggtgccgctgatcgccgggggtctgctgtcggacaaggcggacgtgctggcggcgctgggggctggggccctgtgcgtctccgccagcgacgagagcctgtgggcgctgtgagccgtgccgaaatgagctgccgtgccgaaggggactgccgggtacaggctgtcgcctgcgaagccgccgccctgtggcgctgcggcgctgagacgatggagaaccgccgtcctgccacggcatgggaagaaaacgtgaaacggatgggccgtaggatgggtgcatgaaacggataggcaaaaacgaaacaacggaaataaacacagtcaaaaaatgcttcgtggggctggaggcggcgctgtacctgctgtttttggcgctggatgccttttccaccggcggcggcgacggggtaaaatacctcaccatcgtggtgtgcctgctggcggcggtgtggtcggcccggcacggcggcagctgcctgatggcgtgggccatggtctttactctggcggcggacaccttccttttgctgctggatcggtggtatgggatgggcatcgtcctgttctgcgtggtgcaggggctgtatctggcccgcatccggcgggcctgcggccgcaccctgtgggcgctgcgggcggggctggtgccggcggcgtgggtgctgctgaatgctttgggaatgggaacggccctgaatttgctggcggcgttgtattttgtgaattttctggtgaacgcctgccagtccctgactctgcgctccgagagactgtttgcggcggggatgtggctgtttctgctgtgcgacgtatgcgtggggctgcggaaccagccgtcgctgctgccgggtcttgccggggcggcgcaggtggggatgtggctgttctatctgccgggacaggtgctgctggtgctgtccggctttccgaagcgaagggggaatacgacatgaaggaagcgaaaaagctgtggtcatggctggccatcccctgtatcgctctggcggtgctcaccggctccatcctgccggtgctgctggtgcgggacttttatacggcgcagatcggccctctggggatctgcgaggccagcggtctcacccgccaacaggcggcggaggcctacggcgacgtcatggactactgcatgggccgcaggccggatttttccgccggggtgctgcccttctcggcggagggcgccggccactttgccgacgtgcgggggctgttcctgctggtggtgtgggtgttcgtggcggcggcgggactgctgctgacaggggctgttgtgtgccgcctgcggcggcagcggctgccccggttagggggccggacaccgggcttctgggcggcctgcgggctgggtgggctgtttctgctgatcgccctgctggcggcactgaattttgatggggccttcacggtgttccacagcattttcttccccggcaaggataactggctctttgaccccgtcaccgatccggtgatcctgatcctgccggaggcatttttccggaactgcgccatcgccattgtgacggtgctgctgacagtgtgcatcatgctggtggtgacgggcagaaaaagaccctcctgccggaatgctccgggggagggtacggcatcctgacaaaaccttgtccactggacaaaatcggacaagagacaggcccggctggacgtccgctttccgtccgccgaacgtcccattttgtcccgtgccgcccctgtccgtccccactgaggggacttgacagaaagcgacggaaaacctatgagtctttgctaagtgtcagagatttaacaaatcattgggccgaccggcggaaaaattcatcggctgtatccggttggagtgatcgccgtcatatagatgccgtataggcgctgcatagggagtgccgagccggcagaagggtcggcggctgcacctgtgcgatacacccaccgcatcgaaaaagataaaccacccgcaccgggagaggtaaaccgctggcagggagcctatcgcatcgaaaaaatgaaccggcgatagggctatctaccgtaccgggaaaatgaaccggcagcggggcggtaaaaaaataaagcgcccgacggcgcttctgcaaaaaaaatatccacgctcaggcgtggcgctttgttcggggatctgccttaccgctcgctgggctgccaatcgcagtcggcgaagatcatatcgtccagatcgcccttgatccacttgttggtcattgtgctatcacgctcctttcttctcttttctatgatacagtataccccggcggcgagaaaaatacaagaaccaaattctacatttataccaaaaactaaccagtaaattttgctattctgcacaaagaaggggcttgcctttggggcgggtacattatataataggttgatattttaatggatcgatattctatcgggcctgccgacggcgggctgctccccacggagaaaggcggtggcgcaggtggcggagagaaaacgcagacacggaaagctctatctgctgctgatggcgctggcggcggcgggagctgccatctgggtgggcagcagcgtgctgtcagtggaggaattcgccttcaccggcgcaagactgcccgccggttgggacggcggacggctggtggtactgtcggatctccacgggaagcggtttggacggcagcacagccgcctgctggaggctgtgcggggggccaagcccgacgtcatctgcctgtgcggcgacatgatggacgagtggagcggcacggagtatctccggccgctgctggagggactggtggagatcgccccggtctattacgtcaccggcaaccacgagtgggcctccggtcggatgccggagatgcgacagctgctggaggagacgggggtgacgtacctctccaacacctttgtgccgctggagcggaacggggacaccattacgttggcgggcatcgacgaccccaacggctacgccggccagaagtccccagaggaggtggccggtgaggtgaaggaggcggcaggcgacggcttctggctgctgatggcccaccggaacaatctctttgacggggaatactgccggttgggggcggatctggtgctgtcgggccacggtcacggaggcatctggcggctgccctttaccgacggcctgctgggggcgggcgggcagctgctgcccagctttaccaacggcttttaccgctgcaccgacggtcacgaggcgcaggtctttgtgacccgtgggctgggggggatcccccggctcttcaaccacccgcaggtggcggtgctgaccttacactgtgaatgaggcgctgggatgaaggagttttttgccggacaatttgatatcgccgtcatcggcgccggacacgccggcatcgaggcggcgctggcggcggcccggatggggctggagacggtgtgcctcaccatgaatctggacgccgtgggcaatatgccctgcaaccctgccatcggcggcaccgggaagggacatctggtgcgggagctggacgctctggggggcgagatggcccgtggggcggacgccgcctgcatccagtaccggatgctcaaccgggggaaggggcctgccgtccactccctgcgggcccaggcggatcgccggaagtaccagcaggtgatgaagcatacgctggagcggcaggagcatctgaccctgcggcagggggaggtggtggccctgcggacggaggacggctccgttcgacaggtggtgctgcggacgggggctgtgtacggcgtaagggccgtgatcctgtgctccgggacgtatcttcacggccggaccatcgtgggcgaatgtgtggagtcctccgggccggatggcctgcacccctccggagagctggcagactgtctggcggctatgggactgcccctgcggcgcttcaagaccgggacgcccccgcggatcaacgcccgaacggtggactttgaccgcatggaggtgcagaccggtgacgacgtgccggtacccttcagcttttccaccacccggccgccggagaaccgggcggtgtgctggctcacctataccaatgaggagacgcaccgcatcatccgggagaatctggatcgcagccccatttataccggggtcatcgagggggtggggccgaggtactgcccctccatcgagacgaagatcgtccgtttcccggacaagccccggcaccagctgtttgtggagcctatgggccttgacacggaggagctgtatttgcagggcttttcctcctccctgccggaggaggtgcaggtggagatgctgcacaccgtgccgggactggagcacgccgtgatgacccggcccgcctacgccatcgaatacgactgcatcgacccgctggccctgcggcccacgctggaggtaaagaccgtccgggggctgtacggcgccggacagttcaacggctcctccggctatgaggaggcggcggtgcagggcttcgtggcgggggtcaatgcggcgctggcgctgctggggcgggagcccctgatcctgcggcgcagcgagagctacatcggcaccctcatcgacgatctggtgaccaagggtacgcaggagccataccgcatcatgaccagccggtcggagtaccggctgctgctgcggcaggacaacgccgaccggcggctgacccccatcggctaccggctggggctggtgccggaggagcggatgcaggcggggcgggagaagtacgaggccgtagaccgggagatccgacggctggagcacacgggcatccccggcagcgagggactgaaccggctgctggcggagcgggggtcggcccccgtcaccgacggcgcacggctcattgatctgctgcggcggccccagatgacgtaccgggagctgatgaccttcgaccccggcgccccggagctgccggaggacgtggcggagcaggtggagatctccgtgaagtatgagggctacatccgccggcaggaaaagcaggtggaggagctgcggcagctggaaaagcaccggctgccgccggatatggagtacagccacattcagggactgcggctggaggcacgggagaagctggcggcggtgcggcctctggatctggggcaggccagccgcatctccggggtgtccccggcggacatcgccgccctgatgatctggctgcacacccggacggagaggggggacgccacatgaaaatgctggatctgacccactgcatcacaccggagatgccggtgtatcccggtacggagccgccccggctgacggcggcctgcaccatggagaaggacggcttccgggagacgctgctggagatgtactcccacaccggcacccacatggacgctccggcccatatgctgccaagcggacggacactggacgacttcccggcggagaccttcgccgggcggggcttcgtggtggactgccggggagcggcggagatcacgctgcccatgctgcggcggcaggaggaggccctgggggaggcggagttcctgctgttttgcaccgggtgggaccggtactggggccagccccggtactatgagggcttcccgtgcctgacggcggaggcggcggaatacgtggcgtcgctgggcctgaagggcgtaggggaggacagcatctcgctggacccctgcgatacgacggactatcccaatcacatgatcctgctgggtgcgggactggtcaatacggaaaatctgacagggctggaggcgctggtgggcaagaccttcaccttcctgaccctgccgctgaaatgggagcacgccgacggcagcagctgccgggctatggccatgctccgggaggaggaaacaagataatgggcaaactgcgatttttactggcactgtggctggcgaagctgtcggttccggcgctgaagatcacccggcacaacggtacggactttcccggctcgctggcgctgaagctgtgcccggatttcctgcggtatgtgggaaagcccggcaccatcatcgccgtcaccggcaccaacggcaagaccaccgtcagcaatctgctgacggatattctggaggcggacgggaagaaggttctcagcaaccgctccggctccaacatcacctccggcatctccacggcgctgctgcggggctgcgacctgctggggcgggccaagccctatgacatggcggtgctggaggtggacgagcgggccagcgtccgcatcttcccctatgtgaagccggactatgtggtggtcaccaatctgacacgggactccatcatgcgaaacgcacaccccggctacattgcggatatcctgacccggagtatcccccagacggcgaccatgatccttaatgccgacgatctgatcacctgcggagtggccccggagaaccggcgggtctacttcggagtggaccggctgccgggagatactacccggtgcgagaacctcatcgacgatctgcggatctgccccaagtgcagcggtaagctcacctacgtctaccgccggtatcaccacatcggcaagtgcgtctgcccggactgcgggttccactccccggagagcgactatctggccacggatgtggacatggagaaggggaccatggccctgcgggagggcggggaggagcatccctaccggcttatctccgacagtgtgccgaacctgtacaacatggtgacggtcattgccgtgctgcggcagctgggatacagccacgaggccattagcggctacatgagccgtgcggcggtggtggccacccggcacatggaggagcaggtgggggacgtgaagctggtgcggcagatgtccaaggagaagaacgcactggccgggtcccgaaccttccagtatatcgcccagcggcccggcaccaaggagctgctgctgatgatgaactgtctgggagatgcccaccactggtcggagaatacctgctggatcttcgatgcggacttcgagtatctctgcaatgacagcgtggtgcagctggtgtgtaccggcgcacggtgccgggactacaagctgcggctgctgatggcgggggtgccgcaggagcgcatcgtctgtgagccggacgagttccgggcggcggagctgctgcgctatacccccggcgatgacgtgtacattctctatggcacggactctctggccctgtcgtataaagtgtatgaccacatgaaggaggaagccgcccgccatgcacaggacggtgcggagaaggaggcgcaggcatgaaggtagagatcctgttcccggaggtggggaacctctgcggcgatctgatgaacatccggtatctgcgccagtgctgcccggagctggaggtggtggagacggatctgaagtcccgtccggcatttttggagggcggcgtggatctggtatatatgggctccgccacggagaagggactggagctgatggtgaaggccctgaccccctatcgggaggagctggcggcccgtgtggacggcggccagcggatgctggtgacgggcaacgctctggatgcgctgggggaatacgtccagtcggatcaggggctgcggttcgacggactgggcctgctgcccacccatgccgagtatcagatgatgaaccggcacaacagcttctttctggggacctatggcgccgggatggagatcgtgggcttcaagagtctgttcggccacacctacggcgccgacgatcccggcacggggctttttaaggtggttcgtggcgtggggcggcggcccggctctctggtggagggcttccgccggggcggcctgatggccacctatctcacggggccgctgctggtgctgaatcccccctttaccaagcagctgctgcaggagctgggggccgagggcacgctggccttcgaggaggccgccatggaggcctatgaggcccggctggcggagttccgggacgagaagcgcagctatctctattaagactgatgacaggtatcaccagaaacggctggtcaagctccgccggatggggtatactgaagaacacatgaatacgggaggtaatgtatgtccaagatctcttatctcgcacgggtcatgtccggcgtgcggctgaagaaaatgaaccagatgatcgacatcgtccacgacaagtgcggccagaacaaggtcaagactttcttcgatatgtgctggtgcggcgcacgctatggggcggggtactacgactatgtgatgttcgggttttacaacatgaacggccgccagcgggacacctatctcacccgtgtccgcaacaagaaggtcatcgaccacatgaacgacctcagctactccgacgagttcgacgataagctgcggttcaaccagcggtttgccaaatatctgggccgcaagaccctcaacggcgagacggccacgctggcagagtttacggactttatcgccgggcaggaggccatcttcgccaagatcaaccacggcgactgcggacggggcgtgaacaagctgtatgtgaaggactatgagtccccggcggtgatgctggactacatccggcggaaccagctggtggtgctggagcaggtgctgccccagcatcccgatatggcacggctccatccctcgtcggtgaacaccatgcgtatcctgacggatctggtggacggggaggtccatgtggcctacatcagcgtaaagatgggccggggcgacgggtactgtgacaactccgggcaggggggtgtcctgtgccgggtggacccggagacggggaaggtcatctctcccgctaccgacgactatttcaacgtctatgaccgccatcccgacaccggggtggagttcgtgggctatcagctgcctatggtgccggaggccattgctctggccaaggaggcggcccacgagatcccgcaggtggcccatgtgggctgggatatggccatcacacctaccggccccgctatcatcgagggcaacgacttccccggaacggatctgtgccagctggcgcccttctatccggagaaggaggggctgtggccgtactataagaagctgctgcactggtaagagtggtatgcaaggaaatagggagtcctgagaccggaggtttcaggactccctttttgcatcatagcttttgtgatctgcctccggcgggtgactttctgccaatagcggcagaaagattcaccgtcgtgtcagccggtttccagccacgttgtggcatggaaaccgggacacttcctcgaaaccacctcgcttcatccgccacaggcggcgattcggtgatttccgtttgaaaccgatggtttttggattttctttcccttcaagagccttatttgttatgggccgtaaagggaattgacttagcaacagacccgctgccgctcccggctcaggtgaagaaagtatttcgggagtacggactcccacgatagaacagtaagccccttcaactgcccaatgtagcggcagcgtgagtagggggaagtcgattccctgcttcggcgggatttaggatacaactcttgcaaacggcaaaggaagtgcagaaaccattggtttctgctggcgttctttggtgactttctttcgctattgaaagaaagtcacccgttggagacataaaaaagaactgctgctgggaacagtgggccggcggaggcacgttccctatagaaaaggggcgatcagcagaaagctgtccgccggggacaaaagcgggccgggaaggtatgccgccggaagagggaacggcagggagacattttgtcagaaaatgacaaaatgtcccggtcgtaagaacagatgatggcagaaagtacatatctggaaaacaagcgatattcagggaaaaaacttcgtcacgcgaaactcacttttgaaaaaatttcccaaatagagaaaaattatcttgccatactgggacggtaggtgttataattcaacctatatattgggagaagctgacacttttcccgacaaaatccattacaggaggatcatgagagatgacagtctgcaaacggatcggtgcatggctgctgacactggtactgctggtgtctgccttgccctacaccgcctttgcggcctcggaggactcccacgtggtgaacgccaccatggaggagacttcggtggaggacattgccaacaatgtcaccacccagctgctgcggggcgcaaagaccaaagacgagaccctgagcatggaggctaagcccacccatgaggacagtgactctgtggagatcattgtggtggtggacgactccgtggccaagcctacggctcaggcccaggtgcagtccctgctgcagaagcaggagaaggctgcggccaccatgtcccgtgccatcggggagacggtggagccgcagcgtcagtatacgacgctgctcaacggcttctccgccaccgtgacctacggccagtataaggctctgaaggagctggactgcgtagagtccgtgttcctgtcccccaccttcagcctgctgcctgacaccgccaacagcacccggatgatcggcggcggtctggccaacgagacgggcttcaccggcgaggggatgctgatcgccattctggataccggcgtggacatggaccaccagatcttcagcaaggctcccgccagccctgccctgacgcaggatgacgtgaagggtctgctgtcccagtacgacttccaggccgagggctttgtgaagggcctcagcgtttcttccgtctataagagcgccaaattccccttccagttcgattatggcgataaggacaccgacggcgcccccggcaccaagagcagccacggcacccatgtggcctccactgctgccggctgcaccggcatcaatgcggacgtgcagggtgtggccccggacgcccagatcgccaacatgaacgtctttaactccagcggcagcgcttcctacgccgacatcctgtccgctctggaggattgtatgctgctgggcgtggatgtggccaacctgagcctcggctccgacgccggctacatcgactatgagaatcccgacgagttcaccgagagcctgctgaacgtctttaagcgggccggcgagagcggtatgtctctggctgtggctgccggtaacgcttacagcgctgcttacggcgatgccttcggcaacaaggcgctggccagcaaccccgactacggcctgatcagcgagccgtccacctacggtgagtccatgtccgtggctgccgtgtccaacagcaaggtcaagagcccctacatcaccgtgggcggccgtgacttcgcctatcaggacagcggcaccatcagcaccgacgagaacgccaagatcttccgggagctggccaagaagggcgagctggagtatgccgtggtgcccggctacggcacggaggacgactatgagggcatcgacgtctccggcaaggtggcgctggtgcagcgcggcggcggtatgtactacgagcagaaggagcgcagcgcctatgcacatggcgccatcgccatgctggtgtacaacaacgtacccggtatgctgtatatgtccatcaccgactggaagatgccctgtgcatttatctctcaggaggccggtgagtatctgaaggcgcaggagaacaaggtcctgaccgtgggcgccgccgacaagctggtggcttcccccacctatggtatggcggacttctcctcctggggcgccaccacggagctgaccctgaagccggagatcactgcgcccggcgcaggcatctatgccgccgtacccggcaacgcctatgagagcatggacggtacgtccatggcttccccccatgcggcaggcgctatggccatcgtgcagcaggccctgaaggcccgtggcatgaccgatgccacccagcgcaagcacatggtcgataccctgctgatgagcaccgccagcatcatttacgattccaacggccagccctattctccccgcaagcagggcgcaggtctcatcaacatcaatgacgccgtcaagaccgagggatacctcactgtggacggcatgatccggcccaagctggagctgggcgacgatcccgcagagaagggcgtctacaccatgaccttcaaggtccacaacaccggtaaggacaccctgtactacgacatccagcccatcgtcctcaccgacgggacggcgacctataccaatagcgacaacgaggccttcctcaccagcagtgagacggctgtggcgctgagccacaccttcgccaccaactgcaaggataaccgtgtggcggtccccgcaggcggagagcaggaggtcactgccaccgtgaccctcaccaacgccaaggaggaactgaagaacttcgagaacggcgcctatgtggagggcttcgtgaccctgaagcaggtggccgctgacggcggcaagctggaggctgccattgatctgggtattccctatctggccttctacggcgactggaccaaggctcccatcatcgattccaccgattactgggagacgctggacggcaccgagagcaaggcgcaggcctacatgaacaccgccttcaccacctctgccgagggccagatcgacacctatctgggcgacaacaactacgccaatgtgccctattttgccgatcacaacgccatttcccccgacaacagcaatgacatgatggacagcctcaccggcatctacaccggcctgctgcgcaataccaagacgctgaagtacaccatcaccgatcagaaaaccgacgaggtgtatctggaaaaaacctgcgactacgtcaataagtccatctacagctacgactactaccgcatcgtgcccgccggtgtgaatgccgattataccggtatcgacgcatggtacggcaccgccaagaacaactccaagctgcccaacaacaccaaggctaccgtgaccattgaggctaccctgccctatggcgacggcggcaccaagaacctgaagaacagctggtccttccccatcaccatcgataatgaggatccccatgccagcgacctgaaggtcaccgaggccgagggccgctactatctgagtctggatgtcagcgacaaccagtatgtctcggccatcgtgttctataatctccgcaacagcgatctgctgtacgggatccagggcttctccgagaccacgccgggcctcaccagccacgtcaaggagtatgacgttaccggtatgggcgagaccttcggcatgatcgttcacgactacgccggcaactccaagaactacaccgtgaaggtgcccggcaacagcgacgattatggcatcgtgaagcccaccaacgtgctgtggaccgagaccttcgacaacgattggctgcctgccgattggagcatggagtccaagggcgcttccgtcaacacgtggtatcgtgacgtggattacaccgccaccgtggatgccgacgatgacttccagcagaacgagtggctgtattcccgtgccaccgacatcagtggtgtggagacggatgtccacatgatcttcaacttctacaccacccctgtctataccgtggactacaagcgctgcaacctgcaggtcatggcttctgccgacggtcagaactgggaggaggtctggaacctgcagaaggatgccggggcctttaccgcttgggctgccacgcaggccaaggtcaccatccccgaaaagttccagagttgcgacgacctgcgcttcgcctttgtctacaccggtaagggcggcgcccagatctccgtggataatgtccagctgtacgccgatgtccgtgaggactatatcgccgtgacggctacctccggtgagggcggcgccatcgaccccgccggtaccactctggtgaagaagggaaccagcaagacctttaacgtggtacctgccacgggctacgaggtggccaatgtggtggtggacggcaccgatctgggccccatctcctactacaccttcgagcgtgtgggtacggatcacaccatctccgccaccttccagaaggcacaggccggtggggagatcgccatcttcagcgtgctgaccaccgtggccggcgagggcggtgcggtccagcctgtgggtcagaccaaggtcgccaccggcgagaccgtgaacgtgaccttcgtgccggatgagggctatcagctggcttccgtcaaggtcaatggccgcaaggtggaggtcaccgacaacgcctacgccctgaccatggatcagaactacgccgtgacggcggacttcgaggttatccccgacgtgccgcaggtgatgttcgagaacgatttcgagagcgtcagcggcgacaagttccccttccacggctggacgctgaaggggcagaataccaacagcacatggaagcagtatacctactacaactggaagtacgagggcaatgattccaagcacgcttacatcaccaacgacgaggctgcacaggatgagtacctgatctcccctgttgtggacctctccgccacccgtgacggcgttctgaccttcgacttcgcctacggcgagtacggcatcaagaacaagaccttcactgctacggtggaagtttctaccgacggcggaaagacgtggaatgcgatctggaacttccaagacagctataccggccagcaggccagcaactacatcatttccggcagcgcagaggttcccgtgcccgccgagtacaatgtggccggtgtccagtttgccttccgctatgtccatcccaatgaggacactatcggccagctggccatcgacaatgtgaagctgatggctgtggagaccggcgaggctgcccagaagtacaccatcaccgcaactgccggtgagggcggctctatcacccccaatggcgacgtctccgtgaaggagggtgcctcccagaccttcgccatcaccgccaacaacggctatgagatcgccgacgtgctggtggacggcagcagcgtaggcgctgtggagagctacaccttctccgacgtcaaggccaaccacaccatctccgcttccttcagcaaaacgacctctgccgcagagtttgacaacgactttgagcaggacgagttccccggccacggctggacggtgaagtcggagaacaccggctgcacatggtatgccggtaccaaccggaatctgaacaccacccatcaggcccgtatcgacttcgactactatgagtatgagggttacggcatcggcgaggtgcagcccatggctgccggcagcggcaagaagcagaatgagtatctgatctccccggtggtggatctcaccggcaagacgcctactctgtccttcgattatctgctgttcaagtacatgattcagaacgacattgccaagttcacggtggaggccaccatcgacggcggccagacttggaccaccatctggaatgctgccgatctggatgctgtcagcggctactggtttaagggtacggcggaaatcgaagtacccgccgcctatctcaccagcaacgtacagtttgccttccatttctacaagacctatgcccagtacaccgagagcgacggtatgttcgccgtggataacgtgaagctggtcaccggtgatgaggacccctgtgccaagggccaccagctgaccgccgtggcagaggtgcctgccacctgcgagaccgccggtgtgaaggcccactgggtctgctccgtctgcggcaagctgttcagcgacgtcgagggcaagaccgagacaacgctggagaagctgaccatccccgccaccggccatgcttacggtgagccggtgtggaagtggaacgatgattacaccgcttctgccacctttacttgcggcaatgatgcctctcacgtggagacggtgaacgctgctgttaccaacgaggtgaccaccgaggccacctgcgaggccgatggcgtgcggacctacaccgccaaggtcaccttcgagggtgaggagtacaccgataccaagacggagaccctgcctgctacgggtcacgacacggagctggtgggtgccaaggatgccacctgcaccgaggacggctacaccggcgacgagg

SEQ ID NO: 12451 - DNA, 17901 bp, Unknown
  gut microbiota DNA sequence
ggcgtcacggtgaagcagggcgaggtgctgcctgctctgggtcacgactacaaggatggcaagtgcagccgctgcggcgctgaggagcctaccacgcctgtggaacccggcaagcccggcgattccggcaagcctaccacgccggagaagcccgctgagccgtctcagcccaccacgccggatacccccgccaccggcgacagcagcaacatgaccgccctgtgggtggtgctgactgtggctggtctgggcatcatcgctctggtggtgctgcttgtcaccaagcgcagcaagaagcagaacggctaagcgctgacaggactccttaatagttgaagaggtccctccggccatgtgaccggagggacctcttctttccctgatttacctgaaagtctcagcacaaaggccaccctgcgccatcggcgcagggtggcctttatctgtcggggagggatcagcccttgtgcccggcgggcttgcagcggaaggtgtagcagccctcggcgcagcggacgccctgagcgtcttccacccagacctgcatcaccacgatctgccgccccatgcggacgctctccgcccggcagcgcagcagtcccggctgggccggggccagataatgcaggtcgtagttcaccgtccggcaggtgctgccacggctgcaggccgccgttcccgccacatgatccatcatggcagcgtagaccccgccgtggacgatgcccagcgggttcagcatcccgtcgcctgccgtcagttccccctcggcccagccgtcgccgatgccggtgacgtggagccccagcccgtgggtgaaggtgccggggcggttggcaagttccatgacgtcctgccagatctgttcctgttgtgtcatatgatgctccttttccgggaaagaaaccggctccctgcccacaggcagggagccgatgctcttacgaaaatgcttacagatagttccgcataccctcggtggccagagattcgtccgccgtgatggtcacggtgaacttgacgctgttcttctcactgaagcgctccagccagttcaggaacttctccaccgccatcaggtcgctggtgccggcgatcttgcacaggttgtccacgaaaacgtgggaaatatcgtaattgcccgcatacagaccgctgataaagccacgcaggcactcaaaagaatccacggaatattcgctggcgttcaccaaacgaacgttatagctgatgttataggtcatgtcggcgctgggttccatgcagacgacgctgccgttctccgcctccacggcgttgtggatcaggtcgatgagctgcttggtcttaccggccccgtttgcgcccatgatcaatctaaccataagtatcactcctcttgataagatcgggatggttattccctgtcattaagataccatattgccgaccaaatggcaatgggaaaaacgctattttacagatttgtagaaatggtgtaaagaggcggtcaagctctgtgcagtttttccgccagttcctgccgcagggcctcgtagccgggctttcccagcagggcaaacatattcttcttatacgcctccacccccggctggtcgaagggattcacgtccagcaggtagccggacaggccgcaggcgtactcgaagaagtagatgagctcacccagcgtgaaggcattgatctggccggtgcggaggatgatgttggggacgccgccctccacatgggccagcagtgtgccgtccatggcttgcgtgcggatgaaatccacgtccttcccggccagaaagttcaggccgtctccgtcggtctcatccagcggcaccacctgcggccggtgggaagcaccgaagcgcaccaccgtctcgaacagggaacgctccccctgctggatgtactgacccatggagtgcaggtccgccgtgaactccacgctggcggggaagagccccttgtgctccttgccctcggactcgccgtacagctgcttccaccactccgccatgaaccggaagctgggctcgtaggccgccagcacctcgatcttcttgccggtgcggtacagctcataccgggcggcggcatactgccaggcggggttttccgccatgtccgtcttggcgcagacctccatcatagtctcggcaccctccatcaggcggcagatatccacccccgccacggcgatgggcagcaggcccacagcggtgaggacactgtaccggccgccgatgtcgtcaggcaccacgaaggtctcgtagcccgcttgatccgccagagccttcagcgcccccttgcggcggtcggtggtggcgtagatgcgccgggccgcctcctccgggccgtaccgctcctccagcagcttccggaagaaacggaaggccaccgcaggctccgtggtggtgccggacttggagatgacgttgacggagaagtccaccccctccagcaggtccataagctccgccatctggtcggaggacaggccgttgccggtgaagtagatgttgggggtgtccttctttttcaggttatagttgggggagcacaggcactcgatgacgccccgtgcgcccagataggagccgccgatgccgatgactaccagcgcctgagagtcctgctgaatttttcgggccgccgcctgaatgcgggcgaactcctcccggtcatactgccggggcagctgcacccagccggtgaactcgccgcctgcgccgtcaccgtgctgcaaatggctgtgggccagccgcagctgggcggcacgggcctcctcgtagggcagcgggataaactgccggatatgggacagatccatctgtatcatatcagatgcctcctctgtacaatttggtttatcatacaacgttttcccgtggaatacaagaggaaacctacccaaaagcggctttcagccggcaaaaaatgccgccgacagcatccggcgcagcatggtgccgaaggtgagacgctccacgctctgcgccgcccggatggggatggactgcaccgtctcgccggcggcatccgtcagcgtcagagtccccagctcctgtccggcggacaccggggcctccacctgttccgccagtgtgacggactgggacagacccccggcctgacttttctgcaccagcgccaccgctttctgcgggtcgatgcagggctgcaccgtctccgtctcccccagcaccaccgggatggcggagaaaggttcctccggcaccgtgtgcagcagggcataggtggagaagccgtagttcagcagggccttggcatcctcgaaccgctgctggccggtgggggacttcagcaccacggcgatgagctccatgccctcccgctccgccgtggcggacaggcagtatttggcgctgtcggtggagccggttttcagacccgtggccccgtcgtagaaccggatcagcttgttggtgttggccagctggaaggtgccgtcccgcagggtatccatccagatggtggtgtagcggcggatgtccgggtgcttttctatgagttctcggctcatgagggcgatgtcccatgcactggtgacgtggccctccgccggaaggccggtgcagttgacgaagtgggtgtccgtcatgcccagctccttggcccgtgtgttcatctgctccacaaacagctccgtcaccccggccacgcactccgccagcgccacggcggcgtcgttgccgctggccacgcacaccgccttcaaaagatcgtctacggtgatctgctcaccctccgacaggtagacgtggctgccgcccatagaggcggcgtaggcgctgaccgtcaccatgtcgtcgtagtggaggctgcccttttcgatggcctccatggtcaaaagcagcgtcatcaccttggtgacgctggccggctccagcgcctcgtgctcattttgggcgtacagcacctgtcccgtctctttctccatcagcagcgccgcctccgcccgtatcggcagctctaccgctccggcctgtaccggcgtcagcgccagcaccagcaggagcgccgcccataagcccgccatccgtctcatatgcagccctccgttccgttttgtttccagcatatgcggcggtgaaattttcatgccgccgtcgacaaaatttccggttgcaaagccgggggatatctgctataatagacaggtattcaaaatgcagggttagtacatcggtagtacatcggcttcccaagccgaggaggcgggttcgattcccgtaccctgctccaaaaagaaagacacccctacgggtgtctttctttttggagcagcacttttgctccgcaaaagtggtcacctgcgggcgggcgatttaacatgcaagggaaacccgactaaggtttcccttgcatacattcctttccttgcgatatacaggagtgcgcatgggcagcaaaacctgtgggcaatcacaaaaaaggacttcaagagaaatcttgaagtccttttccttttgcctgtaaaccgttgtgccacaaggctttgcgggatttgccatgtgggaattgctgcaacattttcataaaaattttataagggctgcatacacaagggcaacaaactactgcctgacacagtaatataagaggcttttcatggatggcctaatctgttatagtagaaaggaagaagtttgtgcgtagcttgaagtataaatattggaaatccgtcatcgatctccgaagatgtatggaatgcaaaaagcatcaagggaaaatttacttgctctatgatattattccagaagaaccaccgctccatcctaattgtcgctgctctgttcaacgcttagaggcaaaaacggctggcacagcgacaaagattggcctgcggggccgattggtggctaaaaacttttcgtcagctacctggatactatataactgaggacggagctaccaagttaggatggattccgattttagcaaatcttgccagtgttgcacctggtaagatgctgacaaagggcgtttacaaaaacagagacaagcggctccccgatgcacttggacgaatatggtacgaggctgacatcaattactcttttggttaccgaggcggtgaacgaattctctactccaacgatggatcgatttttgttacttacgaccattacgccacatttgtcgagattgtttgacagaaaggagctttgttatgaatcgcaacgcatatacgcccattacagctgaccccgttttactgcgcctgaacagctgcagggactggggcacattacatcagcgtatccgcaaggcatttggatttcccgactattacggggaaaactgggatgccatgtgggattgcctgacggatgtgtttttgcagccggtgcaaaggcacattgtggtggagggctttgacgccatgccgcaggggctgcgggcgtacgccgctccgatgcaggagattttcagtgaccttcaggagaaatacccttgggtctcggtcacataccgctgatcgcagggacagcaaaagctatgggcagccagagggaggaaggacaccccgcaagggtgtccttcctgctgttatgccctgatagcgtgcgctgtcgaaggacagcacacgtttttcaccggatattgtactttttcatcttataggcgaggttctgcttgctgacctgcagctccgccgccgttttggtgaggctgccgccgttgcggcggtaggcatcctcaatgagcagcacctcgtaccgagccagcatctcgtggaggggcaggcctcggacgtcctcggcgtgcatggtgtccaccgccagccgggagaggatgtagttggggatatcgttgcgggtgagaatggcggtgtggttattgtggaaggcggattcgatgacgtttttcagctcccggacgttgccgggccagttataggccagaaagatatcctgcacctcgctgctgtatgccatgatctgcttgtggaatttcttgttgtagtgcttgcggaaatattccatcagcagggggatatcccccttccgccggtacagctccgggatatcgtaccgcagcacgcacaggcggtagaagatatcctcccggatcttattccgctctacgcagccctccgggtcctcgttgacggcggcgatgatccgcacgttcacctgcttttcctccttggcgccgatgcggcggatgcagttgtcctccagcacccgcagcagcttggcctgcgccgtcagctccatggagttgatctcgtcgaggaacagcgtgccgccgtcggccagctcaaacaggcccggcgtatccttggccccggtgtagctgcccttggtggtgccgaagaggatgctctccagcagggtgctggggatggaggcgcagttctgcttgatgaagggggcatccttgcggcggctggttttctggatggcgttgacgatgagctccttgccggtgccggtcttgccgtagaccagcacatgggcatcgctgtcggcggtctgcaagatcttctccttgatgcggatcatctcgccatcctgcgtgacgatgtcctccagcgactggtcggaggtgttgtagcttttggtgagggcgctgatgaggctgatgtcgaagcttagccgccgctcggtgacgtgggcatccttgtagatgaccatatcgatgacgcccaccacttcgccgtgctccttaatggggacggcactgcagttggcctccatggagtcccccttgtagttgatataggtctgctcgtagttgatgaagctctctcctgttttcagcgcccggcagatgtagctgtcctcccgcttcagggtgggataaatttcaaagagactgcggttcagaggctcgtcctgccgcaggtttaccagatcgggataggcggtgtagtagtggcggatgatgcagtttttgtccaccaccatcaggccgtccacatagtccaccagacggagcatttgttcaaagttcttgttcatagttcatacctcctgagaaaaagaatggggaaggggcgagacaaaaaatcttgacacggcgcagagcaagggcggaagtgaaaggcggctgcactgccggatcgggtgactgtttggcgaaaacgccgagttttccgggaaaatcttgtgaaaaccgctggacgaggagcgaaacttgcggaataaccgtggaagctgtcatgctggcacgggagttgctatttatcttggcatcaactaaatatgcgaggagataccatgagcgatcataaaatcaagaataaagagagcctgctgtcccacggcgacgccggggccaaggcgcaggtgctggagctgacggagcgggtgctgcaacggctggatgcccggaagcgactccacgagatgatgcatcgggagggcagcgagctggtcatcggccgccgccgccacgatctgagccggtaccgtcatgtgtacgccttttcctccggcaaggcgggcaatcacatggcacgggccttcgaggatctgctgggggagtatctgacgctgggcgttaccatcatcaagcttcgggatgaggaggacgtctatcgaaagacggaggtctatgtgggcgggcatcccctgcccaatgaggagggcatccggggctgccagcggatgatcgacatcgcagagcagatggggccggacgacctgctgctgctgggccttaccggcgggtgctcggcgctgatgggctacccggtggagggaaccacactggaggatctgcaggaggccacggatgtgatgctgaaagccgggatgtgggtcatggacatcaacgacatccgggggcatctgtcccgcatgagccgggggaggctggggcagcacatccatggggccaagatcctctgctttgagatctgggacgccgtggggctggatgatatcaccgattacacggagccggtacccattatgggaacccctgtgggctacgacaccgtgaccttcgaggacatcggggccatcctccgcaaataccacatcgaggacaagctgccccccaatgtggcccggtacctgctggactatgacccggcgcaggaaacgccccagaccatgaccaacgatgtggattactatatcgtcaacaccctgccggactcctgccaggcggcgctggaggcggcggaggagatgggaatacccgcccatgtgctgactacctacgccgagggggagagccgggactacggcacctttatggcctcactggcccatgaggtggtgaagaacgaacggcccttccgggcgccctgcttcctgttctccgccggggagactaccaccgccattcctgacagcagcctcatccggggccatggcggcccgtcacaggaaatgacggcggcctttgccgtggcagcggaggggttgaagaatgtgtgcctgctgtccatggacagcgagggtaccgacggcaccaccccggtggcaggcggcctgaccgacggcaccaccgggactgctgccgcagagcggggcatcgacctgcggaaggcgctgcgggagcacgccgcctatgaggcgctggagccgctgggggatacggtgctcaccgggaacacgggaaccaatttgtgcgattttaatgtgctgtacatcggtacacaggagtaaggaggaactattatgaaaattcaggatttgcgggccagagagatcatcgactgcaagggaaagcccctgctggaggtggatatcatcaccgaggacggcaccatgggccgggcagcgtccccctccggtatctccgccggggaacacgaggctatggtgctgcgggacggcgaccggagccgttatgacggcaacggcgtccgcaaggccgtggagatggcggagaaggtggtcctgcctgccatccagggcatggacgtgctggaccagcaggcgctggaccgccgtctcatggagctggacggcacccccaacaagtcccggctggggggcaatgtcacgtacagcacgtcgctggcggtcatgcgggccggatgccagctgcgccatgtgtcccagtaccgctatctgaaccccggtgacattcgcaccatccccctgcccacctcggatatgttcgccggaggcagctatgaggacgacaccatgccggtgcaggagaccaccattgttccctataaggcatcctccatcgctgaggctacggagatcctctgcaaggtctataagaagctgccggaggtcatccgggagtttcaggggggccgccgtccggagatcggcgccatgtcggagtatatggcccccagcaccgatttcatggactgtctggatatcctctatgagacggccaagcgctgccgctgcgaggagaagatcgccttccatatggactgcgctttcagcgagatctacgacgccaagcggggaacctatcactactgcggccgggaggtggatctggacgagatcatcggcatcctgaagcaggccacggagaagtataacttcctctacatcgaggatccggtggacgagaacgactgggagggctgggtgaaggccgccaaggcgctggatcgtaccaccctctgcggcgacgacctcaccgttaccaacatcaactatcttcgcaaggcgctggacatgggggcctgcggggccttcgtctttaagcccaatcaggtgggaaccgtcacggaggctatggaagcccagcggtatgccgtggagcacggaatgttctccattccctccatccgggcgggcggcgtcagcgacgaccctgtggcggacatgggcatcgccggcggagcggcggcggtgaagctgggcccgcccaaattcggtcacgccattcacatcgtcaactctctgctgcgggcggagacggagctgccggcagccaagcccttcgacttctcgcccttcgtgaagttctgaggtacttgcccctattgtaagagatactaagggaaaatacaagattttttacaaaatagttaatgaaatcggatacggcgtaaaaatatttttaccaatttgctctctacaccccctcaagtaggagaccgcagcggacgcagaacacggcggcgctgcggtctccctgcgaaaaaacggcttgcgccggggcggtggatgcactataataaactatgataatatgataacaaaaaaatcccgtgcagggagatccgggagggaagcacagtggaactggagctgaggcaggagcaacagctgtccatgcggcagctgcatagtctgcggctgctgcaaatggggcggctggagatacgggagtatctggagaccgtggcgcaggagaaccccacggtggagctggagctgccccacgaggaggagcctctgacccggcaggccgagcgctggctggaccgctggcgctggctggaggaaaacgaccgccagaacagctactatgagcggcccaatcaggaggaagaggactcccccatgaaccgtatcggcaccgacggcggtttggcggagacgctggagagcttcctgtgccgccagatcgccgggctggaggtgccggagcggcagcggcagctgctctactatctggtgggctgtctggaggacagcgggtatctcaccacaccgccggaggagctggccgccggggccggtgtgccggaggaggagctgcgccgcagcattggaatactacagacgctggagccggcgggagtgggggctgcggatctgagccggtgcctgtacctgcaattacggcgcatcggagacgatggccccgccacccagatcgtactgcatcatctggaagcgctggccaggaaccgctatcaccagatcgcacagaccctgcacatctcgcaggaggaggtgcgccgggcccagcagcgcatccggcagctggatccccggccggggcggcagttcagcccgccggaaccggcccccatggtgtacccggatgtgttcgtggtggagcaggagggggagttcgtctgcgatgaccaccggcgtccggcccccatgctgcacctgaaccggtattatcaggatctgtaccgccagacggatgatccggaggtcaaaaagtatctggcggagaagctggtgcaggcggagaacgtgttgtttgccctgcggcagcgggagagcaccatgctgcgctgcgcccggttcgtggcggcggggcagcaggcctttttccgagacggcccccgtgccctgcggcccatgtacatgacggaggcggcgcaggcactggatgtgcatctgtccaccgtcagccgtgcggtgaaggataagtacctccagtgccggcagggggtgttccctctgagctactttttctccgctccagccccggacggcagcgatgtcagccgccgggcggtgctgctgcagctgcgggagctgatcgacggggaggataaggcccaccccctgtcggatgaaaagctgcggtgtctgctggagcagaagggctgcgtcctgtcccggcgcaccgtggccaagtaccgggaggagctgggcatccccggcacggcgggccgccgggcgtaacagcataagcttattttttcaagcagaagcggggagccattcggctccccgcttctgctttcacctgtgggagtgggattggatcacttccgcagcacggtgtacttgtccatgagctcgtggttgatctccacaccgaggcccggcttctggggcacggcgatgtagccgtccttatccaccaccagaggctccgtgagcatcatgtcacgcacctcgtagggccagtagggaggatcgtagcagtactcgatgaaggggcagttgctgacggcgcccgccatatgcagggcggcggccatacccatgccgtgagtccaggtgtggggggtgtagatcttgttctccgcctccgccatggccgctaccttccggttctgcacgaagccgccggagagcaccacgtccatctgatagatgtcgaagcagttgtgcttgatgaggtcacggtactcgtggacctgagcgttcagctcgccgccggccacatggagggtggtgcgcttgcgcagctctgccagaccctcgaagtcgtagccgtacaggggctcctcgatccactcgatgccgatctcctcgaaggcacggcacacgttcagagccttcttcagatcccacttggccacggaccgcttgccggtgaagaaccagccctgattggcgtccacggcgatcttcagcttgtcgcctacccgctttttgatctcggcgatgatacggacgtcctcgaagggatcgtcgtggtgagcacggagcttcatcatcttgaagccctcggcaatataccgctcagcgtcctccacacgctcctccacggacttcagggagccggtgctggcgtaggccagaaccttatcctgcacgccgcccagcatcttatagatggggaggttggcgtacttgcccagcgcatcccacacggctacctccacgcaccaggggcggtaggcgtacagggaggcgttgacgaggccggtgttgatggcctccacctgcgtgatctccttgccgatgaccagcgggcggatgtgggtgtcccagatacccgccagcagctgggaggagtcgcaggcggcaccgtagccgtggataccgtcatcggtgatgatctcagcgatggtaacgaacagcttggtctccggattgccggggttccaggtggaggggaagggatggggcagggggacttccaccacctgcagcttcgcgtcgataattttcacggttatatcctcctattcgtgtccaaaatttggatgggatcaggcggcatcctgagaggccttggcatccttgccacggcccacgtgcttgttcagcaggaaggacaccaggcagatgagcaccagcgtgatggcaagccccacgaaggcaccgcctttcatcaggccgctgacgatatagcctaccagagacgagccggctaccgtcagggcgtagggcagctgcgtgcgcacgtggtcgatgtggtcgcaggaggagcccatggaggacatgacggtggtgtcggagatgggggagcagtggtcgccgaagataccgccggacagcaccacgccgatggccatgcctacgggggcgccgatggagatggccagggacacggcgatggggatgaagatggcgaatacgctccaggagctgccggtggagaaggaggtcaggcaggcagcgatgaagatgatagcgcacatagaggtgggggtcaggaagctctcgcaggtgctgacgatccaagtggaagtgccgcaggcggagcagatgctgccgatgccccaggccagcatgaggatcatcaggacctccatcatgcccgtgcagccctcgatgaaggtgctcagggccttcttgaagttccagaccttggtgatcatgcccatgatgatggcggagatggaggccagaatgaaggcggtatccagcgcacgcagggagctgccgttggccagcgcaccaaagatgccattggtcttgatgtcaccggtgtagaacaggcccacgaagatgaacaccagcagcacgatgacgggaaccagcatattccagatggagggcttggcaccttccggaagctcctcctgctcgacctcacggcggatctcggcgccgtcacggaacagcttgccggtgagcagcgcacggtcctcggccttcttcatggggccgtagtcccagccggtgacggcgatgatgagcaccatgaggatggagccgatggtgtagtactgataggggataccggccacgaagtctgtctgaggattgccggtatagccggtggaggtgtagaaggtggcgatgaggccgatgatgtaagcgccccaggcggagatggggaacagagtggggacggccgccgtggtggagtccacgatgtaggccagcttctcacgggagacctttaccttatcggtaaagctgcggcagatggggcctaccagcacggggttggtggaatcggagaaccagacgaacacgccgcccagccaagtcagcacctgagcgccccggcgggtcttgcctgcgccgcggctgacggcattggcgaaggcttgggcgcctccgttcttttccagcagcagcgacaaaccgccgcagaaggtggtcagcgccaggatgcgctggtggtcggtatcctcgaagccggggaggatgtaatcgaagaaggtgctgtaaaagccctcccacagattaccgccgcacagcatcacggcaccgacgaacacggcaatgaacagggacagcacgacctggcgtgtgatgaccgccaggacaatggccagcagagggggaacgatggccaatagagtaggtgaaaactccatatgtcgtcctttcctcactcgaagagtgaaacataaattctgcggtccgtggaccgtctgcccatagtaatagcaagtgacgtgccagtctgagaaacggcggtttttcggggattttgggggacggtaaaagcaatgagttccattttgtcaaaaatatttgattttgcatccggatactggtgttttctgtcaagagaatttgacaagtccggagaaatatgaagaatttgtaaaaatttgatgtgtgggggagtacttgtgggggctactccgaaggcagatgctttgccagaagtggttgattacctccggcgggtatagctttcccctgatcgcagcagaaagcctgcaccgtcgtgccagccgctttcttgttgcgtcattgccaagccagtgcgcacactggctgtggcgatccgtcccccacggtagagcagcaagcttcttcaaccacccaataaagcggcagcgtgagtaggagaaaggcgattccctgttttggcgggatttaggaagtaactcttgcacagaaaagaggaagtcttgaaacctaaggtttcaagcggcattctttggtaactttctgctgctattggcagaaagttacccgccggaggcaaaaagaaaaagccacccgccggaggcaaaaagaaaaagccacccgccggaggcaaaatacgacacatttgcaaagcggccttgtaatgacggaagaatgagccgcagccacgacaggggcttccccttgattccgacggcggggtctggtataatatttgggatttttccccggcggagaggtcagaaagcgagtgataccatatgccttttcagaaaatgaccatcgatgatattccggtgatcgccccatatttccgcttcgtcaccacaaatacttgcgacttcaccgtaggcgggatgttcatgtggcgggactacttccacatggcgtggcaggtggaggacggcgttctgtactccaccctcaccggtgaggacggaaatctctattacaacctgccattgggggaggacatccccgccggactgcggcagtgtctggcccgccatccggagcggccggtgcggttctgcaccattccggaggcggatctgcccctgttccgggcgctgccgggccgggtggagatcacggaggaggagaattttgccgactacctgtactccgctgaggagatgatccagctgtccggcaagaagttcagcggccagcgcaaccacatcagccgtttcctccgtacctgccagagctggagcttcgagccgctggacagcaccgacgcagcggaggtggaggcctttttccacaccctgaacaaaaaactcaactacgcccccggcgaggcggcggaggaaaaccataaggtgcaggaggtgctggagcatctggatcagtacggtctggtgggcggcgtcctccgggctgacggggccatcgtgggcttcacgctgggggaggtgctgcgggacaccctgtatatccacattgagaaggcggatcgggactaccccggcgcctatcagatgctgtgccgccagttctgcaccgcctatgccggcgatcttgcgtatgtgaaccgggaggaggacatgggggatctgggtctgcggaaggccaagcgggatctgcacccggtgacgcagctgaagaagtacaccgtggaggtgtggtgactgttcccctcctacggacaaaacggttgcgccgtgccgcagaatgaagtataatcaaagagcattccatgaaaaaatgacaggaggcatttctcatgcaaaaactggagaaacaatttcacatccactgtgtggagggcgacgtgggccggtatgtgatcctgcccggcgaccccggccgctgcgaaaaaatcgccgccctgtttgacaacgcgcacttcgtggcccagaatcgggagtacaccatctacaccggcaccctgctgggggagaaggtctccgtctgttccaccggcatcggcggcccctcggcctccatcgccatggaggagctgcacaatatcggcgccgacacctttatccgggtgggtacctgcggcggcatcgatctggatgtccgctccggcgacgtggtggtggccaccggcgccatccgcttcgagcataccagccgggagtatgcgcccatcgagtaccccgccgtggccaacttcgaggtgaccacagcgctggtggaggcgtctcgtgcgctgggcaagcggacgcaggtgggcgtggtgcagtgcaaggatgccttctacggtcagcacagccccgctaagatgccggtgtcctatgaactgctgaacaagtgggaggcgtggaagcgtctgggtgtcaaggccagcgagatggagtccgctgccctgttcgtggtggcggatgcgctgggctgccgctgcggctcctgcttccatgtgatctggaatcaggagcgggaggccgccggtctggatcaggacatgagcgaggacaccacctccgccgtgcaggtgggcgtggaggccctgaagcgcctcatcgccgccgatcggttccagaaggagcagtaaggggacaagggcataaaactccctgtggggctggcggaacaaggggggcatcgagatgtggaagcagaatcgatcattattcgcctacttccgattcatgggctatgtgatgatgatcgtgggcatcgtcctaatcgtgaacgggatcaaggactatgcagaccaatcccaccagaaggattggatctccatagaggccacggtcacggatgtctccagcgaagaagacacttcctcaacactgcatagcagccacagtacctactacatcatggcatatgagtatgccgtggacggggagacctatacgggccgcaccgggcgtatgtcatcgccccacctgatcggcactgccattaccgtgaaatataacccggagatgccggaggagaatacggcgatcctctcgcccaatacccatgatctggtggtccttttgattttgggaacggccatcgcagtggtgggctttttcctctctgggggggtggagctgtttcgcaatctcctgcgaaagaagcacactgaggagccgaaggaatcggtcccgaagacagatatagggtttgattcaacggccattgcaaaaatcccggcgaagcagtgggtcccccgacttgcggcttggcttcttgcgttcgtcgccctcgtccttttcgtgaaatttttccttacgtcgggagctgcggacttggatgagttccgcaatgccgcagcggcagccggctacaccgctgtggactctacggaggacgttcgccagagatggggcgtcgggtccatgttgatccgctctgtttctgtgcatgaggactctctgcggttggactactgcaggctggattccgcagatgcctgctaccgtttctatgccgctgcgaccctccccatcaccggtgaggtgacggagagcaatacctttactggtcaggtctatgccgtggacagccccacgaa

SEQ ID NO: 12452 - DNA, 14484 bp, Unknown
  gut microbiota DNA sequence
gctgcgggctggtggagcgaataagagggcgaaaatcccatatacgggatgccaagggaataaagaacaaggctggcaggtcattgacctgccagccttgttctttcggcgttgatggatacttgctgcgcccgatggcacctcgttatacacgcagagaattttccgcattggaatgtggcctcttacgtctcctcgaagagactggcctgatagggcaggggggagcgcccgatctgacggaactgggcggcgttttcctccgccagagtatcgcagatggccattttccggatgatatttttcacggtgctgtccagcgccgttccctcccgatagtcggcggggaagatgaagtccacccggcccttgctcagcagatcctccaccccctgacggttctcctcctgatacacggcgatggcctgcccgccgtaggcccgcatcatcttcatgcacggcacgtccgacaggccgtcccccacatagatcatgttggtgaaggggatgcgcttgctgtcgtcgggcatggagtcgttgagggtcttgtcgtcggacacatccagcacacccttattgatgcggtagacgaactgggtcttgttggtgaaattcacgtccagcttgggccagcaggccagcccctcctcgttgtagaagaactcgcaggcgtagatctcccggaactcgtgggcgatgccgctgccctcgatgatctcccgcagaccggaggagatgacatagtgttcgatctccacctccagctgctggccgaaggcgttgatgcggcggaaccactcccgcacgccgggaaagagcaccatgtcccggccgcagcgcaccagaaagtcccggtccagccgccggttctgctcccggcactcatggatcatggtgtacatataggccagcaggccatccatgtggttatcccggccgaaggagttggccttctgccagaactgggccggggtataccccagctccgggatgaaggtgtaattctccatgtccgtggtacacagggtcttgtcaaaatcgtacaacagggcgatgatggggcgggccatagtgtcactcctttgatgggttggatagcagatagcaagcaggggcggctcacaggagccgccccacggtatttagtgttcgctgttatagttgcgtccgaacttcagatcgtccagattgaagcccgccgagaagggggactccgtcttggcgggctcctccgccggggcctcctgcggggcgggttcttctgccggagcctcggcttcctctgcgggagcctcctccaccggtgcggcgggctcctccgcagcgtctgccacggggacacggccctcctccggggcgggcagggtcacaggctgcccctcctccacctctgcctccggcagagagcgcaggaagctcacctgctgggcgcagaggtctgcgctgcggcgcaggaaatcggacaggctgttctgggccatggtcagcttgtgctgggcctgcgccacctgctgctccagctgggccacctgccggttggcctcctcctgagcgtccgagagcatcttgtcccgctgggcctgtgcgtcggagaccatctgggccgccatccgctgggccgacagcagggtggagcgcatggcgtcctcggtggcccgatactcctccaccttttccgccagcaccttcagcttggccttcagggcggcgttgtccttatacagggcggtataatcctccgtcagcgcatccaggaactcgtccacggcggccatgccgtagccattgttgaagccggatgccttggggaacgtcttttcggaaacttcctgcggtgtaaacatgatctatccctccgatttacatctctatccggcccttacaggtacaggccgttgttctccagctcgtcgatcaggtcgcccatgagatccacggaatagggcgtgatgatataggtattggtggagaccttcttgatcttcccgtcaccggcgtaggccacgccggagaggaaatccaccagccgccgggccacatccttgttggtaccctccagattcagcaccaccgtgcgcttttcccgcagatggtcagcgatctccgaggcgttttcaaagcgctccggctttaccagcaccaccttcagctgggtggtggcgtggatgttcaccaccttgttgcgccgctcctccgcagggacctccttgcggcgggaggactcacggggttcacggggttcacggggctcgaagtaggtcggctcgctgtcacggcccacatcctcctcgtaatcgtcatcctcatcgtcatagggatgaatgatcttcttaaattcgtccatcaggctcatggaaagaccctcctgtttctttatttggtataatccctggcaccgaaaatagcagtccccacccggaccatattgctgccggcccggatggcatcggcaaagtcgccgctcatgcccatggagatgtattctaatttattatcgtatattttcccgtttatgtcaacataaagacggtgcattttctcgaaatataccagattgccgtgggggaccgtctccaccggcgggatggtcatcagtccccggacccggacatggggcagctcacgggccagaacggccgccgcctccgtctcctccggggcaaagccgctcttggcctcctcgccgccgatgttcacctccagcaggatatcctgcaccagctgctgccgggcagcctccttctccacctcccgcagcagggcctcggagccgatggattggatgagagcggccttgcccaccacctgccgcaccttgttgcgctgcagatggccgatgaagtgcaggggcgctccgtcataggcgttctgagccagcttggcggtcatctcctgcacccggttctcccccagagcgtccactccggcggcgatggcctcctgacaggcggcggcgtcgttcatcttgctggcgcccaccagaaaaatgtcccgctcgctgcggccgctttctcgggcggcctccgccatctcccgccgcacggcggcaatgtgttccgtaatggtcatacagatctttcctttcccgatggaatctatttatgtggctgcacttattggccgatggtatctgctgggcggctgctactgcacgatctgtccgccggagagcttactggaggtgacgatgacctcgtcccccggccgcaggacggaaacgtcctgactcgggctggcggactgcaccagactgtatccgtcgccccggtagaccatggacaccggcttgaagctggccaccttgcccaccacgcagtagacccccagttggttgtcctcactcatccgcagggcgttggtggggatccgcagtccctcataggaccgcagtaccagttgggccgcctgatggcgcagctgggaggtctgggccagatactcccggcaggtcagcaccaccgcctgcttgccgtcctcggcggcactgagataggtgacctgggcgtcgatatcctgctgagcgcccttggaaaaccgcagggtcagccagtcccccttctccagctgctgggcctgctccgcagtgatcacggcggtgtaggaccacttctccccgatgatgagctttcccagagagctgccgccggtctggccggagggcagtccctccagctgggcgggggtcacggactgcaaaaattccggcgtcagtagggactcatagccgtcgcaggcggcggaataggtgccggagtgctccgccgtcaccgtccgggccccggagagggagcttcgcagagcggacagctctccctgcaccgtggcgatgtccgcctcgatctcctcgccggaggagtaggtgtggctgcgcttgaggatggcggccttcagctgggccgtctggtccgccgcatcgtcgtagtcgccgccggagagggaacggcggatgctcagcaggctctcggtgatggagccgtccagcttcaaggtagcgtcggggttcagataggaggatagggcgaattgcagctgctgcagctgcagctccttggcctcgatctgctgcacggtgtccagcgcatcgctgccgctgtataccgtggccaccgtctggcccttgcccacccgttcaccttcgctgacctcatggcgcacggtgccgctttcaccggagaggacctcctcgtcccggaccagccagccgctgacgtcgatggtgtcctcggcagagctctgatagaccagcgtggtggtgaaggggtccgtcagggcgaaatagccctgtgcggcgaagtacagcgcaatggccgccagcagggcgatgctgagaaagcggaaaacacgggtgttgttcatggctcctccttggtggaatgttgggacgcctcactcgttcgacggcaagcagggctcctcctgcagcgagacggggtgaatgggaacgatggtggaaatagcgtgcttatagatgatctgctgcttgccgtcggtgtccagcaccacggtgaagcagtcaaagcccgtcaccacgccccgcagttgaaagccgttcatcagaaagatggtcaggggaatgctttgcttgcgggccttagtgaggaaaatttcctgaaggttgttgttcttttgcatatcgtctgctccttttctctgttggcggacgatgtgccgtccgctcctgggcttatcgtaagccaagagcggtgagatattctgtcgcattttgcaggccttggggaaaattcggctcctctccccacaggatccagtggatgtccgggttgcgccgcagccatgtcagctgccgcttggcatactgccgggagcgaagcttgacctcctcgatggcctcggccacggtgcagcggccgtctgccgccgccagaaactgcttgtagccgatggcctgccacgccgtagcggtgggaggcagccccgctgccagcagggcctgcacctcctccagcagcccctgccgcaccatctcatccacccgcaggtcgatgcgtcggcgcagctgcgcccgatcctgaaagctcaggccaatgtaagcggcctgatagcggggcggctgctgccgggtgcggtggtcgtgctgggtgatggtctcgccggtctcataccacacctccagcgcccggaggatgcgtttttcgtcgctgggatggagccttgcggcgctgtccgggtcgatggcctgcaattctgccagcagcgggccgacgccctcctgctccagccgctgctgcaggcgctgccgggtcacaccgccggcgcttccggcggcaaagtccgtgccgcggatcagggactccagatacagccccgtgccgcccaccagaatagggcggcggccccggcggaggatatcctgcacgcaggtgtcggcctccgatacgaaccgggccacggaccagctctcggcgggatcggccacgcccaccatgtggtgggggatgccctccatctcctccggagtgggggcggcggtgccgatggccatgccccgatagatctgcatggagtccacggacaccacctcgccgccgaagcggcgggccagcgccacgcccatttttgtttttcctgtggcggtgggacccaccacgcagatgatctgtgggatcatagggggactcctttcccaatcgttctttcttcttttgccgccggcggggcgctttcccggctgctgaggaaagtgggtcgccggaggcaaagaagcacttacgcccttttgaacatcttctccatttcgtacttactgagcttcacagccaccgggcggccatgggggcagtagcggatctctccgctctgcaccttatccgccagcgcctgaagctccgagggatcggaccacatccccgccttgatggcggatttgcaggccatggtctggagcagactgtcccgtgcggcggcgggatcggcccggttcagccgcagatcctctgccagctcctccagagcagcagggacatcccccacctccagatccgacggcacctgccgcaccagcaccgtgccgtctccgaagtcctcgcatacaaagccgaactcctccagcagcggaagctgctccagcagggcggcggcatcctccgccgacagttccaccgccagcggcgacagaagctgctgggacatcaccggctgggtgttgtttttcagggcatcgaaccgcacccgctcatgggcggcgtgcttgtcgatgagccatacattttcctggtcgtcctcgcagatgatgtacgtccgcagcacctcgccggccactcgccacggggtctggcgcaccggctccaccgtctgctgcgctgcactctgcggggcagcttcctcctctgcgggggacggaacgctcgtctcctgcaccggctccgccgggacggggacggccctctccggcatgggtgctgccggggccgatggttcctcctgcacggcggggggcgtgatgcgataactgacgccggaggaggtgacggtgaaagcctccccctttcggggggccacatcgtgaacctccagcggctgggaggccggtgcggcgggccggacggtgtaggagcccagaggcttcttctcctccggctgcggcacccgctcccggtactgctgcaccgtcatggtctggtaaaaggactcctgccggggctttttgggctgcggagcgggggtattcagggcgtccagcaccgtgtaatacacggcgttgaaggcctccttgtcgttgacgaatttcaccaccgtcttggcggggtggacattgacatccaaccggtcggcgggcatggtgagccgcagcacgcagccggggaacttccccttcagcaactggttgcggtaggcctcctccagcgccgccgtcagcagttggctcttgatgaaccggccgttgacgaagaacagctggcggccacgggtgccgtggccgttgaggggcttggtgacaaatccctccacggagatatctccgctgcatccgctgatgggcagcagtcccatggcgaaatcccgccccatggcggcgtacaccgccgactgcagatctccgtcgccgggggtgtgcagcagctccacaccatcccggatgagcttgaaggagatttccgggtggctcagggccagatgctgcacgatgccgctgacggcggctccctcggcagaatccttcttcatgaatttcattcgggcgggggtgttgtaaaacaggtcccggacgcagatggtggtaccctccgggcagcccacctcctccacctgaccggggacgcccccctccagatgcagggaggcccccgtctccgcccccgtccgccgggagaagatatccacccgtgatacggcggagatggcggccagcgcctcgccccggaagcccagcgtaccgatggcggccagatctgccgccgtccgcagcttgctggtggcatggcgcaaaaaggccgtgggcagctgttcggcctcaatgccgcagccgttgtcagcgattcgcagataggtcagaccgccgtgctggatctccaccacaatggcggaggacccggcgtcgatggcgttctccagcagctccttggccacactggcgggccgctccaccacctcgccggcggcaatgaggtccgccacgtggctgggcaggcattgaatatcaggcatagaacgctcctttcatagaggcccgtggacggggcttcgccccgtcagttcagcttctttttcaactcgtacagcagattcagagcctccagcgggctgagggtatccacctgcgcccggcgcagctggtcgatgacctccccctccgacagggccgtcagggatacctgatcctcctgcgcctgcaccgccggggcgggtcgcccggcttcttcctccagttggcggaggatcttcttggcccgattgactaccgtggacggcaggcccgccagacgggccacctcgatgccgtagctgcgatctgcgccgccggggatgatcttccgcaggaagatgatatcctccccacgggtcttgacggcgatgttatagttcttcacgccggggagggtcccctccatggcggtcagctcgtggtagtgggtggcgaacagggtcttggcccccagcttcttgggatcggcacagtattccagcaccgcccgtgcgatgctcatgccgtcgaaggtggaggtgcctcgaccgatctcatccaggatcaaaagacttcgggaggtggcgcagcggaggatatcgctgacctccgtcatctccaccataaaggtggactgccccgccgacaggtcgtcggaggcgccgatgcgggtgaaaatgcggtccacgatgccgatgcgggcggccttggccggtacgaaggagccgatctgggccatgagcaccatcagggccacctgccgcatataggtggacttacccgccatgttggggccggtgatgatggcggcccggttctctttctcccccatgtaggtgtcgttggggacgaacatggcgtcggggcgcatacactccaccaccgggtggcggccgtcgtgaatttcaatgaccccggactcgtccaccaccgggcagcagtagttgttcttcaccgccaccgccgccagcgagcacaggcagtccagctccgccactacggcggcggccccctgcacccgggtcacggcgtcgcacagagtctggcgcagccgggtgaacagctcatattccagcgccgcatcccggtcggaggcagagagaatatcgtgctccagatccttcagctcctgtgtgatgtagcgctcgccgttgaccagcgtctgcttgcggatgtatgtctccggcaccagctccttgaaggagttggagacctcgatgtagtagccgaataccttgttatagccaatcttcagggtgcggatgccggtcttctctttctcggcggcctccatggaggcgatgatgcccttgccgccgtggaggatgccacgcagccggtctacctccgggtcaaagccgtcccggataaactcgccctcccgcacggagaaggggggatcgtcctgcaaggtcctgccgatgacctccgccagatcctccagcggatccagacgggcgcccagctcccgcagatgtccgccctcgaaggcggccagctgctgccggatggcaggcagatgatccatggcgtttttcagggacaccatgtcccggcctccggcactgccgtagacgatgcggcccataagacgctccatgtccccgatgccggtgagggccaggatcagctcctcccgctgcacggtgtgcttcaccagcgccgccacggcgtcgttgcgccgtgcaatggcggagacggacagcaggggccgctccagccagcttcgcagcagccgtgcgcccatggcggtcttggtcttgtccagcacccacagaaggctgccctttttctccttgccccgcagagtttccgtcagctccagattccgccgggccgtcagatccagctccatgaactgcccctgccggtagtagtccagccggtctacatggttcaggtccgttttctgggtatcgtgcagatagtccagcagagcacccagcgccagcatagccgccggattgtcacggggcagccgctgggcggcgtcgtccccgaactgctggcggatgcgcttttcggcggcgggcagctggaatcgcccggcgggcaggcgctccacgtggcaccggagcttgtcctccagcagcgcccgcagggccgtatcctcggcggcgccgggattcagcaccgcctccgccggggcgaagcgccccagctcattttgcaggtgggcctcccgatccggcccggagaaggccgtcacatgggtctgccccgtggagatatcgcacacgctgaacccggcgtagtcgccgtccagatagattccggcgcagaagttgctgcgcccctcctccaggcaggcggagtcgatgacggtacccggcgtcacaatgcggacgatgtcccgctccaccagccccttggcggcggcaggatcctccgtctgctcacagatagccaccttgtagcccttggcgatgagccgggcgatgtaggcgtcggaggcgtggtacgggatgccgcacatggggatcttctcctcgaaggacttgttcttgtccttatcccgtgtggtgagggtcagatccagctcacgggatgccttccgggcatcgtccccgaacatctcgtaaaaatcccccagccgaaagaacaggatggagtccttgttttgctccttgatttccatatattggcgcatcatgggcgtcatttctgccataccctcatacctctttctgtcagaaataagtgaaagcgatcgaatttggtggaaaaacctgttgaaaagtgcaaaactccgggctgacaggtggaaaactcttccacccgcccatttactgagggagggtcataccatttccccgaacagcgcccaggtgttgctgtcggtgatgcgtacctgccggtactggcccagagcgtcctcgtcgcccaccagatgtaccagccgtcctcccgccgtccgggcggataggggccagcgcgcgtcgtcggtgcggccatccaccagcacacgcagggtctggcccacatatcgggcgtggagccgggcggagatatcgttctgcacggcgcaaagggtgtcgaaccacttctgcttctcgctgcgggggacgggatcgtccattttggccgccggcgtaccgggccggggagagaagatgaaggtgaacagggcgtcgaattccacctgccgcaccagctccaccgtctccatggcctccgcctccgtctcgccggggaagccgataatgacgtccgaggtcagcaccagatcgggcatgaccttccgggcgtaggtgatgagctccagatacttggcccggtcatagggccggttcatggcccgcagcacccggtcgcagccggactgcaccggcaggtgcagctggtgggccacgtgcctgctccgggccatggtgtcaaacagcttgggggtggcgtccttgggctgggaggacatgaaccggatcagatagtctccctcgatcttgtccagttcccgcagcaggtcggcaaagtcccacggcgtctccagatccttgccgtaggagttgacgttctgccccagcagagtgatctccttatacccctcggcggccagctgccgcacgtcgtcgatgatgcactggggctcccggctgcgctcccggccccggacgtaggggacgatgcagtatgagcagaagttgttgcacccgtacatgatagacacccacgcccggacgttgccctcccgcaccacgggcatcccctcggcgatggtgccgtgttcatcctccacggagaacacacgcccccgccgggtgtagacccggtacagaagctccgggaacttccacagcgcctgcggcccgaacaccagatccacgtggcgatagctctggcgcaccttctccgccacttccggccgctgggccatgcatccgcacaggcagatgacctgctccgggttctgctttttcgtgtgggtcaacgcccccagattgccgtagacccgcttttcggcgtgatcccggatggcacaggtgttcagcaccacgatgtccgcctgagcggcgtcgtcggtgaactggcagcccatgtcccgcagcatacccagaatgtgctggctgtcggccacattctgctggcagccgaaggtgtccaccagcgcatagacgggcttgccccgctgctgatggagggccgccagctggcgggtatactcccgctgccgctccagctgcgctccgtccagaagaactgtttttctatccaatgggtacctccccgccccggtgggatgccggggcactatcttccatatttatcacgttagtataccatatttctccccccggcacaagaaatcccgacgaaaaaatccaaaaaactgccgctccttgcagagggcggagatcctgttttactgcgaggccggggagcagaaaaaataaacggagccggggaatagcaaaaataacggaagcagccggacgggctcccgtccggctgcttccgcctattgagagaatgagaggaaagagtaagacctttttatgcgctgcggcccagtacattggatacgaatacccaccggccatccagctgccgcagggtcacggtgccgccgtcatactgcaataccgtcagcccgtccgccgtgtgccatccggagaggatgcggcagtaggcagcctccgcctcgtcgcccacccggtagtaggcattgtattccgagaggtagcgcaggctatccagccccacgccctgtgtgtcggacagggccagccccgtgtagcgcagcatcagctcctgtgcctgctccagcgggatacggacgacgttgtctgtctccccggcggcgatcatgtcccgctcctgagaggtgacattccagctgccctccggcccgcaggccagcaccgccgccagatccatgtcctccggccggtcataggcacaggtcagaaaccggttggggccccagccggggaccacgttgaagaagcaccggccgaaccagtccagctccgccgccgtcagaggcgtggtgccgtcgggggaggaaacgggaaccgcctccgaaggggtgggctgcgccggagtgatgaccgtgacaggctccggcgttttgggagcaggtgcgggagaggttctccgtccgcaggcacacaggcccgccagcatcatcagtcccagcaggatcgcacaaagccttttcatggcagctcctttcttccggatgcacattggtttgctttacgactttatcataccgaattttctggacagattcatcacgaaatgatgaaaaacatttacaaaccggtgacagtgcggttaaaaatcagtggcatctcctgcatagtgtttacaagtcggcggttgcaaacccgccgccgatagggtacaataaacccatagccaaaatccatgtgcagaaggagtacattatgtggtatgcgatccttggcgccgtgctgctggccggcgaccagatactgaaatattgggtggtgacccacttggccgtgggggagtcggcgccgttcctgccgggcttcatgcagctgacccggctgcataactacggggcggcatggtccagcttctccggccggacggtgctgctggtggtgttcacggcggtgctgctggcggtggtggcgctgctgctcctcaaaaaggtggtgcgtcactggacgggcgttaccgcctgcaccctgatcctgtcagggggcatcggcaacatcatcgaccgcatcgtccacggctacgtggtggatatgttcgatctgcagctgttcagctacccggtgttcaatctggcggattgctgcgtggtggcgggagccattctgggcgggatatactacctgttcctctacgacaagtacgacaagaaaaagaaggagcctgaccatgcacacgatccgtctgacccctcttgaggaggataccggcacccggctggacagcttcctgtcccggcgggtggagggcctgacccgctccgccgccgcaaggctgctggcggagggctgcgtcacctgtgatggcgccgtccccggcaaaagctaccgcattgccggtggggaggagctgtgcgtgattctgccggaggctgaggagccggaggccgtcccgcaggatatcccgctggacgtggtctacgaggacgaggacgtcatcgtggtgaataagcccgtgggcatggtggtgcatccggcgccgggccatccggacggcacgctggtcaacgccctgctgcaccactgcggggactccctctccggcatcggcggcgagaagcgccccggcatcgtccaccgcatcgaccgggacaccagcggcctgatcatcgccgccaaaaacgacgccgcccatctggcactggcggctcagctggcggatcatacgctggcccgtacctatgagtgtttggcggtggggaacttccggcaggacagcggcaccgtggacgcccccatcggccgcagccgcagcgaccgcaagaagatggcggtggtggccgaaggacgccccgccgtcacccattgggaggtgctggcccggtatcccggtgtcacccacctgcgctgccgactggagacgggccgtacccaccagatccgggtccatctggcttatatcggccatcccattctgggggacaccgtgtacggcaataggaagcctgtgccgggtctgacgggccagtgtctccacgccacgggcctgcgctttctccatccccgtaccggctgcccagtggagctcacctgcccccggccggaggagtttgaacggatgctgacaaagctgcaaaagcgcacctgagagcaagcacgccgggcgaggacgtggtaaaaccacgccctcaccctttttatgaacgaaaatac

SEQ ID NO: 12453 - DNA, 209 bp, Unknown
  gut microbiota DNA sequence
aggcacttctccagattggagcggttggagatcatgtaggtgatgttggcgggggaggtcttcttggcagccagcatggtgttcatgttgacatccagaatacgtacctcgttgccgaaggcggcagccagctcagcagcgccggtacctaccacgccgcagcccagcatggtgatgatgggggtctccacgccggtgacgttggccag

SEQ ID NO: 12454 - DNA, 137 bp, Unknown
  gut microbiota DNA sequence
tcatgggtcagcatgggaccgtagtcaatgttcagcacggaggtgacgatgaccatcaccagcgtcaggatgcagtagtagttgaaggggatctggctcaggaacatgctgatacgggagccggggaagccgtcggg

SEQ ID NO: 12455 - DNA, 19273 bp, Unknown
  gut microbiota DNA sequence
gcagatgtcggatttaacatctcacgcataccaggccccccctttggtccttcgtaacggatgactaccacatcgccgtcaacgatcttgccgcccttgatggctgcaatagcatcttcttcgcagtcgaagactcttgccgggccggaatgtaccagcatttcatccacaacggcagaacgctttacaacaccgccatccggtgcgatatttccctttaatacagcaagtccgccggtcttggaatatggattgtcaaccggacggatgacttccggatttttatttacagcatctttgatattttctcccaccgtcttaccagtcacggtcatgcagtctgtgttgagaagtccgatatctgccagttctttcataacagcatagacaccgcccgcctcgttgagatcttccatataggtaggacctgccggtgccagatgacagaggttcggggtcttttcgctgatcggatttgcataggaaatatcaaagtcaaatccaacttcgtgtgcgattgccggcaaatgcagcatagagttggtagaacagccaagtgccatatccaccgtcaatgcgttgatgatggcttcctttgtcatgatgtctctcggacggatgtccttgcggtacatatccatgacagccatacctgcatgcttggcaagtttgattctctcagaataaacagcagggatcgtaccattgccaccaagtcccataccaagagcctcagtcagacagttcatagagttagcggtatacataccggagcaggaaccgcaggtcgggcagaccttttcttcatattctttgacatcatcctctgtcatagtgcctgcttcataagcaccaacggcttcaaacatggatgacaaagaacgcttctggcccttgacatgtcctgctaacatcggaccaccggaaacaaatacggtcggtacattgacgcgggctgctgccatcaaaagtcccggtacgtttttatcacagtttggcaccataaccagggcatcaaactgatgggctaaagccatacactcggtagagtcggcgatcagatctctggtcaccagagaatacttcatgccggaatgccccatggcaataccatcacagactgcaatggctgggaataccaccggcacaccgcctgcttctgctacgccaagttttacggcgttgacgatcttatccagattcatatgtcccggtacgatctcgttgtaggaactaacgatacctaccataggttttttcatttcttcttcggtgaagcctaaggcattgaataggcttcgatgcggtgcctgctgcatgccgctctttacattgtcgcttctcatctttccttttctcctttacctaatgcttatttcatctgacgtttcctagatgggtagttacccatcgtcagaaactggttaaattctctaaaaaatcttcaaatctactccacgatgtagcggcagatcagatcacccatctcggcggttccgacctgtgtgatgccttccatggattcgccttcgcgcggcatgatgtcgatcgtgcgatagccatcatgaagggcagctttgactgcctgttcaatggcatctgcctcggtatcaagatcaaaactgtatcggagcatcatggctgcactcagtatggttgcgatcggattggcaatgccctttcctgcaatatccggtgcagatccgccggacggttcgtaaagaccgaacttggtctcatttaaacttgcggatgaaagcataccaatggatcctgtcaccatgctggcttcatcggataaaatatcgccaaacatgttttccgttaagatcacatcaaactgctttggatctttgactaactgcattgcgcagttatcaaccagcatatgctcataagtgacttccgggtaatcctttgccacttcctctacgaccttgcgccacaaacgggaagaatccaaaacatttgccttgtcaacactggttaccttcttacgacgcttcattgcaatatcaaagccacgctttgcgatacgtctgatctcgttttcgttatatgtaagcgaatcatgtgctgttaagacaccgtctacttcctctgtgcttctctgaccgaaataaagtcctccggtcagttcacgcatgatcatcatgtcaaaaccatccccgataatatcatcgcggagcggacatgctgcctttaactcctcatacagatatgccggtcttaaatttgcaaataaattcagggatttgcgcaatttcaaaagtccggcttccggtctgagttccggtgccagtttataccatggagaagtcgcggtattgccaccgatcgagcccatcaatacggcatccgatgcctttgccgctgcgatcgcttcatcggtcaacggtacgccggttgcgtcaatcgagcagcctcccatcaaaatatcttcataatgaaacgtatgtccgtaaacctgactgatacgatccaagactttctttgcttccgaaacaatttccggtccgattccgtcaccactgatgacgcctactttgtattccatattattttatgtcctccttatcccgagcacacctcctatattgtgtggcaaaaacaacacatttcatagaagattctatactttactataataaagtatttacatatgcatttcaataagaagattgcataaaaaatggatttttatgcacaaaaaaacagatacgagagttacattttctgtaactttcgtatccgtcctatttcaaaaaactgctattcctgcgctgcttcccgcatcgcctgtgagatctggtctatcttttccagattacggttcatatcctgtaaagtcgccatgctgtgatcactgagtgataaagcattgtccgaagatgccgctacttcctgtgatgtggcagataaattagcaatgctgtccgtgatctttgtatttgctgtcagtacctgctccacggaaatcgttacatgactgacactctcattgagttcctgggtattggtctggatgctgtttaacttatctcctgtagataagatcttttcattctggcgttctgcataatccgtcgattttgtcatgctctgcgttgccgcgccgacttctgtcgtcagtttgctgatgatgacaccaatctgctccgttgcttctttggtctcctcggaaagtttgcggatctcatctgccacaacggcaaatcccttgcctgcttctcctgctcttgccgcctcgatcgacgcattgagtgccagaagattggtctgggaagaaataccaagaatggtctctgtgatggcatccacttccttgatgcggtcgttcagattgttggtagaaacacttgcttcacgattgacggaagcgatcacctttgcctgttcttccaatgcattgaccagatcaacgccctcttctaccgcctgtgcggtcgtctgcgacaggtcattcatccggtgggcctgttcttctaccttttccaaaatattctggatatccatggtctgggctgtctgcgactcaatggcttctgctgtaagtcttgtactgtctgcgatctcattgaccgaagtatgactgctatccatactctcatttaacatccgggagacatccattgcctgatcaaactgctctgtcagttcctcggaatgttccatgatctcttttgcaatatttgcctgtcttgccgtgcgctcctggatttcctcataggtctccgtctgatgtctttcccattgcgcgcagactaagagttctgatgctgcggcaacaacgatcgctgccaactgatagcccacatcttcctgcatcccactcaagccgtaatgcatggcataaaaaatatcaaatgcgatattgctggcaatggcaaagaaggatcctaccttgaccagtttgaccttgcgatacatgaggaccaagaccgcgatcggaaatataactacatagcgcataaaaataccgcctgtaaacaattcgatcacataataaaggaaaacagaataacaactgaaatgatagaaaatatcctgatacttaaactttcgataagcaatcacctgtaccaccatggctgccacccctgccaaaagtgcggcgatacccttggcatcaaagcctacatctatcatgcccgtaaaggacgatatcaggagtgctcctgtgatgatcattccgacaataaatcccgtacggttcttttctcctaactgcttttcctgtaatgtcatgctaacccctctttttgactcgttttatccaaaagtttcatgcacatatcatacgatattgcctgtattttcgcaatatttcgtaggaaatttatacgtgtatttcctcgtcaccacaacaaaaatgggcagtatccgaagataccgccctatataaggaaaggatttaatgaaaaaacttagttattcttggcttctccctccgggaagatgatcttatttacgaagaagaagaccaccatggaaacgccgccgtttaagacagtcgttccgatattgtaaagccaatccggtacaaagagtgctgccacagcaacccagatacagttgatggaattgacgatacaggtaacgatacaaaatgcgatcagataccacaagccctgataccagatatttcccttactgcggaatacaaaacttctctggatcgggaagttgatacattcgccgagcaccatggctaccatataagcgcagaaatatggcagtcctccgtgctgagcatcatatccgataatattccacttgaatgtctctccaaacagggtaatatcaatccccggaaatccaaaatcaatatttggcagtccggcaaatgccaatggcaaaaacaataacatcaaatactttaatactgtgatcagattgctgacgatcacaaacaaaccaccctcgcggatccatttggacgctccgggatgtttttcggcaaatcctgcccatgcgttttttactgcgttcatactctactcctttatcccttaaaaattgctgccaggaaatgccccagaccgatcatacctctgccgttgaccatttccaccagtccatcgatcatgtcctcattcatggctccgcccgtcatcttggaaagcccacggaagggcatattgtaaataaataaaatgtttaagtttggttttccttttttctcacttgccttcttgatgctgcgtaagataaagcagataaatctggcaagataagacttggcataatacatctggcaaatggcatcatttttatccaatttaccggaagtatcccactttgccggcggcagatcgcgtccatacagataagcatattcctgatcggataccgccttgacctgaccgctcgcataggaaggcaggcacttcatatcgtatggaagtggcgcaccggaagactctttttctatctctgcgcgcaggcggatatcctctacactggctccaatgtagatctgataagcacccccttcgacttcccagccattcgtctttacattgtagtaacggaaggtcttatcatcaaatgggatggtcacctgctgactttctccctttttcaaaaatactttgacaaagccctttaattcctttttcggtccaaacagatggctgcgctcatgcccgacatacatctgggcgatctctgcaccatcgcactcgcctgtattggtgatcgtaaaggtcacgccacctccatcgaccgtcagatcactgtaggcaaacgtcgtataactgagcccaaagccgaatgggaatcgcaccttaactccagccgtgtcaaaatagcggtatcccatgtaaagtccttcacggtattcactgctgcgctcgatagccggatagtaagatgtactagccacatcctccagactgtaagcataagtctcattcaactttccgctaggacaagtcgctccggtcaagacatccagcatagcggatgctcccgcctgtccgcccagataaccgtgcacgatcgcagccacccggtctgcccaaggcatttccaccgaagatccggcagataggacaaccaccacatttttgttgaccgccgataccttttcgatcaattcaatctgtgcctgtggcatacgcatatgggtccgatccagaccttccgattcactgatctcatccagccccacacaaagcaatacgatatccgcacgtttcgccagttcctttgcttcttctaaaagtcttacgtctgtctttttgttgcgcacatagcctctggcatagtccaaataattgaccggataattcgcgatcagatccaggatattctccggctccttagtcggattgaccagagatgatcctgcgccctggtaacgcggtgtcttggcaaaatctccgatcactgcgaccgtcttgtctttggcaagcggcaggatctttccctcatttttcaaaaggacaatgctctgtgcggctgcgcatctggcaaaatcatgatgctttttgacatcaaagcccttgccctcatgctgtgccgtcgcctcatgtgtggcaaaaacaacacgtaaaagttcatctacgcgctgatccagaatctgctcctccagacttccctcctgcacggcacggacgatctgctttgcccccatctttccggtggaaggcatttccagatgagagccctgtcgcacgccctcgacgtgatcattacttccgccccaatccgatacgaccatgccgtcatactgccactcaccatacagtatgtcgcacagcagatgtttgctctcatttgcataggtgccgttgatctgattgtaggcggtcataatgccctttgccctgccctctttgacagcgatctcaaagcctgtcgtgtaaagttcgcggaaggttctctcgtctaccacggagtccatcgccatacggcgttcttcctgtgaattagccgcaaaatgcttcgggcaggctgctactcctttgctctggatgcctcggatatatgccgcagccatctttcctgccagataaggatcctctgcaaaatattcaaaattacgtccacagagggggcttcgcttcatgttcagtcccggtccaagtaccatgttcacaccaagagttgctgcctcctcgcccagacattcgcccagtttttcgccaagcgatgtatcccaactgttcgccatagtcgccgctgtcgggaaacaggttgccggcagggaagcattgagtcccagatgatctcctgcccccgcctgcttacgcagtccgtgcgggccatcggataaaaacatggctgggatgcccattttcttataatccttggtacgccaggtgtcctgtcctgacatcatggatgccttttcctccagcgtcattttggaaatgatttcctgatactgtaacatatccttcttcctctcatcctctttgttgatgctatcataacatgtttttttgtccctgctatctttatggcacaatctgtatcttttgcgtcataaattgcaactttctttcctagttagaataaagcattccgcaggcaatcgtttgtacttatgttttcaattttgtaaaaagggcatcgccatagaaaagcgacacccttttttcaaactttctaactattcttcaaaagacatctggcttggatttgcatcatccagataagccgttctctcagcaccatattgggcaaagaaatcttctttttctgtcataacaccacctggtaattcaatcgggtattcatcgatgctatctgtatcatacgacaaattgtatcctccaacatcagaataactattgtaaacaatacgtgttgcctctgacaacttacatgccgttgctccgtcagaagaatctcccttttcatatgtaccatatgtcgtcacagaggtatgcccaagaagcatatcatacgcaaatgttgcctctgtcatcaccatctcatatgtaccatcttccttcagggtcaactgatattcatcataatcggttccgccataggaattttccttatcttcaccaaaaatgtatacactaccctttgccgcaccagcatcagatgcagcggaatttcctgcattgccggaagacttggatcctccaaggaacttaacacccagtccaccgaccaaaagaccaacgatcactgcgacgatcactaaaacaacaactttattcttcttcacaatatcatctccttcttcttcctgctttggcagactctttgcatattttgcccaacggatgctggtcaagatgatcaaaagtccacaaataccaaagacaataatatctaagattatcagtgcgatctcccatggtgccttctggcttgccaccgttccgtcatcggaaacgctgtccatggcattggatgtaccaactgcatagatcacattctttgcagcgcgtgccacattgttcataacagttgcattggatgtccagtctgtcgtacttccatcttcctctgcgtaggaatccagtgcccagtaactcttgttggtgttcagccacaggtcggttcctgccgcaagaccggatacgatatcctgatagaacattgccggtacggaagcctggtctgtgatgaccataccttcaaatccccattcaccacggagtacattggtcataagtcccttgtgtgcgccgacccaacgggcaccgatacggttcataccagccatggctgcgttggtatttccgatcgtaacggtatattcaaatccctttaagtaaatttcacggattgcctgctcatttgcaaacatagcaccgccataacggttggtctcctgatcgttcaaagcaaagtgcttcatataagtgataacgcctttttctcttgcgcccttaacctcatttcctgccaactgaccggaaaggaagccatcctctgagaagtattcaaagttacgtccgctgtacggagaacgatgaatgtcaacacccggtgcataccagccggcaacgcctgtgttgatagagtcctcgccaagactgagtcccatttcatacaaaagatctgtattccaggtacaagccatcacggcttctaccggatatgccatagcagactgcccaccgaccagtgttccggaaataccggaggtaccgtctttatcggtggttgccggaagtccgatatcatctgcctgaatggttgcataaccaccctgacgtaccagttgcattgcgcggtctgcggataattcgctgacaagttctgaccagatctcatcatcataagatgcatcctttgcatcggatacctttttatcactatcctgctcaaattccggcatagcactgccgtcatttaccacgtcatcgcttcgatcccattgcagatcagaaagcaaggcatcacttgccgtcatgtttccatctgcataagtgcttgggaatgatccactccagtcacttctggtaagataagcaaaggaatcatcatagtaacggatatcgacatctgcaaactggtttgtgatgtcatttcctgtttccgtagatttcgcataagttgtagtatccagcgtatctacagtcgtcttataagtcatatccgcattgccgtctgcatccataccattttctgtggtatagcccttggctgctaagatattattgagtgcctcatgtgcatcgcttgctgccgtaaaataataatctccggcatctaccacataggtctttgcatttgcggcatcataggctttcatgacttctttatccaccgatacggtaactgtctggtctttgcccggttcgatggaatctgtctttgtaaatccgaccagttctacggctgatttttcaataccgttttccttgtcatagtcggtatatggcgactgcatgtagacttctacgacatccttgcctgccacatccccagtattctttacggtcacactgacttcgtatgtatcgcccttatcctctacggaataatcagaccacttgaagtcggtgtaggaaagtccatagccaaatgggaactgtacggtagaagtgtagtcataatcgcctgcatttccgcttcccatcacggcatcttcgtaacgtgtctcataataacgataaccaacatagataccctcagaataaacggtatatttgttaccgtttgtcacatcactgttggtgatggtaaaatcaccaatgttttctatggatggcgcactctgggaatcataggcataggtatctgctaaatgtcccgagaagttagtctttccggcaagcgcttctgcaactgccttgataccttcctgaccaacaccgccgacccatacacaagccttgacattcttgtaggcttcgtcatttaaaaagcccagttccatggcattgttggcattgacaagcacaacaacattatcaaaattctgacaagccatggtcagcatgtctctttcatcctgatccagttccagatatttgtagccgcttgccagtggctcggtcgggatatctgcactctcgccgccactgcgtccgatacaaacgatggctgcatcattgtaatccttgaaactgtctttcacatcatctgtgtagacgcttgccggcacctcatttacggcaaattcgcctgcgccggtctcatccggtacgctcttgcggtaatccttaccggcaccgctgtcatagaaatcccataaggtttcattgacttcaaaaccggatgcttccatcgcctttttcaaattaagagcctgggaagtatcaaccgatccggaaccggaaccgccatagacaaagtctacagaatcctgtcccagcaaagatacctttgcgccttcttttaatggcaatccgtcctcatttttcaaaaggaccatgccctcttcctcaatggtctggcagacttttgcagattcatctgtcgtaaccacatcggaaccactggtgtagaccgtaatcagatctttatacaaagatgcgtaataattgccgatggcaagtgcaacgatcaatacaccacacacaacataagtcactatggactttgttttgctaaatggttttgtcttcattgtttcctcctccttttaagcctttggctcaatctttctatgcctaccataataaaaaaagccagaccctacaatgggtctggcacatctgaccgatttctgacatatttggcagattatctatgttccgcttctttataaaggcgcaaaaattccgccggcataggcaggaggatctgcagggtaaacatattatcggcgaccgaggttgccatggaaccgccgtattttttagcgatatgccgcatactcttcatcccaaagccgtgataatctttgttgcgcttagtcgtgatcggcagcccgtccgcaaaggctaccttttcctcacaataattgttgatctggatactaaggaaatccccgaccgcccggatggtcaggctgatgatacgcttgtcggtatcctgatacttgctgacattttctatggcattatccagagcgtttcccagcaatgcataaatatccagtgtcgccataaaatccagatgactggcatccacgatacaggacaggcggatatcacgcctgccacagatcagggtcttctcggaaataatggtatttaccacctcatttccggtctcgacaacggcatcatagataccgatggcatcctccagttcccggatataatcactgcgctccccttcgctgacatgctctaaggcacggatctggtgcttgagatcatggcacttgtgattgatggtctcgatattttccctggagagttcgtactggcgttttctctcatataagaggtgctccacgatctccttttcctgattgatattgcggatctgcaagatcccatgctgcacccaaagtagcaggatacagatcagaaaatctaccgttgccccctgataatttacatgatcatagttattggaattgctcacgaaaattgcctgacacataaaggttgccagatagacgatgccaaacaacatcccacaaaaggcgatattgcttggattatcttcaaagagccgcccaccgctgtcctttagtttctgatgaaagaccttgtaaaaaataaaataaaagagcgctgttgtaaagatacacataagtccgtaatcccatagtctttccaacaaaatcttgcagacaccgcgtgcgatcacttcattgatgatgacatattcaatgtgctgcagactgtaggctcccgcgcacaagaacatggcatccgccttgctcagatcaaaactgtaataaatatagaggatggttcccgcggacaaaaggacataccacaaaatatttacggcattgatccagatccccgatacctgtttggtcagatccaatacataggtcacataaatccctgcggacagactaaagaccagccagcccaccggcagcagccatttcccggtcgtacgcttcttggtaaaacaggcggcaaagaggatctctgccaaaagcagttcccagataaagcggagttcttcaaagacatccagtgcagaaatttccatcatgccatacctccgatatatctggtcaaggcatccacaaaggctgtctttttgttgcggctgatcggcagttggtcagaccctaccgtaaccgtatttccatggagacaggctacctttgcaagattgactaggtaagattggttacaacggacaaaatgatagcgttccagttcctcctcagcctctttcatggcgccgcgtacttcatagacctgccccgtcgtatggtattgcagataatgacggataacctcgacatacaggatgttctcgatcgccaccggctgtatgccatctgtcgtctgcagcatcatctgctttttctcatgccgccccatatagcgcattgcctttttcatcttgagggcaaactcctgatagcccagcggcttgatgacataatcgatcgcctcgacctcatagccatgcagggcatactgtgccatattggtaataaacataagcaggacttccttgtcatcctgtcggatcctgcgcgccagagaaatgccgtccatgcccggcatttccacatccagaaggatcaggtctgcatccttttgataatgctccaaaaaatcctccggactttcatagacttgtgcgatcacgctgaccttctgctctttttcaaaagttttcagataatcagcgatctcatcccgcatctttttttcatcatctactacgactactcgcatacgtttcttccttttcttacactgtaaaagaggtgccgcttttgcgacacctcttattctatcatggattattttacttttgcaaatgcctgatccagatctgcgataatatcatcgatatgctcggtaccgatagacaagcggatcgtgtttggcttgatgccctgatctgctaattcttccgctgacaactgtgaatgtgttgttgttgccggatggatcacaaggctctttacgtctgctacatttgcaagcagtgagaagatctccagattgtcgataaactcatgtgcttccttctgtccgcccttgatctcgaaggtaaagatagaaccgccaccattcgggaagtacttctcatagagatcatgctgtggatgatccggcagagaaggatggtttacatgctcaacctgcggatgctttgacagatattcaaccactttcttggtattctctacatgacgctcgatacggagtgacaatgtctctgttccctgtaataaaaggaaagcattgaacggagaaatggttgctcctgtatcacgaagcaggatggctctgatgtaagtaacaaaagctgccggacctgctgcatctacgaatgagataccatggtaacttgggtttggctcagcgatcggcgcatatttgccgcttgccttccaatcgaaagtaccaccatcaacgatcacaccaccaaggctggtgccatgtcctccgatgaacttggttgcggaatgaacaacgatatctgcaccatgctcgatcggacgaatcagataaggtgttccgaaggtattgtcgatcgcaagcggaagaccatgcttgtgtgcgatctctgcgatagcatcgatatcaggaatatctgaatttggatttcctaaggtctcgataaagatggctgtggtattgtcttggatagcaccctctacttctgcaagattgtgaacatctacgaaagttgtctcaatgccgtaaagtttcagggtatgtgctaaaaggttgtaacttccaccatagatggtcttctgtgctacgatatggtcgcctgctttagcaagtgcctggatcgtataagtgatggctgctgcaccggatgcaacggcaagacctgccacaccaccttccagggctgcgatacgatcttcaaatacaccctgggttgaattggtaagtcttccataaatattacctgcatctgccaatccgaaacgatcagcggcatgctgtgaattgcggaatacataagatgttgtctggtagatcggaacggctcttgcatcggttgccgggtctgcttcttcctgtcctacgtgtaactgtaatgtctcaaatctgtattttctttcttcactcattttcattttctcctttaaatctgttcttggtttttactcgctctttcttatctcatctctgccttgcggcaacatcgccaggaacacattcgaaaatgaaccaattcatcaaaataattcatgatctttttctctccctatattcatactaacttactaggaattgtgatgttagaatcatatcctataattcctagtatgtcaataggttttaggactttttcaaaaaaactttaaatgacataattattcgccatcattccctgttcttcctcgacaaggtcagccagcgtcgtgttgtcgatcacgctgctgatggcggcatccagtttcttccaaaaatgcagtgtcacgcagttgtccgcacgatcacactgattgatgtcatctgccaagcatgcgaccggcaccatatctccttctgtcaggcgcaggatctgacccattgtgtaatcttttggatcacgtgtcaggacgtaaccgccctggggtccacggatcgatctgacaaagcctgccttatttaaaatagataccacctgttccagatacttgtctgaaatcccctgtcttccagatacatccttgatgcgtaccggctcaccagtattgtggagtgccagatctaacataaaacgaatggcgtatctgccttttgttgaaactctcatatgaacctctttttctatcaataaatctaatgtcctgccgcaagtgcgacaggacaacaacatacaaaccgatgcgattagtctgcaaacaacggtgtagacagatatctgtcaccggaatccggaagaagtaccacgatattcttacccttgttctcttctctcttcgccacaatcgtagctgcctttagtgctgcgccggaagagattccaaccagaacgccctccgttactgcaaactttttaccctctgtaaatgcatcctcattctcgattggaatgatttcatcataaatgcttgtatccaaagtatctggtataaaacctgcaccaattccttgaattttatgcgcaccagcctttcctgtggaaagtacggcacttgtcgctggttccactgcgattacctgaatgtctggattttgttcttttaaatacgcaccaacaccggagatggttccacctgtaccaacgcctgcgacgaagatgtctacggctccgtctgtctgcttccagatttcagggcctgtggtagccttgtgtgctgcagggtttgccgggttcacaaattgtcctaacacaatcgaatctgcaatctcgttctttaacgcttccgctttttcaatggcgcctttcatgccttttgcaccttcggtcaaaacaagttctgccccatacgctttcaaaagattacgacgctctacactcatcgtatccggaagggtaataatggtgcgatatccccttgctgtcgcaactgcggcaagtccaattcctgtattcccggaagtaggctcaataatggtcgcgcccttcttcaagaggcctttcttttccgcatcctgaatcatcgcaagtgccacacgatccttcacagaacccgccgggtttaagtactccaactttgctaggatggttgcgtccttgacaccgactgcctcggtgtaacgatttaatttcaaaataggtgtgttaccgatcaattctactgcactgttcttaatgtctgccatttgcttttcctcctgcaaatcctgtctgctcacatccgctgatgcaggcaactaagtatcaacatgtttcatttcatcacaaaattcacaattcctatattcctagtcaaatagtaggttttctatgatttgtagtttaaaggataggattttatttgtcaatacctttctttaccttatctctggcttctttatactcctgcctgtccatcggatagatatagccacaactttcacacataatgccgcgttccttttcaatatttacaaccggtatccaaaataaagtgccctggtttaagtggcggcacaaggtcatatatgcatcgtgtccacagtttttgcaaatacctcttcctacatgtccctcgcgtttgaataccattttctgtccatgtactactgccattgcgcacctccgttcaagcgtgtgatctgtttcagattggcaatcataccgctgaattcctcggtcatcttagcggcacttcccaccagcgttcggctgccatcggcggtttctaatgctatgtaaatcgtctcctggggctcgccatcgaccatattacagcggaagacattgtgaatctcctgtaagtccatgatgcgaaagccatccttagccgctgcaaaatccaaaagataccgacgtccatatgccacctgatattttttggaaaattttgctcccgtataggaaaaatcattgtaaaggatttgcaggcttccctcctcctccatttccctcaactgggctttgatgcgcttcttcttggttccagctgtgccaaacatcagtattgcaacaaaggcaaaaataccagccgccagaagatatacatccccttcgctgtctccaatgcccagcaaagccaaaaaaagtgccagaataataaataccacggccgctttcacattgaccttgcacatttccacaagttttttcttaaacttctccatacctaacctcccgatagatgatttccagcaatctgctttatagtcaattataccacctgcccgattggcccacaatcactggcaaatagaaaatacgcaaaaaaagccatccaatgccacgattatgaagttggcactggacgactttcgtctttttcttcgattgttcttatcccctgtctcatcttctgcctctacttctctgctaaaccaacgtcaacttacccagtttagcgccgtaagcgatgcaagaccacaatctaaagttgaagtttactctgaatcagtttctttacagcatcaaaactctccttgctaatgacatgctcaatacgacaggcatcttccaaagcaatttctttcggaacccccagtgccatgagtccctgtgagatcatttcatggcgttcgtaaatcatctctgcaatctcacgtcctgcatctgtaagataaatatatcctgcatctgttaccgtaatctgctccttttcacgcagatttttcattgcaatactgacacttgactttttgaaatccagttcatttgcaatatcaactgctcggacaaccggtaatctcttactaagaatcaaaatggtttccaaataattctcagctgattcattaataaatgttcgcatacaattccaacctcctaaaatctatgactgactctgagagtagcaaataatctttttcaaatgattctgatgtcaaaactctttagatatgactatcataacatatttaggatagcaggtgaagttatttctatgcttccttttactctgctactgtttcatctgcgatcggcatggcaccgttatcctcgtgtgcgatttcctctaatgcctcgctttcggcctctgcatccgcattctcctcgcagtcctcatcataaactacgatctccctgatcgcatgttcatttccctgcaccagataggtatgctcacttccgcagtacggacagatctttccgtgttctaccgtaccgtaagtcttttcgcagtcctcacagaaagtaactgccgggatcatctccacttccaactggcaatcctttaagatctcactcttggtacacttccacttccagcagtcctccagataggacggaatgacggtagatacttctccgatctctaagacaaccttggcaacatgattgacatggttttccactgccagagattctactttctttgcaatatgaaatacgattcctaattcatgcatgttcttttcctctttaatctccatattccccggacaagcgcagtttctcatccccgcctgcctcgtaaggcatccgcatcttgcagacgctgtaccagtataacatatcagccgcctacttgcatccttttacgcaggtagacggctgattatcaccatatttttatttctggtaaaaattatttgttctgcattgcctctttatgcgccttgattgcagccttttcctctgctgtctttggtgcaaagacaatcttaacggcacgcttcaactcataaggaatgatagccttgaacttgtcttctgctgtcaccatggttgagcactctgggtgatctctgtggagtgtgatagcatcaaatgcacacttcgtcgtacatacaccacaaccgatacacttgttggcatctacgatcgtagcaccacagcctaagcaacgggaagtctcgatcttgacctgttcctcggtaagtgcgatatgcgcatccttgaaggacttgttgccaagtgtctcgtcaaatccttctgactgacgggaagaattgtcgtaactctctactaagatatcatccttgttgagttcgatgaattcccacttgttacgtccgatggtcatatgaccattctgcacatatctatgtaaggattcagatgcccagtgacctgctgcgatcgcatcgattgcgaacttcggtcctgtcatcacatcaccaccgataaacagatctggcgcgccttctacctgataagtgagaccatctgccacaagagctggtcc

SEQ ID NO: 12456 - DNA, 19462 bp, Unknown
  gut microbiota DNA sequence
gttcggggctttttttctataagggctggaatttcagtggaatttttgcggtaaactctatgatccgaagacaagagtgttatatattgcattttttatacatatcaattattatattgttatttgaagagacaggaaagtaggtgagcatatgcagtttcgcaagattgatgaacacaagatccattgcataatttcgcaggaagagatgagccaaaagggcatccagattgaagatttcctagatcatcgagacaagacagaggcgttcttgcgtgagattcttgcagaggctaaatatgaactgaaccttgatgaggatatgggacgctgttttagtgttcagatggcggttatgccggaaggtgatgtttcgcttgtcattagtggcgaagatcacggtagcaccgaggagacgctgacagagttcggcaaacgtctgcaggatttcaaggagatcatggaagaagccaaacgaaagttagatgtgaaaaaggaaaaactgcaaaaagaagcagatgcgctcgaaggtgtggagacagaggaagccgggctgacagcagaggaagaaaaaacaacagagaccagcccgcaggagcaggcaccacaagaggcgaaaaaggagaggacggtcttaaatacaccgatctgggtcgctttttctaatttagatgattgtattagtgcctgtcatcatttacagtcacaaaaggggctttccagtgctgcatacaaatataaagatacatattatctgcgttttcagttttcagaggaagaacatcaggtggcaggtgtgattctggtggtgtcagagtatggcaaggagatcctgacggatgatcatggtggagccgtgatcgctgagcatggaaacatactttgcaaggaaaatgcggtcgagacattggctcgtttataatgcatgataagaggtggagaaatggcgaaaacaccgccgttttctctatcttttttattgacagattgttatcatatatgataatataaaagaggttggtgatgaaatgaaaaagagatacgaagatggcatagtgccacagatgaatcaggatattcgagcagattttgccagacagatccgtgcgctccgacagagtcagcatttgacgcagcaggtcttggcagatcgtgtcggcacgaagaaatccaatatttcccggatggagagcggcagatacaatccttctttggattttatggtacgggtggctgccagcatggggaagcaggttacgatcacaatagaggatgagtagaggatatttacatgagacagagagcaccaaaattggataagcatgtagacaaggatgttgttttatgcagcacgacgaaccgacgcgtgagcaatcacacgacagatattttattgcaggatgcgattccttttaccaagaactggaagcggatccctttttacaaacgcgaggaatatcgaggtgcggatcagatctgtgtcttttcgatcaaccgcaatctgtacggcagggcgagacgcagtatttcgcagttggatcgtatggatcgcaatcgtttgcttttaaatgtgatatagggcttgttgggataggagcagattatgttaccacttgcattttgtgagagaatgaggagaatgttagggcaggcagagtatgaagcttttttgaaaagttatgatgaggataaataccagggcttgcgctttaatataggaaagggaaaacaggaggattttctggcattagcagaggatgcgttttctctggaaaagatcccgtgggcagagcatggattttattatggtgcggaggctgcaccgggcaagcatgcttaccatgaggcgggtgtctattatatgcaggagccgagtgctatggcaccggcggcttatctgcaagccagaccgggtgagcgagtgctggatctttgtgcagcgcccggcggtaagacaacgcagatcgcggcacagatgcgaggggaaggactgctcgtggccaatgagatccatccggcaagagttaggatcttatccgagaatgtggaacgcatgggtgtgagaaatgcccttgtcacaaatgcggctccggcagacctgcgcagacattttggtatgtttttccatcggatcatggtggatgcgccttgctccggtgagggcatgttccgcaagcaggagacggcggcagatgagtggtctttggaaaatgtgaggacctgcgcagcgcggcaggacgagatcctggaggaagcatacgctatgttgctgccgggtgggcggatggtctattcgacctgtacctttgcaccggatgaagacgagggcagtatcagccgctttttagcgatacacagcgacatgcatctggtggaggtgccaaagtatgaaggcatgagcccgggacgggcagactggtacgaggattttgctatccgcgagagcgcgtttgcaccggatcccgaggaagtacttccggtggcagagcatctggagcgttcgatccgtctttggccacatcttttacatggagaaggacatttcgtggcagtgatggagaaggacggagcgtgtccgctcatagactataaattggaaaagacggctacatacaaagaacagaaagaattgcagaaatttgcaaaggattgtttggcaaaggactggatggagacacttgcgcagggacagtatcttacttttggcgagcagttatatcttgtgccaaaggatatgccggctttaaaaggattgaaagttttgcgcccgggactgcatttgggaacattaaagaaaaaccgctttgaaccatcacatgcatgggcacttactttatataaggaagatgttcggcacgtgacggatctttcgtcaaaggacgagacggtctatgcttatctgcggggagagacttttacggcagacggcgagccgggatggcatctgatcacagtggatggttatgcgctcggttggggcaaactgaccggaacgaccatgaaaaatcattatccgaaagggttgcgaattacatataaataatttaaaaaaatataaaaaagtacttgacgaaacactttggtaagattatactatcagtagttagtaggaactaaccaagaaaaataaaaaacagcaggatatcgcgcagaatccatttgaaatcgtatgccaactttttctcctctcgtgcggactgctttttttatggcatacgagttagagacaactaactgcataatccgacgaaatggagcacatactaagcacatgaaagagatggaacaatatctgatttgccactgttctccgacactggcatcgatcaagacggcaaatttattttcctgttcctttgagaggcaggaggacttcgcggaatgtatcgcctactggaacaagcagatgcatcccaagggaattgcagtcacggttttacagcagaaaccgaattgggcattggtctatgtgcatcgtatagcacaattacaaaaggatttacaaaaaccgggcgtttcctgtttcttagaacaatatggatatgttgatctgtgcgtggaaaaggcattggaacatttgcaaaagcggattgcagccagtgatggtttcccccatgagattggtattttcctggattatcctttggctgacgtgatcgggtttattgaaaatcagggatgtaattgtaagtgcagtggctgttggaaagtatatcagaatgaagaagatgccttggagacatttgcccgctacaaaaaatgcacccggatctacacggaattgtggatgcaggggcgcagcatcaataaactgacagtttcagcgtaaagggcagacttggcacgaaatcagaatggaggatatgagatgagcaaagtagcagtcgtatattggagtggctctggcaatacagaggaaatggcaaaagcagttgtaaagggtgcacaggataaaggcgcagacgcagaattgatctattgcagcgatttttcggcaagcaaagtagctgattatgatgccatcgcctttggctgccctgcaatgggagcagaggttttggaagaaagtgaattccagccgatgtttgatgaagtaagtgtagcactcggcggcaaaaagatcgctttgtttggctcctatggctggggcacaggcgaatggatggaaaactgggaaaatgactgcaagggcgcaggtgcaagtcttgtctgtgacagtgtgatctgcaataacaccccagaggatgaaggactgatgcagtgcgaggcactcggtgcagcattggcatagtcagatgcctgaaataggcagatttaatttgtcataaatggatagtttccgctattcatttatatatagttcttccataggtaatggaagactcccttttcttaatacttatgtgtaaataatccttccggagtgtggccggggggattattgcgttgtgactaaccataaatagcgtgggctgacatgcgttaaaacccagtaaccacgctggtttgtggcatttttgtgaaatgatgggattgtatgagagaaggtacaaaaacccccttttttgacgttgataggtaaaaaataagtgctaggatagttcataaataaaaatgcaatgtgccatataaagagcattatatggcaggaaaataagaaagagaggtatatgattatgagcgcaggtaaaggatgggcaaaattgtccttggtatccttggtatcttgcaaccgaccacatccgcacttttgcacaatacatcgaccttattgatcggattgcattccatgaaagatgtattgtaaattataatgtatgaaaagaaaaacaagaactatgtgaaatgtttaacatggttcttgtttttttatacccagtatgctacattttcctttgagcggtattcatggtatgaaactgcatcagatgatagtgtgttatcacaagtgatgtgagaaacaaaggtagccggtggcaccaaagcgagaaacatcaaaacgacgggttcgttttaaaggaaggtgatgacatgaagataggaattattggttccggtcgtgtaggctattccatgggaaagtacatgcaggatcacgggatcagggtgacgggattttatgaccggcaccgggagcgcgcacttgatgcggcacaatttacaggtacggacagcttcgataggatcgaagacctggtagcagcaagcgataccctttttcttaccacttctgatggtgagatagcaaacgtatgggattgcattcggcatctgtctattcaaggaaaaatcatttgtcattttagtggctcattatcatccgatcaatttcagggaatcgaaaagacgagggcttatggtctgtcgattcatccaatgttagcgttcagcgacaaatatacatcctacaaacaattacagaatgcattttttaccatagaaggtcatgcgcaggcacttgcagtcatggagcctttattgcaaaaaatgggaaaccccgtgcagaggatcgcgccggagcaaaaggcattgtatcatgcggcggcagcaacactgagcaatcaggtcgtggcacttctggcgagcggttatgagatgctggaagcctgcggctttgacacagaaaatgcgcgccgggcatcagcggcactggtgcggggtaatgtggaaaatgtcatagtgtccggctgtgtgcaggctttgacaggacccatagagcgcggagatcttgtcacggtagaaaagcacttgcaggtcattcctgcgcaggggaaagagatgtatatggcgttggcaagggagcagatcaggctcgcaaaaaagaaaaatccgcacagggattatacagacatggaatgtctgttggcggatgaaaagagaaggagacaaaacaatgaagaatacggttgtaacatttaaggaagcaaaggcaaagggcgaaaaactcaccatgctcactgcctatgattattctacagcaaagttggtcgatggcgcaggcatcaattccatcttagtgggggattctctgggaaatgtagttttgggctatcctgacacgatctcagtgaccatggaagatatgattcaccactgtgcagcggtcagccgcggtatcaaagatacacttttgatctgtgacatgccatttatgtcctatcaggcaagtgtttacgatgctgttgtaaacgcaggacgtctcatgaaagaaggacgtgcgcatgccgtcaaactggagggcggtgtagagatggaagagaccatccgtgccattgtaaatgcctccattccggtctgcggacatattggtctgaccccgcaatccatcaatgctttcggtggttttaaggtacagggaaagggcgaggcagcagcgcaaaaacttctggatgatgctagagccgtagagcgtgcaggagcatttgctgttgtcctggagtgtgttccggcagcattggcaaagcgtgtgacagaggagatctccatcccgacgatcggcatcggtgcaggcgcagactgcgacggacaggtgctggtctatcaggatatgctgggcatgtttacggactttaagccaaaatttgtcaaacattttgcaaatgtaggacagatcatgacagaggctttcaaggcttatgatgccgaggtcaaggcaggagaattcccggcagcagaacatacctacaagatcgacgacagtattattgaaaaattatattaatataaggaaggaaagaaaaatggaaatttgttataccatagcggatgtcagaaaacaggtaaaagaatggaaaaaagagggattgacgattggttttgtaccgaccatgggatatctgcatgagggacacaaaagtctgatggaagaagcccgcaaggaaaacgataaggtcgttgtcagcatttttgtcaatccgatgcagtttggaccgacagaggatctggagtcttatccgagagatttgaaaaaggatgcggctctttgcaaagaggttggcgtcgatctgatctttcacccggaaccggaagaaatgtatccggaaggtttctgctcttatgtggatatgaacggactgaccaccgaactctgtggcaagagccgcccgatccacttccgcggtgtgcagaccgttgttttaaaactctttcacattgtctgcccggacaatgcatatttcggacaaaaggatgcacagcagttggcagtcatcaagcgcatggtcaaggatctgagcgtggatatcaccattcacggctgcccgatcatccgcgagcaggatgggctggcaaagagttccagaaatacctatttaaatgaagaagaaagacaggcagccctgatcttatcaaagagtcttgcgcttggaaaacagatgattgcggagggcgaaaaggacgcggctaccatcaaaaaggcaatcgcagacaagatcgaaaccgaacctttggcaaagatcgattatgtcgatgtcgttgattttgctacgatcacgccgatcgatcagatcgcaggagagacactggttgccattgcggtctatatcggaaagactagactgatcgataattttattgttgaggcataagaaaggcaaaaaaatggaaatcacaatgttaaaaggaaagatccatcgtgctaccgtgacccaggcagaattgaattatgtggggagcattacggtcgataccgaacttttggaagcggcaggcattatggaatacgagtatgtgcagatcgtcgatgtggagaacggaaaccgttttgaaacctacacgattgcaggagaggcgggcagtggcatgatctgtctcaatggtgcagcagccagacaggtcatggtcggcgatcatgtcatcatcatgtcttatgcatccatgagcccggaggaggcaaaagaccacaagccgcatgttgtttttgtggatgatgcaaaccggatccagcggacctcccgctatgaaaaacatgggcttttgtccgataatctgtaacgggcggggcttttctttctcggacagatgcggtatagtaaagaaaaatatttgattaggtaggaaatggatatgttagagggaaagtgtattgtgcttggcgtgacggggagcattgcagcctataagatcgcaaatctggcaagtatgctgaaaaaacagcatgcggatgtggaagtcatcatgacaaagaatgcaacaaattttatcaatccgatcacatttgaaacgctgacaggaaataaatgtctggtagatacctttgaccgcaatttttccttttcggtggagcatattgcgatcgcaaaaaaagcagatctgtttcttgtggcaccggcatctgccaatgtcatcgccaaaatggcacatggtatcgcagatgatatgctgacaacaacgatcttggcatgcaaatgcccaaagatcatttccccggcgatgaacaccggtatgtttgaaaatcagatcgtacaggataacttaaagaccctgaaaaaatatggcatgcaggtgatcgagccggccagtggctaccttgcctgtggcgactccggtgccggaaagatgccggaaccggaagtgctcttgcagtatatcctgcgtgaggtcgcatacgaaaaagaccttgccggaaagcatcttttggtgacagcgggaccgaccagagaagccattgatccggtgcgttttatctccaatcattcgaccggcagaatgggctatgccatcgccaaaatggctatgctgcgcggggcggacgtgacattggtcagcggtccggtagcattggaaccgcctatgtttgtaaagacggtcacggtggaaagtgcacaggagatgtatgaagccgtgatggcagaggcggatgatgcggatatcatcatcaaatctgcggctgtggcagattatgcaccggctgaggtcagtcaggaaaagatcaaaaaagcagaaggcgacgctgtgatcccgcttgtccgtacaaaggatattttagcggcattaggcgaaaaaaagcgcgaagatcagtttatctgcggttttgccatggagacggagcatttgctggaaaatgcaaaagccaaacgggagaaaaagaaggtcgatatgatcgttgccaacagcatccgccagagcggtgccggattcggcggtgatacaaatgtagcaactttgatcacaggagagggcatgcgatccctgcccctgatgagcaaggaagcgctggctatggagattttggacgaagcagcccgaggtcttcatttacgatagcaaggatctctcttgtaaagtaggtgggaaagagccaccaggcagtcttggcagggatcccgtaggcagaaaagccgagttttttggcaatgcagagactgcggtaaagatgaaattcatttgagacaagggcgagatgtggatcgagcccttgtttttttatgatggcggaggaaaacaagagattttcctgcgtggtccgtgaccggtcctccataaaaatacggcttttggggatgccatgacagatcagatattgctgcatacaggcagcctcggaaatgccttcatcatcccccttgccgccggaaacaatgcatttgctgtccggattggcacgcagataggcgatggcggcatccatgcgttcttctagcataaggcttgcctttgtgccgtagaccttgcagcctaaaacaatgagcgtgcatgcctgccggggatgcgcctttatggcggataagatgcggcaggcattgataagaaacagaaggcaggtaagagcaagcagggcgagaaaaagggcgcagagcaggcgagaaaatccgggctgcgcgagcgccgcggtcatgccctgccggatctgccttggaaaaattccgtaaatcatcagcaggacggaaaagataagtccggtcacattgccgggatttaagattcttttggtaaaaaagggcatgagaaaccagatacaaaataggattcctataaaaaacaataaaacatgcatatgtcgtgatctccttttctgcaagcatcatatcatatttggattttaaacggaactttggaaaataaaatactacatgtaatgagacaataatggtacatgctatgtgctaccctaaggtcaacaaaaaagacaggttgatcgaaaagaggaggcagcacaatgaaaggatacacagtaggaagcggatttatgggatatgtagatggggaatacattttatttgcaagtgaggcggattactacgaatttatggaagaggcggcttagttgtggtataatacatcagttagattttatgagtggaacatggcagaagtgtcatgtttgcctagtgcaatagaaaaggagatgtatgtattatgagcaaaaaaatcgatccacaggtcatcaatgaaagactgcgtgctctgcgccgcctgatgcaggaaaaggggatcatggtctatgtcgttccgacttccgatgatcatatttccgagtatgtcggagaacactataagtgtcgtgcttatatcacaggtttcacaggatctgccggtacggcggtgatcactttagaggaagccggtgtatggacagacggacgttattttgtacaggcggctgcacaggtggcaggcagtgatgtgaccttataccgtataggagagccggaagtgccgaccgtcatggagtttgtagaggagcatctgaaagagggcgctacaatcggttttgacggtgcctgcatggcagcgggagaagccaaggagttgcgtgggatcgccgagaaaaagtccggcaagatcgccatggatgagaatctgatcgccgagatctgggagaatcgtcctgcccttccacaggagccggtctttgttttacgtcagcagtatgcaggggagtctacccaggataaattggcgcgtatccgtgcagaattaaagaaaaagggagcagacagccatctggtcggcagcctttatgatattgcatggatcaccaacttgcgtggcggtgatatttcgcatgtacctgtatttttgtctttcctctttttgacgggacaggatgctatcctgtatgccttctatgagaagtggccggaggaagtcagagattatctggcagaatgtggttttacactgcgtccgtatgatgcagtttatgatgagttttctcagcgcgtgcaggaagcaggaggaaaggttctcttaaatccgggaactatcaatgccaaacttatgagccttgtcagtcaggatcagatccttgagggacatgatccatcagaactgatgcgcgccatcaagaatgagacagaggttgcaaacacgatcgaggcccatatttatgatggtcttgccgtgactaagtttattcattatctcaagaccaatgtcggcagcgaaccaatgacagagatcagtgcgtctgattatctgcaggagcgcagagaggaacagccgggatttttggatctgagtttcgataccatcagtgcatatggtgccaatgctgccatgatgcattattcagcaacaccggaagatcatgcaacacttgcaccggaaggcatgctgcttgtggattccggcggacattatctggggggtacgaccgatattaccagaaccatcgtcttaggaccgatttccgatgagatcaaaaagatgtatacgctggtattaaagggacacctgcgtctggcacatgcaaagtttccaaagggcgtatccgggaccaatctggatgcgatcgccagaggaccgctctgggatttgggcttagattaccgttgtggaaccggacatggcgtaggccatatcttaaatgtgcatgaaggaccaaatgcattccgttggcgcacgactgatatgttcccatcccaggagttgatcccgggcatgatcacaacggatgagccgggcttctatgaagaaggcggttatggtatccgcatcgagaacgaacttctttgtgtcgaggcagaaaagacagagtatggtcagtattatcagttccagaacctgacctttgccccgatcgatctggatgcagtactgccggacatgatgacagacaaagagagagactggctcaatacttatcacagacaggtctatgataccctgagtccatatttagatgacaaggaaaaggaatggctacagtatgaaacaagagcaatctaataagttattactcatagatggacacagcattttaaaccgtgctttttttggactgccggatctgaccaatgcagcaggacagcataccaatgcggtctatggatttttaaatatcatgttcaagatcatggacacggaaaagccgtcctatctgaccgtagcctttgatgagcatgcaccgacttttcgtcacaagatgtttgcagaatacaagggcacgagaaagcctatggcagatgaactgcgtcaacaggttcctatgatgaagcagatgcttaccgcaatggggatcacggtgatctccaaagagggactggaagcggacgaccttctgggtactatggcgcgccttgctgaagatcagggcatggaagtcacgatcgtctccggcgacagggatcttctgcaactggcaacagaccataccaagatcagtattccaaagaccaaaaagacgggtacggagattgagaattattatgcagccgatgtggcagagcgttatctggtgacaccgacggagtttatcgatgtcaaggctttgatgggagatactgcggataacatccctggcgtaccggggatcggtgaaaagacggcgacagccatcatttcccagtatcattcgatcgaggcagcacatgaggcagcagatcagttacgcccgccgcgtgccgccaagaatatcgtggagttttacgatcaggcggtcatgtcaaaggaattggcgaccattgaggtgcacgcggacatcacctatgatttgcaagcggcaagacttacggatatctttaccccggaggcatatgcgctgtgcaaggaatgggagttcaagaatcttttaggcagatttcagatccaggcaccgaggaatgtagcggaagatgccttctcacaggcagaggatacacagagcctgactgcttttgcagaggaattggcgaaggggcaggcatcttatattggtctgtatctggcatggagacagcgcagtgccaaggagtgggaggatgcgtcacttgccaaggacggcgatgggcagttatccctctttacaagtcagaaaatatcggaagatgtctgtcaggaatacgagatttacggtatagcactttcagatggagaaaagagtctgtgggcaccgatggatgatatttcctgcttaacgcaggtcttagagcatctgatagcacagggaaagcgtctggcatgtatgaatgtcaaggaagccataaagatctgtacaccgcatttgcaggagcggtttttacattatgagaatgtctatgatgtggcagtggcagagtatctgttgcagccgctcaagaatacctatgtagcagaagatctggcgagcgaatatctgggtatcagtgtgccgggctatggggagacctttggcaagagaagtctggcgcaggcattggaagaaatgccaaaggaattttgctcctatgcctgctatgaggcatatatctgcagccgtgtggctggtatgcagtgggaaagcctgaaagaaaagcagatggatgatctgtatcgggatgtcgaactgccgctgatctttacactggcagatatggaactggaaggcattgcgatcgatgctaaagccttggaagaatatggcggacgcctgatgggacgtctggtggaattagagcaaaagatctatgacgaagccggagaagagttcaacatcaattcgccaaagcagttgggacttatcctttttgaaaagatggggatgccggggggcaagaagacaaagaccggctattctacggcggcagatgtcttagaaaatctggcaccggactatccgatcgtggcagacattttagaataccgccaactggcaaaactgaaatcgacttatgcagaaggactttcaaattgtattgcgccggacggacggatccattcttccttccagcagaccgttacggcaaccggccgtatcagcagtacggagccaaatttacagaatataccgatccgcatggaactaggcaagttgatccgcaaggtctttcatccaaaggatggttttgtctttgtggatgcagattattcccagatcgaactgcgtgtcttatcccatatgtcaggggatcagaacctgatccatgcctttttgcagggacaggatatccataggtctacagcgtcactggtattccacacagcctttgaggatgtcacagaattacaaagacgcaatgccaaggcggtcaactttggtatcgtctatgggatcagtgcctttggactgagccgggatctcggtatcagcaagaaagaggctggcaagtatatcgatgattattttctggcttatccgcgcatgaaagaatttttggatgggctggtagcagagggcaaggaagcaggagaggtcaagaccatgtatgggcgtatccggccgattccggaactttcatccagcaattttatgcagcgccagtttggtgaacgtattgcgatgaactctccgatccagggaactgcggcggatatcatcaagatcgccatggtgcatgtgcatgaccgtttacaaaaagaaggcttggcatccagacttcttttgcaggtgcatgatgaacttttgatcgaggcaaaagaggaagagttgccggtggtaaaaaagatcctgcaggaagagatggaaggtgctgcaaaactggcagtgccgttgacgatcgatatgcataccggctatacatggtatgatgcaaaataactttgttttgcctgtagaaaatgatacaatggagtagattatgaagtttatagggatcaccggaggtgtcggtgccggaaagtcgacggtactggcgtatttgaaggaaaattacaaatgtcacattgctttagcagatgatctggcaaagtcattgatggagccagggagcatctgctatggtgcgctggtagacctgctaagtccttatcaggtctttgatggagccggacggatagaaaaagagagcatggcgcgcctgcttttttcaaaagaagaggtgcgcgcccaggtcaatgccattgtccatcctgcggtcaaggaatgtgtattggcacaggtcaaagaggcgagaaatcaaggcaggttggactattttttcttcgaggcagcgcttcttttagaggatcattacgaggaagtctgtgatgaattgtggtatatctatgcttcagaggacgagcggaggatgcgtctgaaacgtgacagaggttacacggacgaaaagatagatcagatcttcgccagccagatgccggagaaagcctttcggcaggcatgtgcccatgtgatcgacagcagtggaagtatggaagggacgcaggcacaggtacggcagatcttaggataggaaagtgatagaggagagcagatttatgaatgaaaagaatccattggaagatatcatttttggactggatatcggaacgcgaaatgtcgtcggaacggtgggctatcaggcggacgacggctttcatgtgatcgcccagtgtgtgagggaacaccagacaagatccatgttggacggacagatccatgacatcgggcgcgtgggagataccatccgtgaggtcaaggaggtcttggaagaagcgatcgggacaagcctgacacaggtatgtatcgcggcggctggtcgtgtcctgcgtacggtgacaacacaggtgacctacgaatatccggaagaaacggttgttacgggcgaagacttacataccttggatctgatggggatcgatcaggcgcagcaggaactgcttgctgagggcgataacagatacaaattctattgtgtcggttattctgtcatgaaatattatctgaatgatgaattgttctccagtctggaagggcataaggcaaacaagatcgacgagatcatcattgtgactttcctgccggaagatgttgtagatggattgtattctgcggtagagcgtgcaggactacaggtggcaaaccttaccctcgagcctattgctgctatcaatgtggcaatcccagagaattttaggatgttaaatatcgcactggtggatgtgggcgccggtacttccgatatctgtatcaccagagacggaagcatcatcgcctatggcatgatcccgtttgcgggtgatgagttgacggaagtgatcgtacaggcatatctggtcgactttgctaccgcagagcagatcaagttggattccagtactttagacgaagtgacctatgaggacatcatggggatctcccatactgtatctgcagaggaagtatggaaactgactgaggtcgtgcgtgagaaaatgacgacagaagtagcaaacaagatccgcgaactgaatggcgataagtctgttagtgcggcatttatcgttggtggtggtggcaagatccacggctatacagagtcccttgccaagaaactggatatcgtaccggagcgtgttgccctccgtggcgaggaagtcatgaagaatatcatttttgagcaggaaggcatcaaaaaggatccgctgcttgtgacaccgatcggtatctgcctcaactattatgagcagaaaaacaactttatcatgatccatttcaacggagaaatgatgaagttatatgataatggtcatttgacagtcgtagatgccgctatgcaggcaggatttacgacagaggaactattcccgcgccgtggccgtgaaatccattttacggtcaatggaacgcctcgtatggtgcgtggcggcgagggcgagtctgctgtggtcaagatgaatgatgtgactgtcggtatgaatacgccgcttgagtttaactgttttattaccatagagccgtcaacggcaggagaggaagcagtctgcacgatcgaggaattggacgagtatgccggcaataccatggcatttgaagtctgtggcaaacatgtgatgtgtccgaagttcatggaggtcaatggttcattagagccgggctcttatgagatccaggagggcgatgtgatcgagacccgtagtttttataccgtaggtcagttggcagagtttatggatgtggagatcgacccggatcgtgagatcctggtcaacaaccgaccggctacgctggagtctttgatctatgagaatttctcgatcgactggacggtacttgcttttggtgcagcgccggtacaggtaaaggagacagggagccaggcgagcaatatcttagatcagttaaaacatgccagcaaatacggctttggttctgaggcacaggcagatggcggcacgcaggcagaagcccctgacgaggcaaagcaggcgggcgcaggtgcatccggcggagatagtccggcaaaggaaaccgccgcagaggaaaaagcacctgaagaagccgggctgcatgtaacagtcaaccatgaaccggtatatttgagtggcaagagcagttatatttttgtagacatcttcaatgtgatcgattttgatgtgcacgcgggtggcggcagaccgatcgtaacgacgatcaatggcgcgccgtgcggatattcagacgaacttcacgagggggatgatatcttagtttattggaaagagtcataagatggatttttttagtgtagccagtggcagcagtggcaactgcatctgtctgggaagcgatcagtgccacgtgatgatagatgccgggatcagcggcaagcgtattgaggagggaatgaatacatatgattacaccacatcggatatggatggggtgctgatcacacatgaacatagtgaccatatacagggcttgggcgtgatcgcgcgcaaatacggactgccgatctatgcgacaaaggggacggcagatgccatcctgcaatcatcatcggttggaaagatcgatccgtctttatttcatgtgatcgaggcgggcaagacctttttcattggaaatctggagatctatcctatgtcgatctcacacgatgcagcagatccggtcgcctatcttgtctcagatggcagacatcgtgtgggcgttgtgacagatctgggctattatgatgctgatattgtctcacatatggagggcttggatgccctgctgcttgaggcaaatcatgatatccatatgttgcaggtgggggcttatccctatcctttaaagcagcgcatcctgggtgaacggggacatctgtccaatgagaccagcggacagttattgggacagatccttcacgatggcatgcagcatattttattgggacatctgtccaaagaaaataattatgatggactggcatatgagactgtccgcttagagatctccttaggggataatccgtaccggggcaatgatttccctatcgaggtggcaaagagggacagaccatccagtctgatccggctttagataaagacagattttatttggcagaaactgaaattggtgttatagtttatacaactataatcatagatcaaaaataaaaggagaattgacatggagaaaaacacacagaaaacaattatcacagtagtaggcaaagataccgtaggcattattgcaggaatctgcacatacttggcagagaatggcatcaacgtactggatatttcacagaccatcgtacaggattattttaatatgatgatgatcgtggattttgctgcatgtcaaaaaccttttgcagagtgccaggcagatctgcgtgaattgggagaaaagattggcgttgatgtaaaatgccagcgtgaagagatttttgaaaaaatgcatagaatctaaaggagagtatcatgattaattttggtgaagtcaacgagacaaacaaaatggtagaacaggaaaatctggatgtgcgtacgattaccattggtatcagccttttagattgtatggattcggatctggatcagttaaataccaacatctacaataagatcacgaccgtagcaaaggatctggtcaaagtcggtaaggagatcgagaacgattattgcattccgatcgtaaacaagcgtatttccgttaccccgatcgcactggttggttccgcagcatgtaagagcccggaagattatgtgacgatcgcaaagaccttggatcgcgcggcaaagaccgtgggcgtgaactttatcggtggctattccgcactggtatccaaggggatgacgcctgcagaggaaaatatgatccgttctattccacaggcattggcatgcacagatttcgtgtgtagttccgtgaatgtgggatctactaagaccggtatcaatatggatgctgtccgtctgatgggacagatggtaaaag

SEQ ID NO: 12457 - DNA, 1788 bp, Unknown
  gut microbiota DNA sequence
cctatgatgtttttgttgataaaatggctttattaaggtattatagatgataggttattaggataaagaacggggactacatatgaatttagaacttattcaggaaaaatgggatgatattttacagagtttcaaagaagaacactctatttctgatatttccttcaaatcctggttattaccactggagccaacatctattgaagatgatacactaatcgttgtctttgatccaaaagatgatcaggaatccgatcctgaccagatggcaatcaattatatcaccaagaagtacgcaaagtttcttgccatcatgatcagtgaagtatgtggctttactaaggaagtaaaattgcgttttgccttaccgggcgaattcagcacaccggctatcaatgagacttttattccaaagtcagccaactatgcaacttctaatttaaatgcaaaatacacttttgatactttcgtcgtaggtggcaacaacaaatttgccagacaggcatctctcgctgttgcagaatctccgggcgaagcatacaacccactttatatctatggtggaccgggacttggaaaaacacaccttttacattccatcggcaatttcattatcaatgaaaatcctgataaaaaggtactttatgtgacttccgaacaattcttaaatgaagtcatcgaaggcattcgtggatccaattcttccaatgccatcacaaagaccagagaaaaatatcgttcggttgacatccttctgatcgatgacatccagattttaataggtaaggaaagcacgcagcaagaatttttcaatactttcaataccctttatttggctggaaagcagatcgttatcacttccgataagccgccaaaagagatggagactttggaagaaagaatccgctcccgttttgaaagcggactcatggctgatatcggcaatcctgattatgagaccagaatggcgatcttgcgcaaaaaagtcgaatctgaaaagatcaatctgagtgatgatatcttggattacattgctgagaatatcaagtccaacatccgtgaactggaaggggcactcaacaaactcattgcctacgccaatctggaaaagagcgagatcaccatggatattgccatgcgtgaacttcagaatatcatttatccggacaagcctagagaagttacaccgcagctcatcattgaagttgtttctgaacattataatattcctatggaaaagatgctttccaaggatcgcagtaaatccgtttccagaccgcgtcagattgccatgttcttatgcaataccatgacagatgctaccttagaaggtatcggtcagttactcaacggaagagatcactctactatcctacacggacgtaatgtgattgaagaagaatataataatgatgaagaatttcgtaaacagatcgacaccatcaaaaagaagatcaatccaaattagatgagattgtgtataagttgttgatttctatgtttaaatatatgggataagttgtgaatttatgtttacagcctgaggataaaggtaaaacaccttaagaggttgtcccttttatctacaaaacatcctctgtgtttcctcagcctttcaacagtactttttgatttaacttttaggacaagtccagaaaccatcagcgtttcacgacttatacacttttgcacaccctataataatattactattaatttctattatatttatctatgttaaactgaaaggagttttaccgattatgaagatcacctgtcaaaaagcag

SEQ ID NO: 12458 - DNA, 21179 bp, Unknown
  gut microbiota DNA sequence
ctagatatgatttcaaattttgacaaagaaaactaaaagatagagaggagaactgacatggaatttttagagaaattggatgcagagacattaaaggaagagttgctatcatttttggaagatggagaggaaattgttgaactaacatccttgggcgaatttgaagaacagtttgtagaatacattaaagaagatttatccagaagtgatggataaactaaaagatggaggtacagagatggatagattgaccattaggaacggagaaggagtggcatatttcaaaggagaaaaactacggctaaagccttatgaaatggaatcacaccaagtagaggaagcccttagaaaacttgcagaatacgaggacttagaggagcagggtagagttatcaaattgccttgcaaggtgggagataaaatttttcttgattttgcaggatttggaaaagatatagacgaatttacagttaaagactttcatttggattgttttgaagatggagaagttatactgttttgcaattatgaatcaaatgataaaactttatctggtcaaattgatgtaatggaatttggaaagtcggtatttcttaccagagcggaagccgaagccaagctggcagaaatggaggatagccatgacggagaatgaagcaaaagcatttttgaaaattgaaaaacagtgcataaatcgtaattgtgaccgaaattgcgcgaaatgtgatattgtgcagaaggtagaagatttgaacagtgcttatgatacagcaatcaaggcactggaagaggtgcaacagtaccgtgcaatcggcacaccggaagaatgccgggcggctatggaaaagcagaacagtgccaacaaggaattggaaagccacgatgaaaaacgcattcttgaatgctgtatcagccttatgcaggaaatggttaatgaatttgcaaaatggtacagatggcaacatggagaggatgcaatcgagaaacttgacgaggaagagagattttgctttaaaaagtcatacttccgcattgtacaagaattgttccttttgtgtacgcaccattccggcggtacatctaccagagcgaagtgcgagcagttaggggtagacagttcggaagaaattgaatttgattggagtgatgaagaatgagtgaagaacttaaaccatgcccgttctgtggttgccatgatcgcagagtaggcgcgagaaagatgggaagcaagggttacaagattatatgtggtaaatgcggaagtgctggtccatatgtaaaaatcgaagattttgataacaagatggacgcacaggaaaatgcaagggaagtatggaacaggagggcgaacgatgggaagattgattgatgcggataaaataaaaacggctttagaagaagcaatttcaaagaacgaagacatggattgcttagatttcttgcgcatttcctctgttattgatgcgcatccgaccgcctatgacccagacaaggttgtgaagcagttggaagaactgacagacgagatggaacagtttaattgcactgggatgttatcggacataatagaggttgtaaaggcaggtggagtaaatggataaatgttgtggaacgtgtgcataccatcagtacgacaaggaaacagatgactgggtatgctgcaatgcggaaagcgagaatgtggcagactggacggattttaacgatagttgcatggactgggaaggaaaagaggacgtagactaattggttacttttgatgctgaaaggaggagtgtcttttggaagaaaacgaagtgtatatcatatgtcagagagttgatccgttcatagcgtcggaattgaccgagtctattatgacaggaatatcatacgatatgctggaagcccatcatggcatcctcccgatcagcaggactaacttctatcgtagaaaaagagtcgcctgtcgaattatagagcagagacttggacggatcgaggaagaaaagaatggtcagtatgtgatgaaatggggataagcaccttgtgtgggtgcttattttcaactccaaatttggtacaaatacatcttccacataccttaaaatataactataggagaacgctatggaagttgtgaatatcaatctatcaaatataaaaccatatcagaggaacccaagaaacaatgcaaaggcggtggaaaaggtagcagagtccatacgtcaatttggtttccagcagccgcttgtattagacagggacaatgtgattgtatgcggtcataccaggtatgcagccgcaaagaaactgaaattgaagtctgtgccatgtgtgctggctacatcgctaacagaggagcagatccgcgcgtatcgactggctgataataaagtggcggaagcctctgaatgggatttttctcttttggcagaggagttagataatattttagatattgatatgtcagacttcggttttgaggtcccggatttccttgacgatatggaggatactgatagggacgatacgtcatattacgaagatgagcgcgaaagaacctttgaagcatacaatctctatgatgtcgatcagcggcggctgacggataagtggcagatgccgatcatcaaaaagtgcgatcatatcccggaggatctgctgggctttaattatgctaagacatctaaggattttcaaaagggcatacatttttacatcgacgattaccaatttgagaggatatggagtgcgccacatgattacatggacattttaaagcagtttgattgtgtcttgactccggactttagtctctatacagaaatgccgctgccaatgcagatgtggaatgtatataggagcaagatggttggtcagatcatgcaggattatggaattaccgtaattccgacgctccagtggtgcaaggaaaatacctatccatttgcttttgatggcatagagcgtggcggaacggtatccgtttcaacgattggagtaaagcaggacgatgatgcaagagacatttgggttgccggaatggatgaagcaatccggcaattagagccaaagaacatcatcgtatatggtggtgatattggttatgattttggcaatatccatgttgtgtatataaataatcataatacagaaagactaagtgaggcataagcggataaggagaggaaagtgggaggacgaggagcaagcggagatcttcacgatggaccaagtggaggtggaaaaaatccagagaaaaagtacggacaacctggcacgccacaggtgccgccgacggcatctatcagaggacaggtaggcgaaaagggtaagccggtgcaggctgatgttgcaatcaagaaggtaaatcctaatatcaatagcgaatatgctgattatagtgaaaactgtcagaggtgtgttgttgcttatgagttaaatcgaagaggatataaggtagaggctgagagtacatataagagtgatccatacccaaaagggaataattggacgaaagcctttaaaaatgctaagttagagtcagtaggagcagggacaacggcaaaggttaatgagaagatcacccagaagatgaaaggctggggtgagggatctcgtggtattgtaagagtgaactacaataagacatctggtcatgtgtttaatgtggagtaccgtaatggcaaattgcattactatgatgctcaggttggtatccggtacgatcctaagaaggtatttaaccatgttgttaaaagtaatgtgcagattatgagatctgacaacttggctcttaacggagatgtaacgaaaatggtacgaaagcgtagaaagtaaaacggaggtattgacatgagaaaagatattgtgacggttgaggatgcaattaagagggcaaaggaaatagatccgcagtgtaattgctatcaggaataccaggatgcatatttcttctttgataatacagcaggggaaaccattggcggagaagcctgtggcttcgttattatgaagaaaggcggacagaagaaaatgccatatgaatactttatgaatccatcaagcaaggtaaaggaaattggtggagagattgagatcaagggatgatgtttaatgggaggcagaggagcaagcagtggtataagtgataagggtaaaccatatggcagtcagtatcagacagtattaagggatggaaacattacatttgtaaaagccaagacggaccatccagaaagtctatttgagacacggacaagaggtcgggtatatgtcacagtcggtggaaatgatattttaagaattacatactatgacactgagaacaaaagaacgaagcagatagatttagatcatagtcatgcaaagatgaagccacatgtgcatcatgggtattatcacaaggaaaatgatgggaagaaaggcgcaacaaatctttccacaaaagaggaggctatggtggaaagagtaaaaaagatatggtataattaccttaagcataagtagtatagcctgtgagtacgccttgatggaggaggctccggttgaaatccggacatttgcttaagagataccatatccttattaggatgcggtatctttttttattgcagaaaggatgtgaagatgtgtggcaaatgagcagaacttaagaccgtgcgaatataagtttacccaagaggactccaagaagggagccaagagatcagcagaagtccgcagagccaagaaaacaatgtctcaacttgccacaatgatgctgaatgcagagatcaatggaaatacaaaagagcagataaagaacatgtgcagcggcatggcggatgaggatgtgacagtggcggcggctatgatggcaggacagatcaagtcggcaatgcgtggcgatagtcgggcttttaatgctgtgactacacttgtagaaaagcaggaggaaaaagacgaaagagaattagagaaagaggaacgtgccaagagcgcaaaatggacgatcccgatcacagacatcacatctgactttgtggatatttaccgcacagtgcatgaaacgtttgaaggtgaaatagatgtccatgaaatcatatctaaggggggacgaggatctatcaagtcgaacttttggagcaatttggcatatgagacaatcagacaggacaatcaagcacatgtggtatataccagacgctacaagacggatctacggagttccgtctataaccagtttatgaaaacagtgattcgatatgatgatctggagaattggaagtttagaaaatctccgatgtgtgccatttatcagccgacaggacagatggttatgtttgtgggtgcggacaagccaatctccctaaaatctttcaatgttccttttggctatgtgaaaatgctgatacatgaggaatgcgacgagatggcaggagtggagcagatggataatatcgaagatacattcctacgatccgacacaccggcactggatattaagatattcaacccgccgaagtcaaaaaacaacttcatgaaccagtatgtggaagaatgtaagaccaagccgcataccaggatatgccacagttattactacaatgttccggtcaagtggctgggtgaacgattttttgagcgtgcggaggattttaaagtcagaaagcctctgttttataggaataactatcttggagaggttaccggaacaggtggaggtatttttgacaatgtggaagaaaggaccatatcagatatagagatagccaatatgccattttactattatggtctggactttggctttgtgcatccgcagacctttgaggtttcatattatgatgatgagacagacacattgtactgtgttgatgagaggttctccaagaagtgcaagaatagtacctttgccagaaagataaagaaatttatgccgtttgagattattgccgattctgcaaaacccgactccatagcagagatgcaggaatggggctttcatgtgatcggcgcaaagaaacgttggggatctggcaagggcagagattattgctgggagtggctgcaacagactaccaagattgtagtagatccagaacgatgcccgcaccttgcgcatgaattgaatactctggagcatgagcagttggcggatgggtctttttcggatgcatatccgacactcggcgaggactgtgtgatggcattgatctatgggcttaaccgtgtgattatggagagccgtcgcaacaatggactttatgatgatgaggtagacgatgaggaagagtatgacgattacgaggatgatatttaggtaggtggtggaagatgaatatatttgcaagggtaaaggagtttttcatgaatttatttaagacagatgtaaaaagtgaatttgatgtcaatattatctcgtccgaacttgtcgagattgcacaggatcaatggcagaatatcatccaagggcgacctttttgggtaggagaacatatccgtaccatcaacttcgcaaagttcctgtgttattacacggcaaagaagaccacgattgatctaaaggtggatatccatggaagcgagcgggcagattatatcaatcagtgcatacaggcaatggttgacaagtcgctgcgtgataaggtggaagatgcctgtggtctgggtggaattatctttaagccgacaggcacatacaatccggcaggagcgattgattatatattgcctggtaattacatcatcacggaaaagaacagcaatggcgatatccgcggtattatctttatcagccgtttgattaaaggcgacgattattatacgcggttagaataccatcattttattgccagtggatcagaggaagagccagagacattatatgcgatggaaaacaaggcatataagtcgaacagaaaggatgcgctgggaagaaaaatcaaattagatgatgtcccagaatgggcaaatatcgaagaaaactatgtgatcgaaaatgtgcaggagcctttgtttggctatttcaaaatgccatataataacacgatcgattacacatcacccgagggggtgtccatgtttgctaactgtatcgaggagttaaaggatctggatgtggcatggacgagaaaaggcgatgaggggtatgactcgcagcacatgacctttatagatgataatgcgctgatgcgaacagatccgaaaacaggtgttaaaaaccgtataggattgccacgtttcgttaagggattgaagaacggaatagatgctcaaaacactgtgcaggagcatgtacctactatgctcacggatgaacgtattaaggacatcaattctatcttatccatgatttcgaccaaggcgggcttttcacaggggcaatttattctggatcgcaagaccggaaatattacggcaacacagattgagagcgatgacagtgagacggtagagaccatcaatgatattcggaaaaatctgcaagaggcgatcaagagtctgatctatgcactggatgtatattgcgatgtattctttgatatgccgaatgggtatgtcaatgttctggatgatgatgtaccgggtgagaatgtattttatttcaaagatctgctggcatcctttgagcaggatcgcaccagagcatatcaactgatgttgcaaggtgtctatagcaagcggaggtatctcaaagagtatgaaggattgagtgatgaagagatagacgatatgttcgctgagtgtgatgctgaaagggcggcacaggaaggcttatttgctgaggagtagagatgaagcgaaataaggtagttggcgcggtacatataacactagataccgatagactggataagaacctacggaacgcgcaaaagaaactggatatgcaggtcttgaatgataccaacgagtatgtgccaatggacgtaggagcattgcgggagagtgcatactatcccaaaggtcttggcggtggtgtcgttgcgtggaataccccctatgcacattatcagtatatgggcgagttgtatctggcagaaaacggaagttcatgggcaaagaagtatgagacgaaatatccagccgggcgaccgcttcattatggctatcctggtacgggagatcattgttttgagacagccaaggagacacataaggaagaatggaccaacattgttaggagagaggtgggaaaaggatagatgcttacaccggattacttttatgggaaatcagataagttaatagagatgtatcaggatctggaggattggatcataagggatattgctgcacgtctgatgaagtccggggaagtatcgggtacgacagatcgtgaactgtggaaactgcaacagatgggcttgcataacacagagatcgtcaagcgcatttcccagatcaccggaaagagcaggagtgaagtcagacgcttgttgcaggatagcgcgatgacttcattttctgatgataagaaagttttgcagaggttaggagacgtacaggcatcactacaaaataatgcggttattttggcgatggatgcagagttgcaaaagacctatggagaacttgacaatcttactcggacaactatgttgcagtcgcagaaagatctgctggatttattgaatgaggtggactttcgtgtggcatccggtgtgcagtcctataacagtgccgtctgtgaggtcttggatagatatgccaagcgaggtgtgatgattgattatccgacaggagccaagagatcattggaagcagcggtaagatgttgtatcgttacttccatgaaccagacggcggcagcagtgaccaataagtatattgcagataatcatatagggtatgttattgtttcggcgcatatgggagcgagacataatgataaacatccagaaggtgtggagtctcacgacttctggcagggaaaagtatataggatcgttgggagtgatccggatgctcccaacctattagtatctaccggatatgatatagatgtgacaaccggaaaaggcagagtggtagatctggagggcttgcatggatataactgccgacattcacatagaccatgggataagtccttgcgcaatccatatatagacgaaagtggaaatcccaaatttgatgtgcatgaaagtcaatcggtatatgaaaatcaacagaagcagaggatcatggaacgagccatccgacagaccaagagagaacttctagccaagcaactggagttggatggtatagcggagacagatgtccgagaaatcttgcagccacaatatgatcgcattgcataccgattaagaaatcaaaaccagagatacaggcaattttgcaaggataatggcttgtcaaccaaggctgaccggctcaaggtggcaggctttaaaagagaacagtcagcaaaggcaaatggtcgggctacggcttatcagaaccagaaaaaacgtaaggaaggggcataatgctccttcttttattttggtacaaatcatgtaaaaaaccatgctagaattatagtaacaaaagaaaagcaccgggcagaaatagggatctgttcgctaacctagaacgattataggacacaaatggcgcgtccagttctgggcgtgctttttttgttactgccagttatggatcaaataacaactctatcgtgccgggctgaccggatcaaaaacttttaagaaagagaggaacagaggatgaacattattgacaagttgaagtcactcggagtggaagtgacagaagaaatcgaaaaggcatttccgggggagtttgtatctgccttggaggtggagaaaaagacagagaagatcaatactctggaacaggacaaagaaactcttattaaggagcaggcaaatctggaaaaggagttgcaaaccttgaaagacaatgctccggatgcggacgcactcaataccaagatcaacgagttgaccgagaccttggaaaaggagcgtaaggaacgtgctgaaaaggatgaaaaggacaggctgggagggctggtcgctgacttctttaaggacaagcactttgtgaatgagatcactgccaatgctattaaggagcagttggttagtaagttaaattcagacgaagccagaggtaagagtatttcagatctgtttgatggacttgtcaaaggagaggacggcaaatataagccggacatcctcattgatgataaggactatgaggcacagcagaggaaacgtgctgcacttcgtggtgccaatatcgaccagccgggagggacaaaactttccatggctgaacttatgaaactgaaaaaccagaatccggatatggatattacgccatatctgaaatgaaaggagaactaacagatggcattatttgatttagttaattttaacggagaggtctttgatgcagcggtgtgtaatacacctaatttaagactgaatgaactcttgaaatccggagcgatcgtggaacattctgaatatgcggcaatgcttccggatcagatgggtggaaactatgtgattacaccaatcaaggagagattgggaggcacaacctctaattatgatggtaacacggacatcggatcaaccagccgtggaaattacacaatgggacgtattgttgtaggacgtgcacagggatggacagagaaagattttaattctgatatttccggggatgactattccgctggtgcaggcgaagttgcagaattttgggatgatgtggatcaggacaccatcctttctgtaatgaaaggtgtgtttggtatgagcaagggcgaaggcaagaagtttgtggaagaacacacctacgatgttacaggagatgcaaatggaaactttgatgctacaacccttaacaacggcatgcagaaggctcttggcgataagaaagccaaattttccatggcgatcatgcattctatggttgctacacatttggagaacttgcagttgttagagtacatgaagtacacagatgcacagggaattgagagaccgatggcacttgcaacattaaatggtcgtcttgtgcttgttgatgatactatgccagccgagcaggtggatgcagtgtatgcaaagtctacagacacacaggttgtggaaggtaagacatattatacaaagagccacacggtagtagcatcgccaacaggcaatccatcagaatctgattattatgaactcgtttccgaagcatacacagagtacacaacttatgtgtttggtcagggtgctatcgagtacacaaactgtggaactaagacaccttctgagatggatcgagatccgaagaaaaatggtggagagtcaactctttactccagacagcgtaaggtgtttgcgccatatggtatttcctttaagaataccggtatcatttcaccgactgccgagcagttggaagatggaaacaactgggagattgcatggaacaacagttccagcgattccagatacttcccgcttaaggcgatcaacattgcacgtattaagaccagaggctaagagaaagagaggatttcaagatgggatatacagagtataagttctatacagacaaatactatggggattctattgcggaatcctcttttcctaaatggaatgatcgcgcatcagagaagttagacagtctgacctatggcaacatcacggaagagacgcttgcactatacgatcagcagatccagaaagccacgtgtgcgctggcggatctgctttatgaaatcgactataagaccaaacacctgaaagacgaacagggtggaaatgtaaccgctatgtcctctggtggtcggtctgttagttttggaagtacggagactgtgatcgacaaggtgctcaatgataaggtggcacagagccgattgtgctatgacaccatctgtgagcatttgtccggtatcgggcttttatattcgggggtgtgaggatgttttgggataacaagacagtgaccctgtttaatcgattctatgatggcacgaaagaatgctggtatccaacgctcctaagcggtgttgatcttgttgtgacaaagggcatcaatgtaagccaaggcaataaggcggatgcagatacagccaagttgtatgtggatgacgctgtattacaaaagcggtatcttgcgcctttagtatatgccaggcaggagcacccagaggagtatatgacctttacagagggaaaggatttctttgtggatggtgatgcgacatcacaggatacagataaggcaaacttctttgagtatatgcgcaagcagtacgacaacatctttaaggtggcaagtgtggctaggtacgaggatgtgctgccccattttgaagtaggaggtaaatagtgagcgaggaaaggataccgttagataccatagatgcggaaaatgcctatgcaggcatcctatccatggtgcaggcatatccgggatatggtgatctggttgatccgtcacaggaagatgccgtgacatggaatggaatagcagagcagaccggtatagggatttttcatttgcagggggcatattacatcaagagatatgttgatggctcatatgtggcgcagatgccactacagatagcattcaagagtgctccgacatcaaatcggggaagtattgagtgtcagaatatgctggatgatctggcaaagtggatggagcaacattattttatgatgcaggatgaacatttcacatttgaggcgatcaagcggacaagcccggttataggatatagccgggatatgcagaacacagcatatgcaataaatatgcaattcaaattcagttacaggaggtagaaaaatggatagaacaaatatggtttcacttttagacatcggaccattattagggctttcggagtcgaagatcgtggaattaggtactggttattcagagatcacagaggattggggacctgacacagggcagaaacattatgtcaatatgaaaaattccagcaattccgtaaagggatatgctttcagcatgtcaccggagcgagatttcttgtcagacgaagtgcaggaggctacaaaccacctgttgaaaacattcccgacaggaaccgactgcgaaacattctattacagatttttcaagtcggatcttaccggaaagagcggagattgtatcaaggttccggtaactgtgtgtccgtcatccgttggtggtgcaggcggtgacgatctgacggcaacgattcagatcaatggaaatggtgacgtacaacttggaacgatcaccattggcgaaacatttacctgggcagaaaaggtagaagccgccagtgtgaacacacagaaatcaaaataggtgttaatggataattagcataatagggcgggttcctttcagtcctgccctatttctgaaaggatggtaattatggaagaaatcagattagacagtggggttaagaaaatcgcaattaaagatgaggatgatgaagtgattgcagtgctgcggatcaatgtagcggatgctgaggtgatcgagaagtttgcaaaggtcattgatgacctaaataacatctcagccagatgtgatgcggaagcaaaaaagatgcatccggcagaaaaagaggtagcggagtcagatgatgtcatggcacagatcccaaaggctgtagaaatcaaccagatccgcgtgaaatacatcaaggagatcatggatactttggatagcctgtttggtcaagacacaatgcattccatctatggggatacggtgccggatgagatggcactggttgattttattgagggtattgtgccagtgatgaataagttgtttggcaagagactggagttgagcagaaagaagtacaacacccgccgtagaggagccagacgatgataaacgtcatgctagatccactgcctagtgagtggaatgggtatgaagtgaatacagactttcgtgtgggtatgcaggtatatatcttagagtatgatccagacctgagcaaggcggaaaaatcctacttgatcgagtgcctgctctttgaggatgaacaaggagaactcagagagaccccgcaaggggatgaccttcaggaatgtatcatatggttcttaaatggctggtttcatgaccgggaggaaaaatccaagacaacgcgtcgcttggtcgattatgatatcgaccagtggcgcatttatgcagacttcctgcaagtctatcatattgatctgtctacgattgagatgcattggtggatgttcaatgggcttttgtggaatatgccgtataagatgtcgtcctttatgcaggtgatcgagattcggcagaagaaaatagatgccaatatgtcaaagacggaaaaggatgccatccaaaacgcgaaacgtatctatgatctggatcagcaagtggaaagagaatatacagaggaagaaaaagccaagattgatgcatacgatcagatgatggcggagatgcgaaagcaaaaggatgaggaagaagaagttttgaaagaatttaggaggtaagagatatgtctggctatgatggagaggttcggattttaaccagaattgacaataaagaagtgaatagtcagatgatgcagttggaaaaccgtatggaaaagactgcccggaaagcacaggatctggaagcagagatgcgcaagatggagcaggcaaaggtaccgacggaggagtttaaagatgtctctgacgcattgcataagtcaaacacagaatttgataaattattggcacgtcaggaaagcatgattgcaaaagggcaaacatcaggtacgacctgggatagtattcagagaaaactggaagatgctggtgcagatattatggcatcagagaagtatttgagccagatggtgcaggaaggtactgcctatcagaatatgaatgagacagataagtacaagaagtatgcagatcaactccgggattgcaacaaccagatggatgttttgcagaagaagcatgatgaattggcagacaagcagttatcaaaggtttctaaggctgccaagaaaacatccggtttattttccactcttttatctcgtctaaagggaatcattctgtcacttcttatctttaattggatcaccaagggctttaatgccatgatttctgcatttaagacaggggtgcagaatatggcaaagtattccagtgactttaatgccaagatgtcgcagatgcagagtgcgacagaactattaaaggcatcactgggggcattgtcggcaccgatcgtctcggcactgacaccggctattgtgactttgtgtggatggctcactaacgcgatcaatgcgatcaacaagtttatatctgccgtgagtggtaaaagcacatggaccagagccaagaaacagcagaaagactatgccggctcgctgaaagatacggcaagtgctgccaagcaggcggcaggagccttggccgcatttgatgatctaaatgtgttacagaaaaatgacacatccggtagcggtggaagcagtggcggcagtacaagcccggagtatgaagaagtggcactgaccgaggatgactttaaatggatcaatactgtaaaaaaagcattgcagggattgttgccgattgttcttgccattggtgcagcatttctgacatggaaagtatatgatctgatttccggtctgaaagcaatgtcaccattattaggaggtattgccggcacgatcgcgatcattgctggcacggctcttgcggttgtgagttattttcacatgtgggaaaagggtgtggattggaaaggcttgatcggttacatcacaggtgtatcgattgcagcaggcggtgtccttgcactgttcggaccgttagcggcagggatcgtgattatggttgcatctattgccggtctggtgctggcactaaaagatattgtggagcatggcgcaaatactcagaatgtggcactggcattggtgagtgcttttggacttgtggctggtgtctttatggcatttggcgcaccggcagcggtcgttgttggagcgattgttgcgatcgtagccgccatgatcttgtttggcaagaagtcggatgaagtcaagaagacagtgaaatctttatgggaggatcactttaagccgtttggtgacaacatcaaggcgggcattgcagccatccagaacatctttctggcattctggaatgcctatattaagccgatactggatgccatcggtaagaagtgggaggaactggttacagggcatatccagccgatggtagcacagatcttgaagttgatcggaagcatcattgatctggtcagtgttttgtggaagaacttattggtaccgtttattgcttttctgatcgcatatattatccctacggtggcaccgatcattcagacggtaacatctctggtatttggcatggcgaaggctattgcagatatcattacaggaattatcgcaatttttacaggctttatagatgttatcacagggcttatcaacggagattggcgaaaagtatgtcagggaatggcggaaatattccaaggaacatggcttatcattaaggcaatcatcaatgccattcttggcggtgttgaggtcatggcaaatggtgttgtgaatgcagccaatacaatcatcgattcctttaacggattgcatttcaatatcccggactgggtgccgaagatcggtggcaagaattttggctttaatattgcccatgtgcatgcagtcaatgtgccgcgtctgggatatggcggcattgctataggctcgacgtatgcaaatcttggagaagcaggacgcgaggcggtacttccgctggaaaaccataccgagtggatggatgatctggcatataagatagcaagtaagatgccgaccggacgtacaccaagcaccttgatcttggagatgaatggtaagcaagttgccagagcgcaacttccatacatccaggcagagcaacagcgtcttggtgtgaccgtggtatcgggttaggagatgaacatatgacggctaaatatacacaggggttgattatcgatggcacgacataccaggtgccattggtatctatcaagaggacattggattttctggaaaagtttgcagaacgtaccgaggacggagatatccagatagaaaccatcggtttatataagaattatacgatcgaggtgggaaccattgatgatcccgagacgtatgatgcattgattgagcatattacggactgcgaaaacagataccaccatgttttcctgccggatgctggcaagcagtttgatttctatggatatttctcatccatttcggatgaggtcgaaaaggtatttgaccggggagcgcaatatcaggggcttacatggaaaatgacgagtaaaaagccgactaagagaggttaggatgggaacatattgcaaggttgagatgaaatttacagatgtaacagcattgtcagatgccgaggtatctacagaggacaaccagagcatcggcaatgtttccaatttcaaagagcaaatagcacaggcggattatggaacattggagttaaatcagtttgttctggatgctagtaaaagactgttggatgagccggaggatatagccttttggaatgaaaatctttccaagaaagattgctcttttgaggtcaaccccaaagtgagcatccactttacaaagcaacactcttcgtctgggcttactttttattttgaagatacatacccggcagaaatgcaagttatctggtacacgctggatggcattaagttggatgctaagactttttatccggatagtcttattttcgtatgtaagcatcaggtacagaactatgggaagatcgagatcgaatttatacgaacgacattcccagagacctatatcaaattacagtacattttgtatggacgttatattgtctgggatagggatatgatccagactgctaccgtgcaggaggatatagatctgacatctgctacactgtcaatcaacgaggcagatgtctccattgtggatgtcaataatgattttgatgtgggcaacgaaaatggagcatggaaatccgtgcaaaaaaaccaagaggttacattgtcagaatataaagacgagagtgtccgaccgatggggactttttacatcaatgacttttcgttttccggaaatatttccaagtttgagttagttgacagtattggcttgatggataagtacaccttttatgatggcaggatctacgagaatgagcgagcggagagcattctaaagacgatttttgcagcggcaggcattacaaagtatgtcattgctaaagaagttggagatgtgcgtctgagtggttttctgggcatacagaagtgcagagaggcattacagagggtttgttttgcatgtggagcagtggcagatgatagccgtagtgatacgattcgggtgttttatccggatagatatgtcagttcagaagttggcacaaatcgtaagttcaatgggggtacaattatatcattagatgaatatgtttcgggtgtgtctgtagaatataccaaatacaccttggagcaaagtgcatctgaaatatataaagatgtgcttccggtcggagaaacaaagatcacattttcagatccatatcagccggagtccatagccgtatcagtgggagaggtacttgaggtcaagacaaattatctgattattgatatggcaaatgcaggacagtgtacgatcacaggcagaaaatatgcaggatctaccttttcatatcagaaaaatgtggagcgtatagaggctggcgaggtagaaaatattaagtcatttaccggaagtaccctatacagtgcagatctcatgcaggaacacgcagagcggttgcttaattactatgctctacgaaagaaagtgagcatgaggtatctggtggatctggagcaggcaggaaagtgggtaaatatccattccatgtttggcaatatagcaacgtcgctgatcgagagccagagtatagatctgacaggtggatttattggtacggcgacttgccgtggatattcagccctgataacggacctgtattatgccggacaggagttgtatgccggagaggatgtgattatctgatggagattagaccaattatatatagcgcaaaattatccagccagaaagtaaataccaagacgaaggtaacggttacagttgtggcggatgaaatagagacatattatgcagaaacaaagtatgcgaaaagcagcaatcatgagttgattgccgggcaggagataggagtgatctaatggcgattgtaaaagtgagagtacagattgatggtgtgtggacaaatttatcactcagtaatggtaaatggaccggtacgataactgcaccatccacaacatcctacaatctggcaaataaatattatccgatcaagattgaagtgaccaatgatgcaggcacagtggtaactaaggatgctacggatgcgacattaggtgaggcactgcgcttggttgttaaagaaacgatgaagccgacgattaccctggtatctccatcccagggggcttatgtgacgaacaataagcagcctattgtctttaaggtggtggatgaggctgggggcagtggtgtcaatctgtccaccgtgaagttgaagattgatagtacaacttacacatcaaccagtacgggcatggtaagtaaaggtattaccaatggctatcagtttacctttacaccacagtcggcattaaaggatggcagccatagcattacgatcaatgcatcagacaatgatggtaatgctgcaacggctgtatcatccacatatacgattgatacagtgccgccgacgcttacagtatcatccccatcggctggattgattaccaataaggcggcattgaccattaagggtgtgacaaatgatgcaacatcaagtccgatcaccttaacagtgacattgaatggaacaagccttggaacggtatctgtaggatcagacggaagttttagtaaagacgttacgctggtagaggggacaaatagtatcgttgtgacggcgaaagatggagccggacagacgagcagtattaccttgtctgtaaaattggacacgacagtaccacaacttaatagtattgtacttacaccaaatccggcaaataccagtgcaagcgtagcaataacagtagaggtgagttgatgacacagtctattacctttgagttgccaaccgacattgcctatgttgctggtacagtaaatgatgtagagacagtctttgttcaagatgaagcatacccgatccggtggagagcaacggtggacgctgatcccgataatctgtatcgcatttatctggagatgtatgacgaggctggcaataagagtgagtataacaatacaatcgagtatattttgccgcaattcgtatatgaccggacagcagaagatgttgcccgtgtcaaagagttgcggatgatcggctggcagaatttatcagatgagcaaaagcaggagtggcttggtgggctaaagggagcctttaatctatcggatgtgaaaagaaacgagaataattgctttgtattggcgcaacttctcaatgtttcactggttacttatcgggacaacctgccaaaacatccagatagagaatactttgaaaatttgcgaaagaatgtgcaggcattaagagatgtcggctatcgctttatcgagacacccgaagtgccgccgcaacccatcaacacatatcagaaggtcaatgatctggagaagatacttcatgatgtgtatgaggtgtataactcaaacttcacatattatgccggagaaggcttatgtgctggtgatgatactaatttacttttataggaggatgaaattatggcatttagtaagaaaacatggttagacagaatcgcagagtacccaacaagaagacggctgaaaaagtcagacggaacagatgaaattgtttccgtctcacgagaagaaggggcaatttcacaagagggcgatgctttttcggcagccaacatgaatgatctggaagatcgtgtggcaagtgagtttaattcactaaacttaaagatggaatcggtcagatctcatgttggtatgattattcaatcaaccactcttgacaccgaagccaaggtaattgccatctacggcggtacttcct

SEQ ID NO: 12459 - DNA, 19367 bp, Unknown
  gut microbiota DNA sequence
ggaaagcccctatgatacaaatactcttttttattataacggaatcacatgaaaaataaaagtgatttggtttatcacagataagaaaaagaggatttgaagaatatatgataagaaaatggatagtagagaaattcaaatctcccggttttcacgatagaataagtttatcaagttgggatgcgagggaggatatactatggcagatcaaattaaacgtctcaatattgcagacgaaaagttttctaagaaaaagttgcttggcttttccatggtaaggatgggaaatattttacagggactcatgataggtgaggtaacatattttgctaccaatagtcttggaattgcagcagccgctatttccattggcatggcaatcaagacggcaattgatgctgttaccgatcttttgatgggggctattgttgatagaacacatacaaagtggggcaaggcgagaccttgggttcttgcaggcattccgatgtggatactgactttacttgtatttgcggtgccaagaagcctgatgagtgacatgggaattgtggtctatattacaatcttatccacgctggtcagtgctatatttggaactatggcaaatattgcatacgaaacacatatcaagcgaagcattgtaaataacgataatcgtgtacggactttgacggtgattggtttaatttatgcgatagggtcattggggctgcagattgccttgccggctgttatcaatattttccatgcttcacaaagaggatttattattattgcggcaatcacagcaattattggtattgttgcttgtttgatggcatttttcctctgtgaggaatattccgaggaggaattggctgcatttgaaggatatgagccggaaaaacaaaaagaaaatgttccgatttctgtatttctaaagagcgtggcaaagaacaaatatctggttatgtttaccctgatcaacttcatgtatatgattgttatgatgagttcgtttggtgtaggacagtattatttccaatatgtttacggcaatttgggaacattctccattgttatggctgcttctgtggcattgtttccagtatttgctgcgatcccaaaactttccaaaaagatgggctcagcaaaattgattagtggttccatgatgatttctattattggtattatcattcgaatgttcttaccacaatcaattgcggcacagatggttggttatcttgcggtcagcctgccaaacatcatcaatgcctgtgttttgtctcaggtaaactatgaattgatggagtatggacgttacaaaacaggtgtcgttgcggaaggtatgtattctgcatttattagttttgcgcaaaagatggcaacgagtctgaattccgtgatcgtcggtctgattctttctggaaccggatttgacaccttgactaaggcagttacaaaaaatggttttgaagattgggcagcacttgctgctttaggaaccaaaggatttgacacttatgtagagggcggtgcagcgacggttgataaagccttaaaaggaatcagttttgcttataatggaatgcctcttattttccttgcaatcagcattgtcttattcgcatttttccacttggaacgagatttaaaacaacttcgagttgagaacggctttaatgaagatggaaccttaagagaaagtaaataagatgagttacggcaggaagaagttcctgccgcaattattataggtaggacagatagagtatgaaaaaaattaaatttaacgatggatggacatttcagaacctgttgaagcatagcgaaccagtggaagtaagacttcctcatgatgccatgcagacggaaaaaagactggtaaatatgaaaaatggcgcagcagcaggctttttccccgggggtaaatatcaatataccaagcattttggggcagatagcgcatggaaagataagtctgtgttaatcgagtttgaagggatatatcagaattctacagtgatattaaatgggaaaaaaattggcggctgggtctatggttattccggatttgtactggatattagcagaaatctgattttggatgcggaaaatgaacttacggtaattgcagataacagcaggacaccaaatagtcgatggtatacaggaagcggcatttatcgcaatgtgaatttatatataggagctccttcccatataagtgtagatggcatcgaagcagtgacaaagcgggttgattataaaaatcagtgtgcctatgtctctgttactacaaaagtaaacgatgtgactggctgtgaattgcaaataacactttgggatgataataaaaataaggtgtcagaagcatccggtatccatacagaaatgatcgtgccgcatgtaaaactgtggagtgacgagcatccatatctttatacgttaaaggcggaactgcggagaaatgggaaggtagtcgatcaggaggccattctttttggaatccgagaacttcgctggtcggcagaacgaggacttctggttaacaacgaaagtgtgaaactgcgtggcggatgtattcatcacgacaatggaattttgggaagttgtgcttatgatgggatagaagaacgaaaaatcaaacttttaaaagaggctggatttaacgctattcgttcggcacataatccggcaagtaaagcactcctgacggcctgtgataaatatggaatgtatgtgatggatgaagcatttgatcagtggagattcatgaaagtagattatgattattctatttactttgaaaagtattatgaagaagatgtaagtgccatgatccgcaaggatatcagtcatccatctgtgattatgtattctattggtaacgaaataggggacacaggtagtgacgaaggggctgtgtggaaccgtattttggttgatatctgccataaactggatgcttccagaccagttatcaattgtatcaatccagtggtgtccatgatgggaggaagaaaatctaagtgcagtcctcaggacagtgtgaatccttacgaggagacaaagaacgcccagacgacagcaagtctactggctaatattattgtcacggtagtaccttttgtccaaaaaatgatgggaaaaccgaaaaaggtagagaaaaaactgaaagcctgttttgatgaactggatattgtagggctgaattatgcagaaaattgttatgagccacatcatgcatatgatcccaaacgtatcatgttaggttccgagacttatccgcattccatggcagaacgatggaagttggttgaggctcacccatatgtgattggtgattttatgtggacagcaatggattatttgggggaagccggtgtcggcgttccgatttatggaaaggcaaaaggtggctttaatcgaccatatccgtgtgtcagtggagggtgtggagcaatcaatcttttgggacagaaagaaacggagatgtatgctgcagccattgcttggaagaagtataaaaaaccatatatcgctgtaagaccggttaatcattccggtgaaaagtatttccttggtatgtggcgcgatacagatgctgtacatagttggagttggccgggctgtcaagggaaaaatgcgcagattgaaatctatagtataggaaccgaggtagaattgtttcagaacggagagtctcttggtcgaaaaaaattagaattttgtaaggcgtcctatgagacaatctatcaaatgggaagacttaaggcggtcagttatgatgaaaaaggaaataaaattgatgaggatgaacttatttctgcaggcgatgaaacaaggctttgtgtggaagcggaaaaagaagttctgacagctgatggagaagatatgacgtttgtgctggtctctctgactgatgcagcaggtatcgtaaagatgctttctgataggcaaatcagggtcagtgttttggggaacggaatcctgcgcgctattggcaacggaaatcctgtgactgaagaagcgtttgatggcgattcctaccactcttggatggggcagatgggattttatgtacaaagcacagaagaagagggcacaatcgtgattgatgtgagtgcagagggaaccgaagcagagcaaattatcctgcagaccaaaagaaggtgatagacatgaaagagacatttgttttttcaataaaaaaagacacccgacgggtggaagtatccaaccactggaaatattgtgttggctctggtcaggcaaaacttgctatgcgttcagattatgcccgacaattaaaatttattcatgatgaacttggcatagagagagttcggtttcacggcatttttgatgatgatatgcaggcgattatgtccatggcggatatgatgccgataccgggcgcagaaaagtttcaaaattataatttctttaatatttttgcggcatatgataatgtacttgcagcaggaatgaagccatgggttgaactgtctttcatgccatcggctattgcaaaaaagaagaaaaaagtcacggtcaatgcggagggcatgaaaaccatgccggcgaaagacgatgattgggtaaagttggtacaggcgttcatccgggctgcgatacaccggtatggcaggaatgaggttattacatggaattttgaggtttggaatgaacctaatatgttcactttttttgccggaacgatggaggactatttccatctctatgagattacagccaaagccgtgaaggaggtagatccggctctattggtggggggacctgcaagtgcaaccggagattggattgctgaatttattgacttttgtgagcaaaggaaattgccacttgattttatttcaacacataattatccgggagatggtataggagaagcctttgccatgaaagatcttttctccaatgttgtggggggaatgaagcaattgagaagtaagaaagcggggactgctctggatgggattcgtctgatcatggaggataagacggaaaccacggttctggcaaaggggcagatgtatgataatacaaagaaagtcagtcagattgtggcgggcagataccccatttattatactgagtggaattgtaatgccatcctgacatcaccgagtaatgatagtaaaaaggtggcatgtttccaggtaaaaagcatagatgagatggaaggaaatgtgacaggatcatctatttgggcatttagtgatatttttgatgaattcatgatagtgccggaagaattttcgggagggtttggtttgcttaccatccatggtatccccaaaccgcagttttatgcattgaaattattaagtgatgcgggaagcagaaaaatatcgggtacagatagaggtgccgggatgtcagaatgttcgattgtaccggattgatgatgagcattgcaatccgtatcgtatatggaaggaaatgggatcacctgaaaatatgaatccgcaggaaatccatgaagtgattgaaaaatcatcccttgtggcagaaaaagtgacttatacatatgaaaacggagaattgatcgtatccggcaggctgcaggtaaatgacacgcactgttacatcatcaggaaatagtaaaggagattagttatgaagacatatgatctgaaaacagcatatatgagaaatcccatgggattggatgatctgcatccgcaattatcatggaaaaccaaagatggtaaaaaacagacggcgtttaagatagaggtgtccgtaaatgataaaccatggaaacttatggaggaaagaagaagtgattccatgaagacgagttacagtcttcctttagagagtcgagaccggattctgtggcgtgcagcggtggcagatgagaatggagtatatgacagttggagccagcctgctttctttgaaatgggattgttggaaaaaaaggagtggaaagcatcgtttatcatgggaaactatgaacatagtaaaagtcccaaagtgcgatatccggtggactgttttaaaaagacttttcgaataaaaaaagaaaatcttgtgcgtgcgagactctacattacagcctgtggcctgtatgagacaaaaattaatggaacaaaagtgggggatgcggttttgacaccgggatccactgcgtttcaaaaaagagtacattatcagacgtatgatgtgacagacttgctgaaagatgaaaatgtgtggaccatggaactggcagatggtttttacgccagtgccacaggggtctttgacagcacgaaagtttatggatatgagccaaaacttatggcgcaaatggaagtcttttatcagagtggagaacatgaggttttcgtgagtgatgcttctatgcaatggtctaatgatggcagtatccgttatgcggatatgaaaaacggagagaggatagatctggggcgtagtccatcttatagtggaagggcaagagtgacgtcgtatgaaggtatggtctgtgcttccaataatgacgcggcaaaagaacatgagaaattttcgaatccaacaattgtgcattgtccggatggacatacagtgctggattttggacagaatattgcaggctatgtcaaactttccgtaaaaggagaaaagggagcaaaatgccgcatggtgtgtggagaaaaattggatacaaatggtaattttactgtagaaaatattgcatggaaggcgaattatgatacctgccgttttcaatccgtggattttgtctgcgatggggtacgtcacgactacaaacccaaatttacgattatgggattccgttatgtcctgcttttggactggccggaggatgtggatgccggcagatttagtgcaattgcagtttatacggacatggacacaacgttttcctttacttcttcggatgctatgctcaatcggattgtgaaaaatacattctggagtgtaaaaggaaattttatggatgtcccgaccgattgtccgacacgtgagcgtgccggctggactggtgatgcacaactcttttttaatacaggcaattatatgatggatcagagagcattttttcgtaaatggatgagagatgtagcagattgtcaaaaaggaaatggtcttgtctataatgtgaatccaacggggggtaagaagagtggattgattgagtggatatccatggagggaagtgccggctggggagacgccatggtgactatcccatactatttctggaaacggtatggagatgattgcctgattcgggagaattggcaggcaatggaaaagtgcattgcatattttagcagcagaatgggtaaaagaaacctcttttcccttttttcaccaaagcgaagcaaatatgacaaatatcttgtggccagtgggagacattttggtgaatggacggagccggacgactgtgcgccatcacaaaaaatgttattgctgccaatggtagaggaggcgaccgcatatttatcctatgctgcgaggttaatggaggaaatggctgactatctgggaaaagaatcccaagcaaaacattataagcagatcgcagatcggacgaaagaggcatacaattattattttgtacagaatggtgacattacaagcaagagaatgtgcaagtatgtaagaccttgtggattggaattggctgagggacaggcccgccagagacttttgcaaaaaattgtgaaactgaatcaggagagagagtatcgtgtgggaaccggttttttgtctaccccatttgtatttccgcttcttacggaagcaggtgcaagcgatgaggctttccgcatgcttatgaatccggagattggctggatccagcaaataaaacaaggcgcaacaacagtgtgggaaaactggacagatgatgcatctttaaatcattattctaaaggagcatgttgtcagtggatctttgataccttatgtggaatcaaaatggatggcagggagaatcattttgtgattgcaccccatccggtttcacagatagattctatttctatggaatatgattctgcatatggcaaggtttcgagtgcctggtttagaacagatggaaaggtgaactttaggatttccataccatcgaactgtgtggctgatgtcatcctgccagatggaagcacatttgcctgtgaatgtggagaatataacttttctactgtgacaaaatgagttgaataaaggaaaaatcccttgcatacaatgtaaaaacaagtattgcaggggatttttttgaaaccatatattgaaaaacgggcagttgaaattggtacatacattgtggaaaagagtgcgaccgtaaggcaggcggcaaagagttttggcgtgagcaaatctacggtacataaggacgttgcggaacgtttgccgcagatcgatgtcgaacttgcaaaagaggcaagaagcgtcttagatgtcaataaatcagaacgacatatccgtggtggcatggctaccagaaaaaagtatgcacatatccattgactttccacgcaggataaactaagatttttagaagagtaaacgaaccgataaacggtatttgaggaggaacaaatggagaacgttactattatggatcatccactgatccagcataaaatttcaagacttcgtgacaagacaacaggaacaaatgagttccgtaccttggtcagtgagatcgctatgttgatggggtttgaggcactgcgcgatcttccgaccgaactggtagagatcgagacaccgatcgagacgaccaaacagccaatgattgccggtaagaagatggcgatcgtgccgattctgcgtgctggacttgggatggtagacggtgtgctgaatctggttccatctgcaaagatcggacatatcggtttgtatcgtgacccggagactcatgagccacatgagtattactgcaagttgccggaaccgatcgaccagagaactattttggtagtagatccaatgcttgcaaccggtggatccggtgcagatgccatcaccatgatcaagcagcatggcggcaagaatatcaagttcatgtgcatcattgccgcaccggaaggtctggagagactgcacaaggaacatccggatgtgcagatctatgttggcgccttggatcgtcagttgaatgagaatgcttatatctgtccgggacttggagatgccggggatcgtatttttggaacaaagtaatcaaggatcagatgtcaagggggatgctcttttacagggcatcctcttatcttatagcaacgagaaaaggaaagaatatgggaaaaaatattgttttgatcggtatgcctggggtgggcaaaagtacttccggcgttattcttgcaaaagtattaaattatgatttcttggattccgatctggtcattcagcatcagaccggaaaacttttaaaagaaatcattgcagaaaaaggcattgatggcttcaacgcagtagaaaacgagatcaacagccaaattgatgtggaaaataccgtgatcgcgaccggaggaagtgttatctttggcgcagatgctatggcacactttaaagagagcgggattgtcgtttatctgaggatcagttatgatctcttggacgagcgtctgggggatctggatgagcgaggtgtcgtacataaagagggacagaccttgcgggatatttataatgagcgcacggcactttatgaaaaatacgcggatattaccgtggatctggacggcaaggatgtggctggcacggtggatgcagtagtggcgcagttagaaagaaaataaacataagatgagtaaactattggttttacagataaccatgcttttgctgattttagtaggagcacttataaaaagaataggaattataagcaaagaagggcagaagaatatcaacgatctggtcatttatctggtacttccctgcaatattgtaaagtcctttatgatcgactgcgatagcaatacgtttgtgcagtttgcggaggttcttgtgctctccatagggatacagatcgtcagtgtgattctgggcaaaattctatatggtaaaagggaagctgggcatcgtatgagcctgcaatatggtgtgatctgttctaatgcgggatttctgggaaatccggtcgcagagggcgtttttggatcgatcgggcttgctatggcatccatattcctgattcccatgcgcattatgatgtggtcgtccggtattgcaatctttacgcagtcaaaagattggaaagcgactttgaaaaaggttgtgacgcatccttgtattattgcctgttttatcggtttgatcctgattctgacacaatatagaccaccagccgttatcacaaatacgatcggaacgattggaaattgcaatacggcactttccatgatggtcatcggtatgatcttggcagaagcggactggaaatctattttcgactgggaagtgcttcggtattctatccttcgtctggtactgatgccactggctttgtacgtcgtctgcctgctcataaaactgccgtctctggtgacaggggtctgtgtactattgactgccatgccggcgggggcaacgaccagtattctggcatccaagtatggctgtgatgagatctttgcaacaaaactagtagtggcatctaccattttatccatgattacgattccggtatggagcatgatcctgaccatgtagggatacaaaaaaatacaatgtatgagcaaaaaaagattgtagagtgaagataattccgctatactttctttagttaaggatatctgcgagggtgcatatgtcatctcgcagattttttgcggaaagggatcttttcgcagaggaacaacaaatcagtacaaaggagttatgtgatgaatcaaaaaggagcaatcaaagatgcccgcagtcttggaacaccaaagatgctactgttgggtttgcagcacatgttcgccatgtttggcgcaacgatcttagttcctatcctcgtgaatgattatttcgagggagaaggactttctgttcaggttacactgttttgtgccggtgtcggtacactcttatttcatttgatcaccaagcgtaaggtgcctgctttcttaggatcttccttcgcatttctgggtggattttccatggtagcacaattggatagtggaatttatgccaatatgactatgggcgaaaagttgccatacgcttgtggcggtatcgtggtagcaggtcttttatatctggtatttgccctgatcgtaaaactggtaggtgtaagaaaagttatgcgtttgttaccgccggtagtaactggaccgatcattatcagtatcggactttcccttgcatcttctgctgtcaataatgcacagacaaactggatcatcgcgatcgtcgcatttgcggttattgtgatcttcaatatctggggcaagggcatgttcaagatcattccgatcctcatgggtatcgtgatctcttatatctttgctttggtattaaatggtgtcggtatgacaaatgctgacggaagcgcgatcttagatttcacttctgtagcaagcgcacactgggtacagtggcagccatttgtatggtgcaagtttgatattacagccatccttgttatggcaccgatcgcacttgcgaccatgatggagcatatcggtgatattacagcaatctccgcaacggtagatgagaatttcgtagaagatccgggacttcacagaaccttgatcggtgacggacttgcaaccgcatttgccggagccatcggtggccctgcaaatacaacatatggcgaaaatacaggtgtattggaactgtcaaaggtacatgatcctaaggttatccgtatcgcagccgtatatgcgatcatccttagtttttcaccgaaatttgcagcagtgatcggttctatgccatcttccatcatcggtggtgtaagtttcatcctttatggtatgatctctgctatcggtgtccgtaatgtggttgagaacaaggtagacttcacaaagtcaagaaacctgatcattgcagccgttatccttgtcagcgcacttggatttacagatggttttacattcacgatcgcaggaacaagcgttacactgacttctcttgctatcgcagccattttgggaattttcctgaatgctatcctgccgggcaaggattatgaatttgagacaagtgcaaaaaaagaagaagcgtaaaaagacggattctgtttcgggggaagcgggatacgaaaaagttatgagcagatagacaaagagcatgtggacgatcgaagggatcggacacatgctctttttgtagttattataggagtattaagcgtaataatcgatgttgtttgccatgcgcttggcataggtcgtcaactgtttcatgaatttggagtctttgtttaaaagactcttgaaacggctgcccctgatgttttcaacggcggaagaactgagggtcagataaccagagaagttttccttgatgccgatgttttccaaatccttggaatacttgctggcaagatttttcagattcttgtaagtggaggtcgcataggaattggtcgaggatttggcggaatccatggtgtaattgtatgtatcgataaaggcgcgtacatgagaagaaatatcgtccttatcggcagtttcaaagtcaaaatcatccagtttctgaaccgcgcggcgaagcgcctgtgcatctgcataatttaactgattggtcgtagcagaagaacgtgtacttttggtcgtaaaagcgcggtaggtcgcgtaataactgcgcagggtgatgttgtttgctacagaaaatccactcatgacggctcctttctttaaatattatagtagggaaagcggtaaaattttgccaattaccgattgttatatattttatatcggaaattctgtcggaaaattgacctttgaacttgttattttttataggctctaatataatgaaacgagataggtttgtacctggtacaaaaagaaacggaggacaagcatggagcaggaaaaggtcatagtcattgactttggcggacagtacaaccagttggttgcccgcagagtcagagaatgcaatgtttattgtgagatctattcttataaaacagatattgaaaagattaaagaaatgaatccgaaagggatcattttgacaggaggtccaaacagttgttatgagccggattcaccgacttataccaaggaattgtttgaattgggaattccggtattgggactttgctatggggcacagttgatgatgcacgtattaggcggtaaggtcgagaaggcaccggtcagagaatacggtaagaccgaggtattcgtaaagcaggattccccattgtttgcaggcgtatctgcaacaacgatctgctggatgagccactttgattacatttcaaagccggcagagggattccgcatttgcgcacatacggcggattgcccggtggcagcggcagagaatcaggaaaagaatttatacgcgatccagttccatccggaagtactgcatacggttgagggaaccaagatgttgcacaactttgtacgcggtgtctgcgggtgtgccggaacatggcgcatggattcctttgtagaaaatgccattagggatgtaagagaaaaggtaggagacggaaaggtgcttttggcactgtccggtggtgtggattcttctgtactggcggctttgcttgcaaaggcaatcggaccacaacttacctgtgtatttgtagatcatggtctgcttcgtaagaacgagggagacgaagtcgagaatgtatttggcaagggcggagcctttgatatcaactttatccgtgtcaatgcacaggagcgttattatgcaaaacttgcaggagtgaccgagccggagcagaagcgtaagatcatcggcgaagaatttatccgtgtttttgaagaagaagcaaagaagatcggtgccgtagatttcctggcacagggaacgatctacccagatgtggtagagtcaggacttggcggagaatctgcagtgatcaagtctcatcataatgtcggcggtctgccggattatgtagatttcaaggatatcatcgagccactgcgcaacctgtttaaggatgaagtgcgtaaggcaggactggaacttggtctgccggattatctggtatatcgtcagccattcccgggaccgggacttggcattcgcatcatcggcgaagtgaccgcagaaaaggtgcgaatcgtgcaggatgctgattatatttatcgtgaagagatcgctaaggcgggactggatcgaagcatcggacagtattttgcagcactgaccaatatgcgttcggttggtgtcatgggcgatgagagaacctatgactacgccgtagcactgcgtgcagtcaacacggtagacttcatgacagcggaggcggcagacattccgtttgatgtcttgcagaccgtcatgagcagaattataaatgaggtgaagggagtcaatcgagtattttacgatctgacgagtaagccacctggaacgattgagtttgaatgaattaaaaatcattcaaggtacgattgacggtatcttgaacagcagagagaataagaagtgatttgcttcttgttttctctgttttcctatacagattcttcaacatttatttgttgatctgctccgcaggcaacaaataagagccgactatccttatttctttatcgtaaatttacttgttacacagtaatgaaaaaagccaatagtttgtaactgaactttacaaactattgactttacattttgatgtccactcttcaatgaattatcatacgaatatatcttcaatactttataattcaagagtaataataaggctattggcatgtacttttgcaacaatatttccgccaagaatggcaacaagtgtttttactaccgcaagtcccaatcctgtacttccattatgtcttgatttatcgcctgtataaaaacggtcaaaaagtcgattgcaatcaatttctgaactgtcactcattggattttcaatggtaaatataatattattattttctttctccataagtgttatttttatcgttccaacagaatacttaattgcatttgtcaacagattttgtaaaattcgttctaccatatttttatcagaatatacgtatattgaataatctgggagatttatttcgggtaaaatattctccttttctaatgcaacggcattttccgtaattaaatttattaacatattagatatattaaacttttctttttctggaactgtctgctgttcctccaaaatagaaaggtcatagaatgtttctaccaattctttcattttttcggctttgctaaaaatcacttttacacgctgtgcttgactggattcccaattttctttttgcaataattgtaaatgaccaagaatgactgtaagaggtgtacgcaaatcatgtgatatattagcaacagattcttttaaatactcttcattgcgtaatacgcctgcaacagcctgtcgttgtctgatattatattgattcaatataccagccagtctttctaaatctttatcaatcaacgaaatgtctaacatctgctgtgaatttccagaattcaattcattaacttgatccgcaagattacggatttgtttttttaattgaatatatcgaaatagcagtattactaaaaatattgttatgataattaaaatccattctatgttagacattttctccacctatttaaaatcacatttacaaaattttatccacgaaagcaataccaatataccagaccatatacatcctactaaaatagctatcggttgaaaaaaggttttcatgctgacaacgattctgatttgataagtaggtaaaaaaccgactggtaatctcaacatcattccatagccaagatataagctaagaccaaaaataataattgctgtaaccgaggttgcttttacagcatcctgtaaatagcaacaaataagtattgcaattagaaatatcgcactattaagcagacaagaataaatgattgcttttataatattgtaaaaaaacattcccacgtctgcaacaccaaagcgtccaaattcccttatgcaccctgaaactggatagacaagagccataagattaaaagcaattaaatacgatattattttacttgtaaaaatttgttttctggaatgtccagcactgacctctaagtttattgttctcttagaaaattcctgtcctaaaatcaatgcaagtatagccgacatgatgataagaagaaaagtagaatcatacaccattccattaaaaatatcagcaagagaagaagcaatttcttctgtcggtcccatgacctctgtaacataagtatctgctgtaaaaaatcctaaaataaatattccaatcataccacaccagtaaatagaattatgtaacaactgatatttttccagttttaataatttatccataaaaaacacctccggttatttcaagtctgtatgtaaaaaagcactacctgcaatgaaatataaaataaaattccataaaaaatctacaaacaagcaaaagtttgtcgaatagaccttttgcaatgaaattaacctaagttgtcccattggtattattctgctgattatttgtgcagattcactgttcagcaaaaaaatcataacaaaaaataaaaccattgaaactgtcagtgttttccccatatcacgaaaaataaaagcaaaaaacatcggtaatgcacacagtgttatcatggcaaacagagttagtaaaaccatagtatatgtgctatcattccaaaaaagtttttctccaatataaaattgactaataattccatgtacaaataatggaaataccagaatgataatacaacctatttgagatacaattaactttactctaaatatagaacttcttttatgtccggcagtaatataagtatttaaagttcttccactaaaatcacttccaatgaacaatgctataaacactatactcaaaaaatagagtaacggaatattgtataatgatgccataattaagtttgaagagcgttctttactatctaacagcaatatgctacttaaaaggagattgaatattccaattccccaaaaataccaactgtgaaacaacttatataactcagtttttaggagatttgacatcttttgttcctcctattttgctcaaaaaatagtcctccaaagtatcgccagatacagaaagtcctgttacaagaatgtgcgattctgccaaagcagacgcaactgtctctaaatcattcaaataatcatacaaacgaattatgccatctggcattagtttaaagttatctgtatgaagattctcttccaaaaccagaaccgttttctgaacatctgttgttttaattgctatatgtcgtttacaccgttcatttaattcataatcagaaatctcttctataatttttccatggtcaatcagaataaattctgatgctgtttgatacaattcttctaagatatggcttgaaaccaaaatggtcataccatattctttattcaaaatttttaataaatttctgatttctacaattccagcagggtcaagaccattgataggctcgtctaaaatcaatagttctggtgtatttaaaagtgcaatcgctatccccaatcgttgacgcatacctaatgaaaaattgcggacactctttttacctgtatcttgcaatccaaccatatctaatgtccttttaataactgatttatctggtatgcctcgttgaatacgctgtacttccatattttgataggcagtcattgacgggaatagagcaggcgtttcaatcatacttccaattcgtttacgctgtttctgcaattcttctgttccagaatttccccataaagaaagtgtaccacttgttggaaacgcaagccctgtgactaatcttaaaaaagtagtcttacctgctccgttttgaccaataaatccataaatttttcctttttttatttgtaaatttatgtggtctaatgctaatgtttgtttatattctttggttaaagactttgcttctaaaataattgaactcatatcccaaacctcctttacttaaaccagtataacgggcaattttaaagaatttcttaaatcgtaatgagaaaagttaaaaaaataataaagctaaggaacgtttaatccttagctttatgtaggcggtagccaatgccccaaacagtatcaataaattctgtatcagagcatatcgcttttaatttattgcgtaaattactgatatgaacattaagtgtattatcttcagcaatatattctgtatcccaaacactttgaaaaagattcgattttgaaaatactttatctggatatttcatcaacaattctaaaatgccaaattctttagcggttaaggataattctattccattcaaaaatgctgtatttttctctaggtctaaagtcagattgttatgttgcaaacattctgtctggctattttgaaattgtactcttcgcagattactttcaattctggcaagcacttcttccatatcaaaaggttttgtgatataatcgtctgctcccagacgaagcaagtcgattttattttgtgtagtttctttcgctgaaataataataacaggtatcgtaaatttcttgcgtacatcagataaaataatatcaccactccgataaggaagcataatatcaagtataatcaaatcaattttttctttattcaaaaaatccagaacatgaagtccatcatattggcaatgcacagcatatcctttttcttttagaaaatcagccaataacgcatttatttctaaatcatcttcaataatcaatattttattcattagcctacctcattcctgcaatgctactttcccattatacatttaaggttgtatttcctcaataccattgcaaccaattatatgagagggattcttattttgtcaatctaattgtaagcagaatagtatagattggataaacaattaccatactattctgctgtaacatttattctacaatcttccagttatcgttcttatgaagcacaagctcatactgtgagatttgcgtcattttcgacttgttatccagatactttacggacacgctaactttgaggttgtcgccggctttggtaaagacagggtttaccagttccgaaaatacatagtcgccggatacaggagcaatcacaccgtctttgacatagtaggcaagttccttttccgtagctgtcggatagaacttaaagaatgtttccaagaaagcggtagcgtcctt

SEQ ID NO: 12460 - DNA, 13814 bp, Unknown
  gut microbiota DNA sequence
atcggaagcgatctccacctccagttgtttcttaatctggctcaacatggcaaagagatctttcttttgttgtttgctcagcccgaccaccagtctttcttccatgctgtcaatactgatctcaatattgtcatggaacttaatcccggcctcggtcagttcaatctttttcagacgggcatcccgctccacagaaacacgcttgatgtaaccgttcttctcaagactctgtaaggctgctgtcacagaggactttgccatatgaaaatcagcctccatatccttttgaaaaatctcccgatccctgtgatgataaagataaccgatcatccagccatgtgtggctgtgaccgtatccacaccggcattcaggatgcttttctgccagatattcttatccaaaagacgacttaattctttgatctgatagcctatctgttcttcatttctcactttctcctccttgatgccaagcacccgtttcttaatctttgttaatagttcaacaccaaactgttcgtttctgaactgttcggtttcgaactattatagagcgattgccttttctttgcaagaggataatttctacaaaaacttattttttctcccttgtctcttggtcaaattgccataagcccctgtcggattctatacatttctttttcttatgatactttctactcacttgttgtatatttgggcaaaataatgtataatgcctatattattatttgcaaaatgcaggaggggtaccaatggaacacacaagcaaggacttacgtgtccgcagaacactgaaagccattcgtagtgcattttacgagttggtattgaccaagaactattctgacatttccattaccgagttgacagatctggctgagatcaaccgcaagacattttatttacactattcttctttggacgatctggtcaaagaagtagagcaggagatcgtagaccacattttacaaaatgtccgcatgagtgcagagcagatggatgttgcaggctgtgtcgacaatttttatcactatctggatgaatgtgatgaggtacagcagaaactcctctgtgattcccattattatttcttctatgaggatgtcacagatgctgtgttaaagagcaatgccttttccaggttctttgagatgacaaagcacccggatatcgttcgttcttattcaatctgtattacctttatctaccgtaactggttaaagaacggcagaccgattccgctcgacgaactcatcgaatacgccagcatgatcattgccaaaggctacagcggcatcatcgaaaaagaagcctaaaattcttacatagacaaacgaaaccccacagatctgatacaatctgtggggtttttaaaatcggcgcgacaggatttgaacctgcgacctctgcgtcccgaacgcagcgctctaccaaactgagccacgcgccgtcttgtatatgcaagacagtccttatcgcgaactgccttgctattataatacatctaaaaataaatttccagcctttttcctaatttttttcattaagataaaagcatacgaacggctccatagataccggcgtcatttccaagcgttgcaagtacgatcggtgtgtccttgcaggcatggaagacctgtgccttaaacggctcctgcaaagcgtcgatcagaatctgtcctgcgcgggatacaccgcctccgatgataaaggcatccgggttgacaacgcaaccgatctttgccagcgttgcgccaagcataccgcagacctggtcaaccacgtcgcaagccaccttatctcctgctcttgcacagtcaaaaacatcctttgcggaaacagcttccccaaaagtgcgaagtttactgtcttctgacgttccggcaagggcacgctttgccatacgtacgataccggttgcagatgcatactgctcaatacaaccgtaatgaccgcagttgcacgcctcgatctcctgctcattgacaacgatatgaccgatctctcctgcggctccgtttgctccggtaaggatattgccgtcgatgatgataccaccgccaataccggttcccagtgttaccataacaatgctgttgtagccttttccactgcccatccagttttcacccagggctgccacattggcatcatttccaacttttactttcataccggacaacttgcccagttcctcagccagcggtacgatatcccagccaagattgacggcacggttgaccacgccatccttgtctacggctcccggtacaccgataccgataccctcaaccatatcctttgtcagatcattttctaccatcttgccatgtactgtggctgcgatatcctgtaagatgtgtgcgcctttttctgtcgtatctgtcgggatctcccacttttccactaaggtgccatccatctcgaaaagtcccattttgatcgtagttccgcctacgtctgcgccaaatccgtattttttcatgctatcttcctccgtctttctcactcatgcctttcattgtatgtcattcgcccgtctctggcaaggcattttctgttgtatccgtctgtcccagatcggtcagggtctgatccagcggatgcacaaagtcgatcggctccaatccctcatgcagccaggacataaaggcgtaccagatcttgcccggataggtgccgccgcccagtcccggcacttcttttgggatgtcatagcccacccaaacactggtcgtatagtatggcgtgtagccgacgaaccagccatccttgttatcgttggtcgttcccgtcttaccggcgcatggcatattgccgagtgaatagccccgtccggtgccggaagtgatgaccgtctgcagcatatccgtcatctgacggcaggcgttttctttataaacgacactggcggtctggtctgcctgatagagcacctgtccatccgcatccgtgatcttgatgatacaggtcggattgcggtagccgccatcatttttgatcgttgcatatccctttgccatttccagcgcggataccccattggtaaaaccgcccacagatgccggtagacgcttgtcattggcatccagattggaaaactgcatggattccagataggagatccccacttccggtgtgatctcttcaaagatcttccaggcaatcgtattcttggaaagggcaaccgcctgccggagggtcattgccccggaataagtaccatcgccattgaccggtccattctcgatcggttcgtcgaccacaatggtatccggtgtatagccccgctccaatgccggcgtataaacaatcaaaggcttgatcgcacttcccggctgtcggaaactctgaaaagcgcggtttaatgtatagccctcgacatcatcctgactgcgcccgcccacaatggcacgcaccatgccggtcgtattgtcaatgcagaccgatgccccctgcaaggtatagataccctcatcatttttttcatcaaagccacctaaaatatagtcgatcgatgcctgcagccggctctgcgcctccagatccagtgaggtataaatgcggtagcctccggtaaataatttggcattacattcatcatagagcgtctgatactcgcggtcgtaggcttctttttccgcatcatccgaaaataccgtctgaaactcaaagccctccagttccatcagcgcgcgggtcgcacaataataggtaaaggtctccgcgtagttattcttgatctcatccttttgcaccgtctcgatcttttccgcctttgccgtctcgtaggaattttccgagatgaccttgtcttccagcatggattttaagatacgatcccgtcttgcttccgtcttatccgggttggtcaaaggattgtataaggtcggattgttgggaatggcgcacagatagatcatctgtgaaagggacagatggctgacatctgtgccaaaatagccctgcgccgccgcctcgatcccatagtaaccattggcaaaatacacattattgaggtagaactccaaaatatcctctttggtatatttcttttccagttctaccgcaatatacatttcctcgatctttcgttcccaggtcttttcgttggaaagaaagaccgtacgcgccaactgctgggtaatggtacttccgccctgggtcacctcaccgtcctggatcatggcgataatggcacgcataatgccccggtaatcaattcccttgtgcttgtaaaagcgcttatcctcggtactgatgattgcctgcttgatgtagacaggaatgtcttcgtattctatgtagtagacatccttttcccctttgagcaccgacagggtagtaccattgacatcgtaggcaatactggtctggttcttgcggaaagtatccttggaggaatgggaaaccaggctgaccgcctccgttttcatggcactgaccttggcagcatagcctcccgcataataataagccactgccgctaccaccagcagcatcaatatcatttgaaattttaaaaagccccatatcttttgggaacgtgtttttttcctgcgttttttcatgctcttattttacacgttagccccaaacgacacaaggcattaaaattagtcttttttacagatgatctttgtctttgatgggtcgaccttatctttttccaggatcagttcgtcgatggattctgctgtgatctgccctgatgtcgggttgatcacactgtcgatcttgctggtgatctctgcgtccaccgtagaatattcaaaagcaagcgtcgtatgcagaagtttgcagttcttcatgaccagattgtcaatataacacataccctgtaaactctcgatcgtacagttgatcagtgtcagatttttggcattccagcccagatattctcctgagataaaggagtcatagaccgtgatattttcactgttccaaaaagcatccttagacaggatattagaattacggatagtcacattgtgacagccgtcaaaactataatttccgaccagatgcaagccatcgatctccatattgtcggttcccatggcaaaataatcgcctttggcgctgacctggttcatgacaacatgatcgcagttccaaagtgtctcctccgcatgtgggaaaaatacattatttaaggtcacgtcattggcgcggcgcaaattcttcggtgcctcaatggtcgtattggtcatgctgatatgatcggtataccagatgcctgctcttgccatgtcataccaggtacagtccttgacttcgacatttttacaataccagagcgggtatttccactggaacaatacatgctctaaatacaggtcggaactctccttgagcggcgattcaccttcaccgaataccgtatcgtatatgttgacatgatgggaaccgaataaagaacgttcgccctcataatatgcctgtctgatctcttttacatcactcattctttctacctcttttgtcttttctatcttcttatttctatctttcttatctttgctctttataggataggacacctgcttttaaacgtgccagtccatccagaagcgtcgctttcgggcaggcgatattaagacgtaggaaggatcttccgtccccgcggtactggacaccgtgggaaacaaaaagtccggtctcctcgcgcagataatctgcaaattcctgactgtctgccgcgatcttactgcaatccagccacaaaagataggttgcttccgatggcagcagatacagatccggtatctgattttccacaaattctgcgactgttttcttattttcataaatgtaattccgcaactgatccaaccagtctgccccctggtcaaatgctgctacagcccctgtcaccgcaaatacatttggctcagcgacttcatccgtattgatgccacgccataccttatgacggatccaaggatttggcacgacgatagcagatgtctgcaagcctgccagattgaaggtcttggtcggtgcgatacaggtaatgctattatcccggcatgtctcatttacggacgcaaaaggaatgtattccttgcccggatcggtcagatcgcagtggatctcatcggaaaccacaagcacaccgtgcttggtacaaagttctccgatacgcgccaaggtcgcacgatcccagatgatgcctgccggattttgcggattgcaaaggatcatcatggacgtctgcggatctgcaagttttgcctccagatctgcaaagtcaatatgataggctccatcttcataaaccagaaggctctccagtgcatttcttccattatttaatatggaagaaaagaaatgattataaaccggtgtcatgacgagaacattctccgccggtgtcgtcaatttgcgcacaatggacgaaagggatggcaggactcctgtagaaaaaagcagccagtccttttcgatcgtaaagccatggcgtctgccccaccagttgatataagcatcataccactcctccggcagatcggcatagccaaacactccatgatccaggcgttcctgcaaagccttgcggatctccggtgctgccggaaagtccatatctgcgacccacatcggcagttcattttcttttacattccatttataactattggtatttcgtctgtctaccacttgatcaaaatcgtacttcatcgtaaacctcctctgttccttacctatataggtttgcctgctattttatcagcactttatactataccacaactataggataacaaggctacgaatttttctatatgtccgtcctaatcttccataatactgcccaaaaattcggcagtcgtgcgtaccagagtgatctccagggaagaaatctcatcctgccccaaaaggacaacggcacccatgatatccccgtgcacattgacaacggcaatcgcctgctcggcatattccgtctgggctttgtcaaccagtggaatgacatcctctgctttttttgcatgataatcctgccgtcctgcgatcaggctttccaactctcccgtgatgggctggttctcatatgccttcttgccattgccagcagccgcgatcacatgatccatgtctgtgatacagaccagtttaccggtcgtctccgccagcacctttgcatactgggctgcaaaatttgccagttctcccaccggagaatactttttcaaaatgatctcaccctcacggtccgtataaacttccagcgggtcgccttcccggatccgcagcgttcttctgatctcttttggcacaacaattctccccagttcatctatacgccgaacaatacctgtggctttcatcaacatcttcctccaacatccaaattttctgtgttatcacttttgcgttagtatgtggaaaaaatgagaatatatgctatgatatgaatagaaaataacagaaaggttatgaccttatgaattttaaattacaatatggcgaagattttgacgaaaattacctgaaacgcatcatggagatcgacgagatcgtctatgcagaagatggttatgtcggcgaactgaaaaacatggttgcccgttatctggtcgatccccgacagtttgtatgtatcgaagataccgagagcggacgtctggcgggatatatcaattttatcccctgtaccaaggcgctctacgaagatatccgctaccaaagcgagcatatccgcgatgacgatatcagaccgcaggagttagaacccctgaaacagaccggcaatgatctttttatcatatccattgccctgcacccggatttcaaggataccgatgccatcaaggatctgtccaacggctggatcgactatctgaaccgcttggaaacttccggctatccgatcacaagcatcaccgcaaccgccgtatcgcccgatgggcgcaaggcgctgcaccgcatgcagtttgaacaggagcgcatcttaagagaggatggcaacattgtttacgtctgtgagggacaaaacctccaaaaactaaagaaaaaggaattacgattacatggccaattacgaaaatgatatttatctgatgctcccgctggcggacaatcagaaaaactggcgtttggacgaactcggggtcttaaaacaggcatccttagataagcagacagcatatgcaagcgtggctgatgacttctcccgaagccttttaaacaatttacaatcttatctggaatatgaatgcaacaacgtggttgtggatgagttgcgaatggcatatctgggacagtacgaatttttacattctacggatgactatcccaagcacggggaagatccagatgtggtcgggacatctacttgccagttgatactgacggcacaccagccaacccatatgtatattcttactgtggttctgccaaaagatactgtcaaagatttttccaccacacaggtgctggatcagttgagccacgaaagcctgtggatcgcctgtcccaaggatgccgggcaatatttaggcatcaacacaaaaaaatatacagccatcccggactacgtcgatctatacgactacctcaagtataaatacggactgctcaaatgcggttccggcaaggcttttctcctgctttccgatcgcccggaaaaggaagacgaatttcgctgtatgatggcgggcgaaacctacgacagccagcatcaggatttccatatcgccagcgacaatatttcccagatctgtcagaccaatcatgcacagtatgactattatcaggtctatatgtcagaaatggtcgtcgcctgtatcatggaaaacttttctgaaaatatggaagaaagaattgatatcacggcaacttatgcctttatcgtaatcctcgccatgttccagaatacttcgatcgaaaaggtcaatatgcagatctccaatgctctggccaatgacggcgacatttcccaccaggagatcctgggactctaccgcaatttcggaaagactgtccgtttctgggaaaagaacaactataagtattgggggacacaacaggaagcccagtgtatcgtggaagcctttggcaataaagaactaaaagaaacctactacgaacatcaggaatttttggaacatatcgttgagttaaagggtgcgcagacagaagaacgtaacggcaccatcttaaacatcgttgccaccatccttgccgtaatccaggtacaggattttgttgtagaactcttggaaagtttttacaaaaaagccggaattgacgttacatacgccggcagcaccttttctaccctgatcatctgcggtaccttttcctttgttctggtactcatcatcatcaaccgtatgcgcagcaagatgcgtaaaggcagcatgcatataaaggagttaaaagactatgacatctaaagaaaaaggtatttggaacaataagcccttctggtgcatcctcttattcggactggctgtcctttgttccagtatcaaagttttggtcctgccacagggcggaagtctgacctatttcagcctcatgatccttgggcttatgacctttatctacggaccacgctatggtctgatcgcctccgttttatttggctttgtccgcttgggcatcacccatctgaccggagaatatatcaatcccaacatctggtctatcctattagaatacccgatcgcacatggtgttttctgtctgggtggatttctacaggaacgagggcaaaagaacgattatacgattgacgatcacgaacggatccaggcggaaccatataaattacgcatgggatatgtcatcggcgtagccgccatgctcgcctgctatgtcatttccgcagaacttttctatccgccttaccgcgatggatttttcagcaacttattttacaatatcgtctatgatagcagttatcttttgatcgagggcagtttttccctgctcctcttatgtgtcccaaaagtagcagatgccatctactacatcaaacatgtggcgacacacatggatgaggatgacaccttagaatgtttctaaagcaggacatctgccatcacttttcagtccagattataagaccataaccagtgtgcccacgccgatcaggatacaaccgatcaaagatttggctgtaaattcctcgtgcaggaatacaaatgccagtaccaaggtgataacgacgctcaacttatcgatcggtacaaccttagatgcctctcccatctgcaaagccctgtaatagcacagccaggatgcaccggttgccagaccggataagatcaaaaacagccaggacttcttgctgatctccgtgatcccactctgtgtatgggtcaaaaataccatcccccatgccatagcaacgaccaccatggtacggattgccgtcgccagattggaattgactccatcaataccgatctttgccaaaatagacgtcaaagctgcgaacactgccgaaagaactgcaaatactgcccacacaaaaatcatctcctcttacttacatttaacttttcctcttatctgtaaataattatatgcctatttttccaaatgaacagcgtttatataaaatgcttttctttgcaatagtgatagatctcctgcttctgcacttccgcaaaatcttgggcaacctccacttccatattggcaatggcataataatctaccagatcccggtctttcccattggctgccagagaaaccggtcgtcccatcaatatcaaaaaagataatcttcgccatatccactttctcctatgcttcgtttaagcaaccacagcaagcaggcgatccaaaagcccggttgactgtaggaagagaattaccatgatgaccggtgccacatacttgatcataatgttgtataaatgctttctggaaaacttgccgttcgggtgctccatctcctctgcgatccattttggaccgacgatccagccgaccaatatggtagaaaataccgaaatgagcggcattaggaaactgttgctgatgtaatccataatatcaagtaactgtccggtcgagccattcggcaatttgacttcgacataaaatacactgtagcccagtgcgatcactgctgttgcaatcaggtaaatgatggtaaggacgcctgtcgttttctttctctcagtgtgaaatacttccatgcagtttgccgtgatggcttccaaaacggaaatgcaggaagtcagcgccgcaaatgctgtcaaaaggaaaaataccaatccgatcacatagcccgcttttcccatggtgtaaaaggtctttggcagtgccacgaacataaggctaggtccggcagacatgccatcaataccggaaaatacaaagatggcaggaatgatcatcataccggcaagaatagcaacgccggtatccacgatctcgatctgtgcaaccgatttattgagatccacttccttttttacataggaaccataggtgatcatgatgcccatggaaacgctaagggaaaagaacaactggctcatagcatccaaggtaatctgcaggaaacgcgatagcgtcaacccagacatatccggtatcagatagactttgagtccatccagacctgtccgcacggctccactctcatcccctgatcttaaagtcagggagaagatggcaataccaatgaccagcacaagcaagatcggcataacaaatttggagcatcgttcaatgccgccctcaacaccattataaacgataaagccggtaagcagcatgaagatcaagccaaaccagaccgatgatgggtctgtgataaaatctgtaaaataatcatcctttgctgcagctgcaaaatcgcctgtcagatagaccgtaaaatatttgaggatccatcctccgatcacggcataataagtcataatgagtattgggacgcagaaagtcagaatacccagttttttccatcccggccgcatagtctcataagccgctatggcggactgtcctgtctttcgtccgatcgcaatatctgtcgtcagcagggtaaatccaaaggtcagcaccaaaacgatatagatgatcagaaacagaccgccaccgtcttttgccactaaataaggaaagcgccataagtttcctacgcctacggcacttcctgctgctgccagaacaaacccgatctgaccgctaaaattactcttctttttcatctttttaatttctcctgtttttatcgttattttgtatttttccgaaatagaaaataaccactgcgtaaaaatacacagtggttatattatagcaagaatattctgttgtgcctaggaatttcttccttaatttccgttaatttccactacatccgtgcttatcttcgccacaagaatgaccaccacaagaatgaccttctccatgaccatgatgtgagcactctacatttgggttgtatcccagattatttgccaaaagtgcctctactgctgcatcacaagatcctgccactccaccgtacaactggataccagcctgtgccaatgcattctgtgcaccgccaccaatacctccacagataagcacatctacctttgcacctgtaagaaatcctgcaagtgctccatgtccctgtccgtttgtatccacaacctgggtatttacaatcttaccatcttctacatcgtaaagtttaaactgctcggaatgtccaaaatgctgaaaaatatttccatcctcatatgtaactgcgattctcatttgcttttctcccttctcttgaaaccgggcaccatacttatgtctctggcaaccgccacaatgacatacgtcttccttgccttcacaaaggcggtagtctcctccctcaatacgaaggggcatgccttctacgagtgctgtcgcaatttttgctctggcagtattgtaaatcgcctgcgctgttgtccttgccacctgcatataactactgcattcttcctgtgaaaaaccctgctcatcaatcaagcggattgcttcaaactcatcaaccgtcaaaacgactgttgcctgattttcatcctgtcctacaggcacaaagttacatacctttggcatgtggcatacttttctgcactttctcggtcttggcatgctacggctcctttgttattggcatatgctagttaatatttccattcttactctactctcatttatggcatatgtcaattactattgtaagtattttcatcttgaaatgaatattttttacaaatgtttatccgtgcaatcctgcggactgacggatcatatcctcgactacgatatcgtagatttccccgatactattacagtattccaaaaccttccacggctcatttgtgtgaaaatgtatcttgatcagatcttcgtctcctgctgcgatcaaacaatttccttcaaaatgatcagttatataatctgcgatctcatcttcatcaagatcttcatctctacgatcgatcagaagctgcgtatcataccgataagcaaactgatcatcctctacatcaacactatgaatctctcccatgtcgtcctccttcattatctttcattcttctgaataggaagataccacaaaatcatcctgagtgcaattttttccgctattgccctgtgtgtatgatccatacgctttaacaaaactttaacatcagaaaaatatttgcgaaacagaaactgtgtattctttcatcatcaaacaaccgtgtaatcacacacaaaaattgttgaaatatggaaaggaaggtttatgataatgaaaaaaagtacatttataactatgctgttgggaacactcggaggcctgcttttcgcactcggca

SEQ ID NO: 12461 - DNA, 17292 bp, Unknown
  gut microbiota DNA sequence
catcttcctgcaactgttctaccacctgcttgtatatctcttctgccttttccggctcgatactctcataatattccttatatgcacttatatcgggtgcattgtccgaaaaaacaacctcttgatagaatttttctttttcttcttcaaaagcggcttcgttttctttatagttctgcagttcctgtgactgcgcctctaaatctgccacatgggcatccgagtcatccttgcttgccttgacatccgccagttccttctccagttccttgatgcgctttaccgcatcctcaacagaatcataggcataggcttcgtcctcttttgcatattcctgcacatccggcaggatcttattgatcacaggtacatcctttagaaccggatataagacggtcgagccaaaaccgccgacatccatctttaccagcaatcccaagatcaaaagccacaataatacgataaagacagccacaacgccgatcaggactttaccgcctaaggtttcttcttcctcttcgccgttttcttctttcttttctttcttacgggcgcgctttgcttcctttgccgcctgtctctttgccttcttgtcttccttttcgtctgccattcttttactcctgttcttctttgctgtgataggtgtaacttaccagttcatccgtcatcttgccttcttctgccgccaattcttctttgaaggcttcaaatgctttttccttgaggttttcatgggtctttctctctttcatgacctcattcaaacgctttcttgccatctccagatttcgctgtgccgtgtgtaccgcgatcatctggtcgcggatcatggatttaacggaatcgcttgcccgcttacaggtctggatctctacgatgtcaagtttcgcacttgttagttcttttaatctggcttcataaccggctttgcggacaaaaagtttttgcagtttttcctgttcctccaaaagccttgcattggcgataccgtaagccactttttcctgttcttccatcttttctttgatttccagaatattctgcatgcgatatctgaattttgccatctgccgtcacttcctatatctatgcactctcgccgaacatctgctccagtgcgccaactacctcgtcaaaatcaaacttatcctctgtactctggcaaaggaaagcattgacctgatctatcttttcgatcgcataatcgatattgttgttggatcctgccttgtaagccccgatattaatcagatcttccgcttcctgataggttgccatgacattctttaatttgcccgccatggtcttatgttccttggtcgcaatcgaactcatgacacgggaaatgcttgctaagacatcgatcgccggataatggtttttctgtgccagttttctggaaaggacaatatgtccgtccaaaataccacgcgccgtatccgtaatcggttcattgaaatcatcgccgtcaacaagcaccgtataaaggccggtgatcgatcccttatcggaattgccggcacgctctaagagttttggcatctccgaataaacgctcggcggataacctcttgttaccggcggttctcctgccgcaagaccgatttctctttgcgccatggaaaaacgggtcagcgaatccatcatcaaaaggacatccttgccctggtcgcggaaatattctgcgatcgctgttgccgtctttgccgcacatttacggatggacgccggtttgtctgatgtcgccaccacaacgacactgcgcttcatgccttccgatcccaagtccctctcgatgaactcacgtacctcacggccacgctcgccgatcagggcgatcacattgatatctgccttggtgtttcgtgcaaacatacccatcagggtagattttccaacaccggatcctgcaaagataccgattctctgtcctttgccgaccgtgatcagtccgtccactgcctttacgcccagcggcaatacctgtgaaatgatctcacggttcataggctccggcggcgttgcgtcgaccggataatgctggggcagatagaggtcctctgcatccgtcggtcgtccgatgccgtctagggtgtgccctagaagttcgtccccgaccggaatggaaagcggtgccttggtattttcaacaaccgcaccaataccgatgccatcgacactgtcaaagggtgtcagaagcagatgcttatcacgaaatccaaccacctgtgccatgacagcctgcgaacggtcgcctcctacaaaaatacggcatagatcgttcaacttagcatccggtccgacagactcaattgtgagccccaccactttcgtgacgcggcccagacagtcaaaatatgtttcatttgtaagtgctaaatatttgttacgatcaatttccaccttatatctccattaactaagggattttatatccttgatcagattgcgcatctgggtatccatgccacaatcaaaaagtccaccatcggtctcgatcatgcattgtgtctcatccaaaagcggatctaagacaatatctaaagtcatgtcctgccctacttttgcctgtaactcctctttatgcgcacgtaaaaattccagattggcttcgccgacacggatcataaactccttactgccttctatgttggcaagtgcctgatcgacggcatgcaagatgatctcttttttatctccaaactgcaccagaaaaactttttctaccacatcacagaccacatccaccaactcgtgctccatgttcttttgtttctggtcgtagtccgcctgcaactgctctttttctgcctgcatccggctttctaattcccgctgtctggcagcggcttcctgtaagccttgctcatagccctctttttgtccttcggcttcggcatgggaccgcatggcatctgcctgttctcctgcctctgccaggatagcatctgcctgctctctcgcctcagaaagaatggcatccgcctcttcttttgcctgtgcgacatagtctatctccggctccgcttcctctgcctcctccggcatctgctggccaagacattctgtatcttcatccagtgactccccgtccataggtacaaaggcatcctcagaattcagtgcctgcatctgacgttttttttcttcgcgtcgtctctcctcgatcttttctccgaccagttcattggagtcgatgacgcaggtcttttgttcttcctgtggtgccatctgcacacgatataatatattagacaacgagttcgtcacctccacctctggagattacgatctcagcagaatcctctaacttgcggataataccaacgatcttctgctgtgcttcctcgacatccttcatacggacaggacccatgaattccatatcttccttgatcatggtagccatacgtgaagacatattcttgaagattgcagcctgcacttcttcgttggcaccctttagggcaacactcagatcactgttatccacatcacgcataacacgctgaatggctctgtcgtccagaagcaggatatcttcgaatacaaacatcttcttgcggatctcgtcggcaagttccggttcttcgatctcgagggactccatgatacgcttttctgtaccacggtctacggtatttaagattgctacgatggcatccacgccacccgcgatcgtgtaatcctgattgatgagggatgataactttcgctccaagacgcgctccacctccttgatgacttccggtgaagtacgatccatggttgcaatacgttttgccacatctgcctgcttgtccggatccaaagcacccaagatcatggatgcctgtcccggtgacaggtaagataagatcatggctatggtctgtggatgttcatcctggataaagttgagcacctgtgaaggctctgtctttcgtataaactcaaacggtcttacctgcaaagaagccgtcaacttggtgatgacacgtgttgcctcatcagcacccagtgccttctccaaaagttctttggcataaccgataccaccttctgcgatatactgctgtgccagacagacctgataaaattcgttgatcacgtcctcttttaattttggagatacactctgtgtattggcaatctctaaggtaagttcttcgatttcatcttcttttaaatgtttaaaaatgtccgcagatttttctggtcctaatgtgatcaataagattgccgctttttgcacaccggataattcttcatttgccataattaaccccaatcatcatttaaccagttgcggagcaaggatgctaccgcctccggattttcatctacaaatttttctatcagaactctcgcctcagacttttcattgaaaccgatatcatccaactggtcttcctgtgcctccaataaagattccacggtaacttcctcggcaagggcttcttcctgctgtgggcgcatacttctgaataccacaaaagcaagcattgcaaagatcagcactgccaagatgatctgtaaataatccgtccagtctctgccactgccctcagaatactggaacatcgggatctcataggcaacaatggaaatattgtcggtagagataccggtcgctttggataccatatcataaaaatcctgatccacatccgtctttacacggtcagaattctgtgccacaaattcatcgaaggtcatattatcaagcgttccgtctgcctttaacttgtcctcgttgtagatcacccggttggttgcaacaacagtcagggaagaattgtccagatcgatcgttccgactgccttttccgttgtcgtgatcgtctcgctcggcagatagtcctctgtaatgtccgaagtcgtagaggaagtgatcgtaccgtcttccaagacataggtcgtatcatcatcattggtatcggtacccggtgtaccgccggcacccgaggtcgattcggaagtagactcggtacggctgtccagatagccctgtgtctgtccgtcgtcaacatagtaatgatagtcctcaaccttttgctgatcgaaattcatatccagattcatacccacttctacattgtcatagacattggtacccaagataacgctcttgaccgcacttgtcacattggcttctgccttttgctggactgtcagattggaagatgcctttcccgcagtcgaggattcatctccgccggagaaaagcgtattgccgtctccatcaatgatctcgatattttcagtcgacttgttgcccaaagccgttgccacataacgggcgatacctgccgcctgctcctcgctcatatcatcactcagttgcagattgatgctggcgtatgcctcctcatccttggaaaggatggtgccgtcatctgatggcagggacaaggtcacatatgccttggatacattggaaatggtctccagatcatccgccatcttttcctctaaatataactggtactttttgttcttgtccgcctcagtcgtactaaaacttccatcgatggcatcactgatgctgtagccgtccgatgggatgtcattgcttcccaggaggatggtcgcattggcacggtcttcctgcttgaccgtgtaggtaagaccgtcatccgaaacttcataagtgatactgttactgtctaaaagatccttgacagaagatgcctgttttgccgaatcacaagtgatcagattgaccatggtcggtcttgtcatgacaaatcccaagatggaaaatgccacagcaacgacagccgcgatactgataatcagcgccttttgtctggtgctaaaattcttccaccactccactattcgatttaatatctgttgtattctctcaggcatgacttacttccttctattctttagatctgcatattcataatcgtattgtaaccggaaatgaactggttacggaccgcaactgtatattgcagtgccagattcgccttccgctctgcgatcaaaagatcgtgcacattgtccgattctcccaaagcaaaggataccgcctcagcagaggcattgttctgcagactgttggtatcatccaccattttcatggcattgctcaaaatagtgtcaaaactgccgtccgtagccgaagtctggtttgcctgccggaccgaagattgattgttggttgtcttgtaaagcccgtttaaggctgctgctgatgtaacgtccattgttttctcctaatgcattatgactgaccgatgttaagtcccgcctgtaccatagacttcatggcattaaaagcggtcgtgtttgcctcataggcgcggctgctgtcgatcagattggtcatctcggttaccgtattgacatttggataagagacatagccattctcatccgcatccggatgggacggatcatactccatggtaaaatcagtctcataatcctctgtcacggaagcgaccttgacaccattgccctgaaacttcttggtatcagataagatatctgaaaacgacggtgtgatctccttttcctgaaaagtgacgatcttacgcctgtaaggcgtcccgtcctcggtccttgttgtatttacatttgcgatattctctgcgatcgtatccatacggaaacgctgtgcgctcatgccggatgcgcagatgtcaaatgattgaaataatcccatggtctacctccttatggtgtctgcattgccgtgttcatgcgggtaaattcattgctgaccgcagacgtcaatgtctgatagcgtaactgttccgatgccagttccacattttctgtatcaatatctacattgttgccatccaagcggtaggaataagacgcataatcagtataagtcctgccttccaacttgtttaaggacacattgtccacggctttttgcagggtatcatacttagaacttttgagttctctctttaagacatcttcaaatgcaacatcctgtctcttgtagccgggcgtgtcaacattagcgatattgttgccgatcaccgtctcgcgcgtccaactggcatctgctgcccgatctagcacattgatataactaaaggcatttgaattgatcatgctcctacctccttttggtacatacttagcctaatcttattatattataaattatatctatgaaaacacaagtgttttttacatgatattgtgtcattttctaaagggcgacacaagtatttgtaaaaaaagaaaaggaacctacggtcgtccataagttccttttactatcatccatccttgctctatgcagtttaactattgcgtctgaccttgtccaactcatcaaacacagcatcatttaataccttgatgtaggttcccttcataccggatgaccgggattcgatcacgccggcgctctcaaacttgcggagtgcattgacaatcactgatcttgtgattcctacacgatctgcaatcttggaggctaccaggattccttcctctccctccagttcatcaaagatatgaatgatggcttccaattcggaaaatgaaagcgtactgatcgctgacttcacgatctgtatcttgcggttctcctctgcattctcttcattgacagaccgcatcatttccagtccgacaacggtcgttccatactcgcataaaatgatatcgtcgatatcatatggcttgtcataacgatatacaaaaagtgttcccaatcgctcacccgcaatatccagcggtgcgatgatggcagaataacgattgatatctgccccctcaaagcccagagtctgtaagttgacattctccttggtggataagatgccaagcagacgctcgttcaacatcggatcaataaaaccgcctacctcatcaacaatgagttcggtgatgtccggtgtagacttgctgtggctgacacctaagaccttgccctttttactgataaccaggatacaggaatccaggatctcggtcagaacctgacagatatcgttaaatactacttttgaggaattgttgttatgcaataatttgccgatcttcctcgtcttatctaataattgaacgctcatgttcttcctcctcgcgcaacatactacatttcctaataactaaagagattttagcacaatagcataacaattacaagagtattctgaaaactccatatacttatacgaattgtgtcacacgagagaatattttaaattaagcctcgtctttatccgctgtctcgacatgccgacattcctcattggcacatacgagtttgctgcccttgcgtaccatataggaaccgcactccggacatggctttgccaccggacgtgcccatgacatgaaatcacagtttggattgtcctcacatccgtaaaatcttcttccctttttggactttttcataacgatgtctttgccacacttcggacatgccacaccgatcttttccagatacggcttggtattgcggcaatccgggaatcccgggcaggctaagaacttgccatgcggtccgtattttacaaccatatttctgccacattcctcgcagacaacatccgttacttcatcctcgatcttgaccttttgtaactggctttccgcgatctcaacagcttcctccagatccggatagaagttgctgatgactgacttccagttgacggttccctcttctacctcatccaaaagtccttccatattggcggtaaagtgttcatccacgatggacgggaaagattctttcataatgccgttgaccacttcaccaagttctgtcacaaagatattctttgcttcctttgtgatatagcgacgcttcaaaagggtcgaaatgatcggcgaataagtacttggtcgtccaatgccaagttcctctaaggtgtgtaccagcgatgcctctgtaaaatgtggtgccggctgggtaaaatgctgcttttcttcaaaggacgaaaatcccaattttgtatcttcatgtaatccgtgcgcactgagtttcttgtcgtccttctcctcatcggaagccgtatatactaacataaagccgtcaaaaacgcgcttggaatctgctacggtaaaacgataatcgcctgctgcgatctttacattgacagtctcatagacagcactgctcatctggcttgccacaaaacgcttccagatcaactggtagagacggaactggtctctggataaggagtccttgatctcggacggcagtcttgtgatatcggaaggacggatcgcctcatgggcatcctgtacttttgtcccgtttgcctttgccttggcagccccttcctgcaaataatcctctccataattctgtgagataaagtcaactgctgcgctctttgcctcatccgatacacgggtggaatccgtacgcagataggtgatcagaccaactgtgccattgcccttgacgtccacaccttcgtataactgctgggcgatgcgcatggtcttctggatagaaaagttcaatgccttggaagcctcctgctgtaaggtagaggtcgtaaatggcagaggtgcctttttctctcgcttgcccgtctttacagactctacccggtaacttgccgactgcagttggtccatgatcttgtctaaggatgccttgtcgccgatatccagtttgccattcttgtcgccatagaactttgccacaaattgcttcttggcatccagattatccaaaacgacatctaaggtataatactcctgtgggataaatgcctcgatctccgcctcacggtcgcagataatacgcagtgctaccgactgcacacgtccggctgaaagccctcttttgacctttgcccaaagcaggggactgatcttgtagcccaccatacggtctaacattcttcttgcctgctgtgcatccaccagattcatatcgatctgacgtggattcttcaaagaatttttgaccgccgtctttgtgatctcattaaaggtgatacgctctacatctttgccctctaatttcaaggcttttgtcaagtgccaagaaatggcttctccctcgcggtccgggtcagttgccagatagatgcggtctgctttttttgcttcttttctaagtcctgctaaaagttccccttttcctcggatcgtgatgtattttggttcatagtcattggacgggtcaaagcccagttgtgactttggaagatctctgacatgtccattggatgccatgacctcataatttttccccaaaaatttcttgatggtttttacttttgccggtgattccacgatcacaagatattttgccattactctctccttatatgtaatccgctatcgtaagcggacgtattgattcttaaaacattcctgtaacatcttcttgtcacacaagcgcatgatgacagacaatagatacaggagttccaatccactctccgcaagcaccgtctcaatgcttttgggatagaaatcaaagcaactatacaccaacaattcatctttttcaaggataatttcatttgcctcaaaggcattgccacaggtcagatcgctaaaatgtgactcctcgatttcctcaataaagccactcagcgaggtgatgatccccgctccctgtgcgatcagacggttgcatccagcactcatgacatccgtgatccgcccggggatcacatagatatcctttccctgttccaaggcaaaatccgtcgtgatcaaagacccgctcttttcctttgcctctacaacgaccacatattttgcgattccactgatcaggcggttgcgcggcgggaactgcttggcgatcggctggctgcccatggcatattccgacaaaaggcagccgttttccatgatgcgtccatacaggcttctgttttctgtcggataacacacatccacgccacagccgaagaccgccatggtcttttgtcccgcctgcagacagccctcatgggcataggcatcaatccctcttgccataccgctgatcaccacatagccctgctttcccaaaagatacgccagttcctgcgccatctttttgccataggcactacaacgtctggcaccgacgatggcaacgatcttttttgtctgcgggatctgtcccttgacatacatgccatagggcgcatcaaagacttcttttaaatagtagggatattccgtgtcctcaagtgtcacaaaagatgcccctgtctgtaaaaatgtctgatatgccgtgtcaagatctgcctttttcctttcccttaaaaagatgtccgcctgcctggcgtctaaaagtccgtcctggcgcaggcatttttcggacagatcatatatggcatgtgcactcttgtatctttctaataggttgcgctttgtccggttgctcaagccctgcagacacatccaccaatatttatatttcatatcccactctcccaataattcttttgaattccacgataacagaccgcctcctgcaaatggctgaccgtgatcttctcactgccctccatatccgctatagtccttgcgacacgcagaagtttgtgataggttcttgccgttaatgccaactgctcaaagacaagttccatataggcttcctcctccgtgcccaatgcacaatactcctccatcttttctgccgggatctggctgttgaaacggattgctgtccctgcaaaacgttctctttgtaaggcatggatccgacagaccctctggcgtatggcagcggaagactcctcactatgatcgcttttttgcagatcatgaaaaccgacgcccgccgcctccacgcacagatcgatgcggtctaagaggggctggctgagtttgctatggtagcgcaacaaagattgtctggagcaatgacattttgccagatccgggtaataaccgcagttgcaggggttcatggctgccacaaggacaaaatccgctggaaagcaataatttccgctgacgcgcgccacacatacctgcttgtcctccagcggctgacgcaggacttccagcgtactctttttaaactctgttaattcatctaaaaaaaggacaccgccatgcgctaaagagatctcccccggatgcaccatactgccgccaccgatcagcccctgttccgtgatcgtatgatggggactgcggaaagggcgtttttgtatcaactgatccatcccctttagggcaccacacacactgtagatcttggatacttctaattgttcttcctgactcatgggcggcaggatggtcgggatgcatttggcgatcatggtcttgcctgcccccggcggtcctaccataagcatattgtgcataccggaaatggcaacctcgcaggctctttttaagagtctctgcccatggatctggacaaaatcataggccttttccatagtctctttcttgatctcttccttattttcttccttatctacgctaacctctgcatccccacgcagacaggctaatacctcctgcaaatgggacagaccaatcacccgcatgcccggcaccaaggatgcctccttgacattttctttggcaacgatacaggtctttaatcctgcctccttggcacagatgaccatgggaagaactccatttatcccaatgatcctcccttccaaggagatctcccccgcaaaaaacatatcctctaatatgtccgtcggaaatacctccatggcagccagcaccgcaacggcaaccggcagatcaaatccggatccagactttcttatatttgccggtgccaggttgaccgtgatccgcttaatgggcagttcgtattgacaatttttcagggcggtgcgcacccgctccttggactcacgaacttctgacgctaaaagccccaccatttcaaacatgggcataccattgctgatatccgcctccactgacaccagacaggcatcaatgccggacaaaacagccgtatgaactacactatacatagactcctccctttgtattcttctcacttggaaaaacaccgcgaatcacggtataacgaaaaaagatgaaattatcataacataaatttcacctttttcaagaaataattatgaatttttcaaaagagccccgcgtaatttttccaaggctctttttcctatcctcgatacataagaacgggaaattcctaactgtccagcgatctctttttgcgtcgccgcacttagtctgccaatgccatagcgcttgcagatgatctcctgttctctggcgtttaagacctgtggcaggatgtcacgcaggcgaagcagatcattttgctgatccagcatggctgcgatatccataggctcctgctctaagacatcatacaaactgatctggttgccttccttatcgcttccaatcggttcaaagagggaaacatcctttgcctgtttcttacgcccgcggaaatacatcagcaactcattatcgatgcaccttgctgcataggtgaccagtttgtatcccttggccccgtcgtaggtatcgactgctttcaacagtccgatcgtcccaatggataccagatcctcgggatcttcgcccgaaccatagtatttcttagcgacatgtgcgaccaaacgcatattgtgctcgatcagactggactttgccgtcagatctccatccgccatctgtcgcaaaagttttgcttcctcttctgtgctcaggggggataaaaatgttttcatgtcgcctcagaaaatcattttttatattgtatgtgcgcatccccctgcaagtgcctttccactccaaaatttagcggatcaatccggttaagccaatctttttatgcaccttgcgcaaggtcttattggcaaaatatgccgctttcgcatcattttccttgatacagccgtcaatgtaagccttatcctttaagagttcctcataacgcttttgcagtggtgccaattcatctgcaaccgtctcaccgactgccagtttgaagtctccataaccttttccggaaaattctgcactgatctcgtcataggtctttcctgtaatgcagccgtagatctccatcaggttgctgatgcccggcttgtcctctccatagcggacttctgcctctgaatcagtcacggcacgtttgaactttcggataatggtgtccttgtcgtccaaaagcaaaatagtcgcattgacattttcatcggactttgacatcttcttggtcggatcctgcaaactcatgaccttggcactgttctttccaaaatatgcctcaggaatggtaaatacctcaccatataaattattgaaacgttctgcaatatccctggtgatttccagatgctgtttctgatcaacaccgactggtacaacatctgcctgatacaaaaggatatctgctgccatcagtaccggataggtataaagtccggcattgatgttgtccgcatgtttggctgccttatccttaaactgggtcatacggttcaactcgcccatataggtaaagcagtccagaacccatgccaactgtgcatgtgccggcacatgggactgataatagatgcagttcttctccgggtcaagaccagctgccacataaagggcatataattttctggcattctgacgaaattctgtcggattctgacgtaccgtcaaagaatgcagatccatgacaccataaaaacattcgtactcatcgcaaaggctgacccagttcttgagtgctcccaagtagtttcccaaagtcagagttcctgttgcctgcattccactgtataatacctttttctctttttccattttgtccttcctctcttttctataagatctatgcattatgcaaaacttgatgtctcacataagaaaatgtttcttcctcgcccttttctgctagcatgacaagcagtttttccaataaatccgccgtctttggatgcatgatgtatttatggcatcccttcttataatactccagtgcactggcatccgtataggcatctttcatataattgcggctggcagcaatccggtcgacaaacatctcaacgacatactgtgtcggcatttccataccgaccatgccctccccgggatttaggctatagtcgatccagtattcaaaatgatgtttgttgcgtcctttgtgatgcagccatgccatcgatacgcctgtggcttcccgctccgcattgttgggactgcggtcgccctgatagtagcggcagccgactaaaaattcgaccggggcatacttggacagatcatgcaaaagtccctgtttatataaacctaatttaaaacaatagcccatgaccagatgtctgtgatgggtgatcgtcttaaagtgctctaacgctttcattatactcctttccctgctccgcgcaagaaatcaaaatactgatggattgcggtgccacctccacatgtccctgctcctctaaagcgaccggctcaaaggtctgccctatatgatcagccgtattcatgacctgcatccagcgtttttcctgcgacagacgcggcaaggcgatccttgccctttcataatgaaaattatatgccacatagacatcttctgcttcccctgcataggctccggcataaaggatgccaatggctttttgctcatccccgacctgcatgagccatggttctgcaccatgataagacagatccggcatgcccagatgcttgtaatcgttaaaacacatggcattttcctgtcgcagcacgcggtgttcttttcggaaagcgatcagattttttacaaaaatgcctaacgccttggcatccgaagaccggttctgatactgtacccagccaatgcgattgtcctgacaataaggattgttattgccctcctgggaattgaggcactcatccccgcccacaagaagcggtactgcctgtgataaaaaggtcatacataatccgtttttgacctgttggaagcgcatcttctggatctgtttgttcttggtcgcaccctctgcgccgtaattaaaactacaattaaaattgttgccgtctcggttttcctcgccgttgtcccggttgtgcttttccccataactgtaggaatccagcagggtaaaacctgtcgtattcgccatataattgacaaatccataggagacattctgtctgcgcaaataattggtaaactgcaccatagacccctgcatgtgattttgtaattgacggcctacatattgaaaatcatctttatacaaaaagatgtgttttttccctttttgttcctgcaagatctcctccggcaggttttcgcaaaagatcttggtatgacggaaacgataggatcctgcgatccgcttgatcgggatattacagcccagcaggtggaaaccatccgcgccataatatcttacccaataccagagacaatccagcatcatgtcctgggaaacctctgatgcaaatgccatttccagaatcacttccatgcccgcttcgtggatcttttggatcataacccggcaccgctctacggcatgtcggccgccaaaataggatgcctttggtgcaaaataataagcattgccatagccccagtaattggtcttatccaatgtctgccaccgggtgtggctgattcccttttcgtccagaagcgttttcttttcacaaaagacttcttcaaattcgtagatgggctgaaattctatggatgtcactccaagtctctgcagataaggaagtccggcgatcagtccggcatcattgcccttttcggatgccttatagccatgctgcatggtaaagccacgcatatgtaacttatacatgaccatatcccccgcctcaataaaatgccggggtgctgcaatctcctgcccaccggatacaaagccgccatatagaccgtcatctgctccgatgcgcgatgcatccttccacttttcacgccctacaatgcttctggcataggcatcaacaaaaaagtgctccccacaccggatccgataacagcagcgttcccaatgcttacccaagatctctaccgaatagacctgtccgatccgatatgcctcggacaaatctattgtttggatcagtttcttggatctacggtcatacagacagatagcgcaaggctggtcctctcttacaaaaaaggtaaacatcatgccgtctgctgtttcttttgtaccataactttcaaaatctccgattcttattttcatatgccccttcttacgcttgcttaaaactctcaaaaatctctattcattatacttgaaatgttgcttttttccaaatcctttcgtataatcttgtttgtttctataagatatcatacaaaaaacaagaaaaggagacggttatggcaaaagacgaagtttt

SEQ ID NO: 12462 - DNA, 31369 bp, Unknown
  gut microbiota DNA sequence
ccggtagatgaaaatgatgatgatgtggtagtgaccatcgaaatggatgacggttctgaggtgacctgtgagatcctgaccatctttgatgtcaaggatcaggattacatcgcccttcttccttatgaggaaaacggcaaggaagtcacagacgatactgtttatatctatcgttatcacgaagcagaagatggtacacctgccttagaaaatatccaatctgatgaggagtacgaggctgtggaagaacgcttcgacgaactcttagatgaggctgaatttgacgacatggactaagttatgtctgcaccttttctatttcctttaggaaacgggaagggtgcatttttttgccctgttcctgccggatggcaagcagatagaggttttcttttgcccgggtcatccccacataaaaaagtctgcgctcctcctcgatcttttccctgctatccgcctttttggacggcaggatggtctcgttgcaatctaaaataaaaaccgtatcaaactctaagcccttggctccgtgcagggtgtatagtcctacctttccctctttatccagagatttctcctgattgatgcggtctatggcgtctctttctatctcccactgctctatgatctgcccggtcgttttcgcattttttgctgtctcttttaatagtccaatgctctcctgccacttttggtattccgcatcatccctcgcctgctttttaagaaaagcctcatagcccagccttttgcagatgaaggtgatcgccgccggaccggacaggctgcgcaggaagttgatgtccccttccagtttttctattgtcctctgcattccgggctgatcctgataaaaatgcttccatgcctcaaaggtcgtccattcccgcgtcacacttgcccgctgtaaaaaacgatccggccgattcatgatgcggaacagatccgggcggtgcaaaagcggggagcccaaacgcagataggcgatcaggtctaacataacaaagtgcttgtagggatttggcacagcatccttgacataaaaaggaatcttttcatcctgcaatgcctcgatgacggatccaatctgggcgtgattgcgatataagaccgccatatcttcccagtttttccctcctgttctctgctgctttagtatttgcaccaggtatgcggtctccgcctttttatccgcaagcgacacgacctctaaattgcccttcccctccttctgtcccaggatctcttttgtaaaacgaatttcattgtgggagatcagggcaagggatgcctgtaagattcgggctttgcaccggtaattatcccgtaattgtaagatctttacccccggataatagttttcaaaagaaaacatgagatccggtctggcaccgcgaaatccataaatggactggtcatcatccccgacagcaaaaaggttgttgtccggcagggctaaaagacggatgatctcaaattgcagggcattcatatcctgcacttcatccagcaaaagataggaaaaacgcttctgccatttggcaaggaaagatggatctttgtaaagaagttccctggtctttaccaaaagatcatcataatccaaaaggtgataaacctcttttctcgcttcataatgttcatacaattttatgatcttttcattgggaaaataaggggatgcatactcggctaaagcgaccatggtatttttgatataggagatctcctgttccatatgcaaaagatcgtcttctgcacaggacatcttcaccacataagccgtctcttttaagattgcctgcttgctcttatgatccagcaggcgatatgtccgaaagcccggttcccgcctgagcatgccgtaaaaaacagaatggaacgttccaaagacgaccgggtactcctgccccatcagtcctatgaaacgttccttcatttccagtgctgcggccttggtaaaagtgatcacaaggatctgttccggtggaacgcctccttttgtaataagatgttggatacgtctggtaagcacataggtcttgccactgcccggaccggccagggtcagacagggaccgctaccatgacatactgcttcctcttgcgatggactcagcatatagactccttactactcttctttacttttcctcagaccttatatagattttagatttctctctgcaacttttggatcgctgcacggatccttgctaaggattcctctttgccgatgacttccatgatctcggttgcgccacccggagtcatctgtttgccggaaaccgctgtacggatcggccataatacataaccatttttgtagcccttctccgctacgaaatcacggatgcatgcatagattgcatcattggaataatcatccaatgcttccaataccggaaggatctcctgcaagaccgtaagggaagattccgggcttgtcttcattttcttgtgagcgtacatggaaatatcgtattccggtactgcctcaaagaaatcgatatgatctgcgatatccgggaatacctcgatccttgtctttaccatggctgcgatcttcttaagatcatagtccttggtgatgacctgacggatatacggctcagccatctcgtagaacttgtcaaaatccatggctttcaaatactcgccattcatccagcgcagttttaccgtatcaaaaacagccggggacttgctcatatggtgataatcaaatacctttaccagttcctctaaagagaagatctcctgattgtctaccgggctccagcccaaaagtgccacaaagttgatgatggcttcggtcaaaaatccctggtctaaaagatcctcataagaagaatgaccgcttcgcttgctgagtttctgatgttcctcattggtgatcagcggacagtgcacatagattggcacttcccagccaaatgcctcatacaggcggttatacttcggagaagatgataaatactcatttccgcgaactacatgggtgatccccatcagatgatcgtctacaacattggcaaaattgtaggttggatagccgtccgacttgatcaggatcatgtcgtccaattctgcattgtctacggtaatgtcgccatagatctcatcttcaaaagtggttgtgcctgttctcgggttgttctgacggatgacatatggcttaccggcagccagattggcctcgatctcttcctttgataatgacaggcaatgcttgtcataaatggagatctctttgccggcaaccgtttgctttaaactgtctaatctctcctgatcgcagaaacagtaatatgcctcgcccttgtcgatcagttccttggcatactttaaataaataccctgtgcctgacgttcgctctggacatatggtccaacgccgccatccttgtccggtccctcgtcatggatcagtccggtacttttcaaggtacgatagatgatatctaccgctccctctacatatctctcctgatctgtatcttcaatacggagaataaaatctccgccctcatgctttgcgatcaaatatgcatataatgcggtacgaagattgcccacatgcatgcgtcctgtcggactcggtgcaaatcttgttcttactttgctcattttaaaaccttcctcatctaacaatttctatctaatacatcataggaaagttggcaggttttgtcaaacaggagatggcaaaacctgcaatttattttatccgatctgcacttggatctctgcgctgaaatctcctccgatactttctgtccatctttataactgatcgctgtgagtattcccggatggtatgggagttcaaacaatacagcatttggcatttcctgactgcatgttacgccatcgactctttttcgggcaaccgcttgtccattacataccagttctacttcctctgcttgggaaaataccagcacttctaccatctgcccttctcttacatcaaaattccaattctttgatactgcaagaaatccccatgaactaatgacctctcgctttccataagtacttggatcataggaatacagataggacaacaaaaacaatgcaaagtgctgttttatttctcggtctatcattcacaactgctaaaaaaaataccgtggtctgtcttttcgagattatgtgcaggaactgcgcatggaacaggcacgccattatctttctgaaaccaatatgcccatacgtcagattgccctactgtgcggttacgaaaatacaaactttttctattacttgtttcatcgtacctttggcatacatcccatggattatcgtatgagttcacgctatgattctgatccaatctagcaccttttcttaattatttcatatgctaaagaatgaatcatgcagaaaggatttgcgaatgaagcaaagacaaaatcaagatcatccctcctgccgtgcaaagatgcatcccggcagtctggagaacttcgctgttgccatgggctacgttccctggcaatatctgtccaacttgtacgaaccagataaggcactgaaggtcggtaccatctttccggaactcaacaaaccatttgacggaaggagaatacgctcatgatgcaaaatcgcagtcaggaacaactgctctattggatcgacatggtcagcatgatgctcgtggatctgaccgagtatttagatacgcatcctttcgacgaggcggcaatggatcattttaaccattaccagtctctctatcaaaaggccctaaaagaatacgctgaggtctacgagccactgacactgtctacagcacatccggagaatatgtggacttggggactgtcaaaaaatccatgggaaaggagtgccaactaatgtttcaatacgagaaaagattacaatatcccattcatatcaagcagacaaacccgcaggctgccgccatcatcatcagccagtatggtggtcccgacggcgaactcggagcctccctccgttatctgtcccagcgatataccatgccttatcgtgaggttgcggggcttttgactgatatcgcggtagaagaactcggccatctggaaatggtctccaccatcgtctaccagttgactgacggtctgtccccggaggagatcaaggccagcggttatgataaatactttgtagaccataccttaggtgtctatccgcaggctgcctccggcacaccattttccgcagataccttccaatcgaccggcgataccattgccgatctatacgaagacatggcggcggagcaaaaagcccgcaccacctatgataatattcttcgtatggtaaaagatcccgatattgtagatccgatccgcttcctgcgtgcccgtgagatcgttcacttccagcgtttcggtgaagccatgcgcatcgtctgcgatcatctggactccaaaaactactatatgttcaatccgtctttcgactcttaattggtcttggcatcctgtggaggctgcatattgccgcctccctgggcaggaccgccctgtcccatctgtggcatatcgccattctggctcatatcaccctgtggtccgccacccatatcgccgttcatatcctgtccgtccataggtccgccgcccatggtaccaacgcttcctccggcagagatcaccatagaatctaccgtaaaggtctggtcttctgtgccgtccacagtcacagtgtaagtctctccactggtccatgccatattttgaaaatgatgtattgtaaatgccatattgggataaaagatccacgaaccattttggcatggcatctgagatctttacttccatcagataatagcccggtgtcagcctgtcataagcgatatagcgctttggtcggatcccataatgggtaaaaaagtaatccacttcccgatagatctgaccggtttcttttggcgcatctccttcttccagatactttttggcttcttccctagataaggggatccgtcttttattgaccagtccgttatattttttcttgatctcaaaaaaataggtagaatcctctgccatatagacatccagttcctttttaaagacctcatatgtcttttgatccagcagatatttcttttcgtaacggttaaagactttttggatcatatgccctagctccttatctgcttttattctaaaaaggcaaagtgatggctatgtgaagatgacctgaaaactaaaagaagtcttacgacaacaggttttctgctgtcataagacttctcattttctgctatttttctacatctgataaaaattcagattttcacggagttccggtgtgatcgtaccaccctcgcgtttatacttttcatataagccttgcaggcgtttgtaatttctggcattgtttgtttccaatttacctatcgcatccgcaaacataggattggtctttaggtctgcacgatatgccttggaaaacggacaataggtaaacatgatctggcgcacataacggttgagacggaagccgccctttgcctcatatttgatccagttctgataatccttgacaaagacctcccggaaattgttctttgccctggtcaaagcccccttgatctggtctttggtctctgcggacaattcccggttcttgcggtagaactgcagataatcatagtaatcgcttgtcagcgaccgttcgcggatatcattccagcgcacaccctggatctttcggcacatctcccagcggtatctgccacaattttctaaggtagcctcctgtagatccactgcggtaaagatcggtatcataaagcgcgccggtgtatcgttcctgacactcgccgtctcctgccacatcatggctctggtgccggcatttggcatgaggatgacatctggcaggatctcctccatgaccatctcatttttgatgagatcacttgtcccggtccttggcagcatcggacggtaaaagagggaataatctatctttcgtaccgtgttaaaggcatcctcgatccgatctgccgtcacgaccattttatctaagctgttaaagagatctttttcgcaaagaaccggtgagaacatggtgatattaccataggtcacacggttgacggatgcaaacatattttccagttcatagcgtgcctttgccttttgatcctgctttctccttgccacttcctcttttgtccactcgccccggcgcagaccatcattgagataagccgtatagtccatatcaaactcgttcttggacggctccttttctccctcgtagactgcccgcagccaacggaaaatggtaaagacatggtcggaagcacacatatccagatgggctgacaactggtaaagttcgctggtcttgtcctcgcctaaaaagccctgatcaatataggcaaaattgaaaaacatctccatgaccggcgtgatctttttcctgccctccactgcctgtaaaaagcagtcccagtacagttcataaaagacttttcccacctgcttgcgcagacgataggctgcctcatccttattgtctgcatctttgactttttcgtatgccacaaagagttcctgcatttcctgatacttgtctccctcgtatccggcaaactgcaagatatactccagatctgtcttgcactcctggtccacagccgtctctttttctgtattggacgcatattcttttgcgcaggaaaccagcagttcctcctgaaaaatgcccagttccttggcatagcccaactgcttttcgatcagtttcttgatctcaccatcatccccgcctcttgcctttactccgctttgcagtaaaagggaagcatgaaaaagatcgcttcgtacttgactaaagagagcatcccggttgttgcgcagataatttgtcatctcccggatacctctggcgattcgatgcatctgggcggatgcctccatgatcgagccaatgcagaggtcctcgtccgtctccataaggttcagatatgcatccagtgccccacggatcaggctgttgctattgttgatctcccagttttctgccttatgctgcatctccagtggcgtgatatttgccacatccagagattgctttgcctcgaccttactgcgggcacacaaataaacatactcctcatacaaagtatccgaaagattttgaaactgccggaccttgtgatacatgtccgcataggcacagaacaactggtgcctttgcaagagggcactgcgcaaaaagatcctgcgcatctttggctctgccgccagaaactgcttgagatcattgaccccctcacaaggaaagacataaagtgtaacatccgtactggcataatagtcacagataaaccagtcctgctccaaaatacctatgatagcatttggtcccagtgtcgtctcctcaaattcgtgtcgtaaggtaacatttccctcctgtacgatataccaggcacttaccttatcttttctctttgctacattctcccctgctttcagatgaatgacttccatcctccgctcctttccacagtccaaaccacaaattactcctgcttcagaccgcacaatttgtccacggaggaaatgatctctatgatctccggtacataatgttcatgttccgtcatcagacgatcgatctcatttctctcactctgcacgatcttccggttatcctcgatgtgtcccctgatcttttgtcttcgttttaccagattgtgtttgatctccaccatctcgtcttcatctatgagtgctttggtctgatccagccagatctttcgatcatacagatcgatcctttgtaaaagtcggatgaggcggccgttgaaatattccagatcgtcattgttgcgcaggaatttttccttctctttgacagccgtcacatactgttcccaagtgtaattgagttcggtcgaattgtgtacgccgtacttatcctttgtatattccaccgcttttgtcacattggcatatttcatgcatacgacatttaagaggttgatcgcctgattttcattgcgggtcgcctgccgcatctgtttttgcagataaatgctgcggaaataaatgataaagccgcccagagcacccacgataaaaagtaccaaaaaggcaaccgtcatatccatctttgtcgcaaactgtatgacaaataagaggatcaaaagcgttgcataaagcaaaaatactaagagagatgcccgcttgatgatcttgcgttcctgggtaatgtcctcgcgctcgatctcccactggttcttctgtgcctctaggatatttttgtcccgccgcaccttgtcctgataacgctcgttttccaacatccggtggatggtctgcggtacatcatcctcattctgctccatcaaaaggaactggctgtccgaaatattgtaagaggcattctcataagcctgacgcgcagcattcaactgctcgatattggatgccgcttcccggattgcctgtctggtctcatccggcagcccctcaatggtctggatatccgtcagataggaagtgacaacacggtattctgccttttcttcctcgatctctttggtcaaggcaatgatctgctcgcaggaatccaaaatgtagtgttccaacttcttgggatcattccagttgtcgatggtctcgatctcctgatataccttggcaaaagcctcatcgatctcctgttctttttttcgtttctttccaaaaaataacatgcctttctcccagctgctgtctttttaaatgcgacacaagtgattgtaatcgactttccaactgctcaaaatagatccgatcacctgtgatctgcccgtttcggtcgcaagtgccttttgtattttttcatcgaaaacatggatctcttcgagggtactgagcatggtgacttcctcgcagatctcatctaccatatcctgcgggataaagtatttgtctaccagttcgtcgaaatgcttctgatccttgttgcagcgcagtgccgccagcatagaccggagcgactgcgttttgtggttgcgcttgtaagcctcctcaaagcagagggatgcctcgccaaagaaaaacaaccttccgtaggcaacgcccaagttatgccagatatctccttcaaaagcggtcggtccatgtgtgaccgccgggtcatctaacatcttttcatattcaaaaatagcatccacaatcttatctttttccatcaggcggtctgcccgcattttctggcactctgtcggactcttgttctcaaaagacgctatcgcctgcagcaggtcacggatctccacactggtcagataaccactgtaatttagaatctgtccgataaaaatatgcaacggtgcctgattggatagggtatccaataactgcttttccagatcacgtgcccccagctccccgccgatccacagacaaagttccttggatgcaaattctgcatttaaaagataaacattgtgtgcaatataataactcaattcttccaaagaatagacattcagcgcgccatcctcgataaaataaggattggctgctatggattgtctacataaaatcaattcacccatcggatgcctccttattcttccagacagacggtatgctcccatgtacggttggacgatggtgcgatctccccaaagcctaagtcacggatcgtgatcttgatcttacggtcagagatcggttctgccgtaatacgaagcctgctggtcctgcgttctctttctaccatgtccgtcaattccaaaagttctacgtgagcctccctgctctccggccgctggatccagacctcgatctccggggttccgtccaaaatgacctcacattcgcccacctcatcaaaccaggactgtccagctgtgatcagagtaaaaaactgcatttcattgcccaccaagaccttgaggtagagatttaacttgagttcattgtctccgatatagacaaaaggccaatcctgcttcccatccttgataaagcctgcataacaggcgcccttggagtaaagattctttcccacaaagacctttctggtatggcaaagatactgcaaagatgccttcatccagtctccgtcaaaaccatctccgatcagataaaccgccgaaacgacctgtccgtcgatcacatcctgggcgatcttttgaaactcgccgtccttttggtctaagagtttgccatgatttttctgatctaagttgatgacctgaggtgtcgtatgcatattacgccgcaagcggcaggacaccatatccgactcagtatagtcaaacatgactacatcatgtaaaaaggtctccggtccctggctcagtgcataatagtaaaaactttccctgcggtcgatcagaagcagtttgtctgtctcgatccccagttttaccatgatagccgaaaagagttccatgtattccacactgaccttgtccagacagatgacaagttttgttaaaggcatcatggcttgggcgcttcctgccaaagagaggacacgctttaaaaagatggcaagcagatcactcgccgcgtacttttcatgctccaaaaagacttcttccccagttctcgccttatcaagaagatcttctacgccaagcgcttccccggatttaacacgcacttttgcttcgcgtccgaagaaccactgaccaacgccctttttcttggcaagggcggtcgggatctgataggactcgctgcccatgatcgtgctgatcgtctgtggctctttcatatgctgttggtaaatgctgatcatggtatatttttcactgatatccataccaagatacaagcccacattctcctgttccataagtgcctcttatactgtcgtaaatagttcctttgtcacctgatccaagccctgatactgcttcatcagttccaacaactgcccgtcttcatgatagaggtaggcattttgcatggcattcaatagatcgtagcgatccagattgccctcctgcagatcactggaaatggtcaggtcatccgcacataccggcaggtcagctaccgcatctgcatacagggcataatgaatggtctctccgaaaaagacaacgaactgcttgacgaagattccctcgtacatctcgatcatttcttccgtgatcggctgcccatcatcaaaacgataggtgatggtgatccgctctcccggattgccccggtattccacaaaatgtttgtcatacagatgatacttgatgatcagtttatgatcgacattcttgtagaactggaaatagacattccgcaagatgtaatactgcaagagttgatccaaaagggcaaactctttttcatccaaggtatccttgccggatagatatttcatgtatgccagattgcaactttcctttaactcgatgccttttgcaaaataataggaaagatagtcaaacaacttgtctggcacatgttcctttgagagcatatatgcatgcgcccagtaattcagataagcctcgatcagcatgcggtctttgccacgcgccagataggaatcataaatagccgccgtttcctccatgcagttttccgcatacaaggtctggaataaaatattttcttccagcgccaccacggacatttcttctgcttttgccgcctgccagagatagatcatatccgggcttggtcccacatagttttctgccagataggataccgttgccggtgaagtctgcttctgtcccaataaatagccacacaaagaaagtaaaaattcatcttctgcaaattcagtcgtcaacagcctttcggtgcacatctgtaagagcaggcggtcatccacctgcaatccgtaatagtcctgcatgagggcataggctctctcatagtcctgccgctggatgaataaggagatcacaaaacctctggtccttgcatccaactgcccaaagtccacatgctttgcaaaatgttcttctaagacttcttccctgcaatgatcctgtaaaaagccaataaatgcactgtatttttcctgtttataacgcttggaaaccagcgaagaatccaaaaatacctgcatgcgttttacatcatccaaggtatagtcttccgcttcttttttctccgcaaaatccgcaaggataaaaggaagggaaagcggtgacaagtgttccagcctcttgataaaacgctccgggtacataagcctttgtagggtgtatgccttgtgatcgctgatcagggtgccattccccgtctcgagcagtaaccggtactgtcccggcaggatcggaatacatgcctgatggtcttgtaccgggatcacgatcggcatttcatactgctcctgatagataaatgcacgggtgatgtccggataaaggcagaccagttttttcataaagaccatgcccgagatcagatgcgccatctcctcatcgactacgcccatctccagaacattctgatagatgatcgccagattgtcattcatgcgattggctttcatctgctcgatcgcaaaagtttcgatgttgcgcagatactgctcataaagccccggtgccttgcgtctttccgaaatgatattggcataaagaagtgccttcttttgatatggcagattgcaactatagcggaagtacatagtcaccatctgcggcagttcttccgtactgttgtccggcatggaaagcatataagcctcatacaagccgctcagacgcagatccagacggattgcctcgcgataccagtccagatacttttcctgaaacatctggttgcgcaacaaataagataccagaacagaaaaggcttcctcgctatgctccacctcgtatgccttctgtgcgatcaagaaaatgtgcggatcaaaatctttgaccttttccatcacatgcaagacctgcattgccacatctttggtaaaggtcacatgtcttgctgcccagtataagatcttggtcgcatgcgcatcaaaggcatgcaaaagataaggatcctgcacatacatggcatatgcctcaatatataaaaacggtgtatcgttatctgcttcgatccattgtaaaatggctttgagtttccgcgccggattttccatatattcttcccgcaaaaaagataaaaaccagaagagtctgacatcctccgggtgctctcgaaagatagtctcgatctcttttgtcaggcggtcgacataggacttttcctgctcgatcagggtgcagagatacaaaagatatgcccagagaacgctctgcttgtctgcgatctcccgcttcatatcggaaatgatccaaagtgcctcctgccgctttttgcccacgatcaggcactgcgccttcatcaggcgataccatgcattattcgggcggcgctctaacagttcatctaagatctgtaccgagccatcacaccactcgcctgtcgtgatctggcggaaacgatacgctttgtaggtatccgtcaaatctgccagacactctttatccctgcgccatggaaattcctttttttcatcttcctgatcaaaggtcgccatgatgtcaatgacacgcaccgttcccttgcaggagaatgtgatccgcgcacggttaatgcccgcgtgcatgcggttcttgtgtatataataattgagaagcatggtagaaccaagaaaatagtctgtcgtaatcagatctttttccacagtgacaaaagggctgtcactctccactgtgatctcaatatagccccatgtattcttggcaaccactaaggtctccttgcgattttcgctcacgcggtaaaattcttccttgcgctcgcgcaccgtaaaatcgacggcatcttttaagcccaccgccactaaaaattcttctaaattggctgaagacggtaaagccttacgatagccggtatagaccatgcggactgccttttcctgtcttgcaatgaacttttcaaaagcctgcgaataaaacaactgcatggcttctgcccaatgtccctgtgcaagacttgcaaaatcggataaacttgcgatctcgcctgtagatgcatacaggcggtctgcctcaaattgcacatcaaaaggaaggcgacactccctctggttacatacaatggtaaaataaccggtaagcctgtccccttcttgataatcctgacccagcacttcaaaacggatcgttgcttccatcccgtcaaactgcggctttacgatgcgcacatatggattggaagaatagacgattccccggatagagacctcattggtagagtgcatgaaaaactcaccctgtaagcgttctccctgcctgccacgcacggtaactgtctcctctgaaaatgctatctgcggccttctgttgtcaaatttatcttctgacatccgccagattcgttttcgcaaaatatgacacccttttcctgccgttttgtcttctgtcggttgcaattttcgacgcaaaaagactataatgaattataaactatttaagaaggacatgcaataaactttgtcctttgcaggaggaaagcatgcttacacataaagaccatttccatggcagcgacttagaaaaaatagagcagatctacggtatccgcaaggaagatattgtaagtttttcagccaatgtcaatcccctgggtatctcaccgaagttgcgggagcatctggcaaaacatatcgactgtatcacgacttatcctgaccgggaatattcttccctgcgtcagtgcatggcagattatgtcggcacagaaaaagaaaacatcattgtcggcaacggctctaccgaactgatctccctttttatacagatcgagcatccaaagaaagccatgatcttaggacctacctattccgaatatgaaagagaagtttctctcggtggagggacgactgtctactatccgctcaaggaggaaagcggttttaaactggataccacccactttacctcaaaactggatgattccattgatcttttgatcctctgcaatccaaacaatcctacctccagctgcatttccttggatgatatgcgtaccatcctagatgtctgcaaggagcatggtatctatgtcatggtcgatgagacctatatcgagttcgttgaagatgtagctcataccagtgccgtctcactgactgcctactacaacaatatcatcatcctgcgcggcaccagcaaattctttgctgcaccgggtcttcgtctcggctatgccattaccggcaacgaagacctgctccgtaatatgaaccagcgcaaaaatccatggatgatcaattcacttgctgcgatcgccggggaactcatgtttcaggatgacgaatatatacaggcaaccagagatctgatcagcacggaacgcgcccgctgttatcagacaatgctaaattccaagcgtttccatccatacaagccgactgcgaatttcatgctcatgcgcattatggatgaagacttaaacagcggtatcctgtttgaccgcgccattcgcgaagggcttatgatccgggattgctcgactttcccattcttaaatgacaaatatatccgcttctgctttatggatcctgtagataacgaccggcttttggattgtctcttacgttagatcacttatttcatatgatgcaaaaaagagaaaggcgaatgcaaaagatgcaaacgcctttctcttttattctgttctcataaattatttattctggaaatattcgtgaataccctttgcagcagcctttcctgcacccatggcaaggataactgttgctgcgcctgtcacggcatcaccgcctgcgtaaacagcttcttttgaagttgcgccatcgtcctcacagatgatgcatcctctcttattcacatcaagtcctcttgtcgtagaagaaatgagtggatttggagaagtaccaagtgacatgatgacggtatctgcctcgatctcatactcagatccaggaatttccaccggtcttcttcttccggattcatccggctcccccagttccatcttgatgacacgaacgcccttgacacaaccgttttcatctactaagatctcggtcggattctgcaatagatcaaagataacgccttcctcttttgcatgatgtacttcttccactcgtgcaggaagttctgcttcactacgacggtaaacgatatgtacttctgcgcccagacggagtgctgttcttgcagcatccatagcaacgttaccaccaccgacaacaacgactttcttgccgcgtgcgatcggtgtatcataaccttccttaaatgctttcatcaggttatttctggtaaggaattcattggcagagaatacgcccttcgcctgctcgcccgggattcccataaatctaggaagacctgcaccggagccgataaagactgcctcaaatccttctttttccatcaactcatcaatcgttacggaacgaccgatgataacatttgtctcgatcttaacaccaagagactttacattttctacttctgcggcaacaaccttgctcttcggcagacggaactcaggaataccgtaaaccagtacaccacctgcttcgtgcagtgcctcaaaaatagtaacatcatagccaagttttgccagatcaccggcacaggtaagtcctgcaggaccggagccgatcactgcgaccttgtgaccattcttttcgctagcgccctgtggcttgatgccattttctcttgcccagtcagccgtgaaacgctccagttttccgatggaaacggcttcgcccttgattccacggatacacttgccttcacactggctctcctgtgggcagacacgtccacaaacggctggaagtgcagaagactcgctgatcacttcatatgccttttcgatgtcgccatcttttacagctgcgatgaaatccgggatctgaatggaaaccgggcatcccttgatacactgtgcattcttgcagttcaagcaacgggatgcttcttccatagcctcttctttattgtatcctaaacatacttcttcaaagttagtggcacgaacctttggatcctgctcactgaccggaacttttactaaaacatcacccattacttgtcacctccacaatgtccgcatccgccgtggtgtgtatcaccttcctgtaaagcaagcatcgcgcgaccttcttctgtcttatactgctgctgtctggacatagcctgatcaaaatcaaccaagtgaccgtcaaactccggtccgtccacacatgcaaattttacctgatctccaacaaccagacgacaagcaccgcacattccggtaccgtctaccatgatcgggttcatagatacgatcgtcgggataccaagttctttggtaagtttgcagacgaatttcatcatgatcataggtccgatggctacacaccagttgaactcctgaccttcgtctaccaatgcctgcaactgattggttcccattccatggaagccataagaaccgtcatctgttgtaacacaaagttgtgtggcaacttcacgcatttcatccacatagaacaaaagatccttggtacgggatcccatgatcacggtcgtttctacgccatgctctttcagccattttacctgtggatagatcggtgcggtccccacgccgcccgcgataaagacgatctttttcttctttgtctcctcgaggttctcctctacacacagttctgacggctgtcccagcggacctacaaagtccataaaggcttctcccacagcaaggtgtgacattctctctgtggatgctcctacggtctggaatacgatcgtgatcgtaccagcctctctgtcataatcgcagatcgtcagtggaattctctctcccacttcatcgatcttggcgatgatgaactgtcccggcagacaattatctgccactctcggtgccttcacatccatcaagaaaatcttgtcagcaagtttttctttttttacgattggatacatagttttcctcccattttcttattttctatttgatatgccgatccttagcggatttctcgcctcctaagtggaatgcacagcatataaaatacgattcttctgttaaccctgtgttaagcctgtctttaactaaagtaaaccaactcgtcctgtggtttttctgccggtttcatctcgatcggataaaggatcggacccttgcccttatattctcttgcaaattcaaccttgatacgtgcggtaaggtcgatccaggagcgatgctccggtgtattttccatgccggtcttgcacatcatgccaaggaaggtaatgtcctccacgcaacaagtcatggcaaaacgtcccggcacgataacgccgcgctttaacttaccatcctttggattgtagaccaaacctaagaaatgcactttcttgccatcgtatttctttggattttccatacagtccataaaccagagggcataatctgcatcggaaatctcgatcacatctgcattgatgtcaaaaggaagttcttcctcacgatcgtcgatcgtaccatcggctctctcataaacgatctgcgccggacggttgactgccttgatattgccacggaacttgctctttggcgtgttgtcatcacagcggttgaagataacaacttctgcctgaaagaattgctccatcatcatggaacgcatatttgccatatacatctcaaaagtcgttgcatccacagtagcgagggactgcacgatcacccaattctttggaagttccatctcatagacttcgcctacgccccaggttccattgtattcaacgaaaacgacatccggacggtactggtctgcaatttcctgtaaatgctctgtattaaactctgcttctgtatcaatggttgcgacagatgcgttgatcgtctttaacttttcggtgtcatactccacatcgccgtcttcacaggcaatgatgagaatacggtcatcatcttcagcaaagccattttcaaatagggtttcctggatcaaagtggtcttaccactatccataaaacccgtgaaaaaatataccggtatttctgccataatctttcctctttcttataattctatgtcctatcagaagatagggtatcgccatatttaggcgataccgaagagttcctctaactgatgttcgtcaatatctgtaccgataactaccagacgtcctgtgtaatccggctcaccggtacgcagttcgtactcgccatctaccagatcaaagtagatccatgtgccgtcagtagactgtaccatacccttggaacggatgacggttccgtagtcttctgtctcagcaaatgccttcagagcattctcgatcgttgcacgttcaaagatgtgcggtgtctccttgccccaacttgtgaatacatcatctgcatgatgatggtgatgctcatgatcgtggtcatgacatccgcaggtgcaaccctcgccatggtcgtgatgatgctcgtgttcttcgtggtcatgatcatgatgatgctcatgttcttcgtgatcatgatcatggtggtgttcgtgttcctcgtggtcatgctcgtgatgatgttcgtgttcatgcgcctcgtgtgctgcctctgccaaagtcttcatttccaagttgtcctgaccttcgataacctttaagatctggctgccctggatctcatcccaaggtgttgtgataatggctgcctttggattgagtgtctggatctgctttacgcagaactccaactgctctgggcttgccttctggcttctgctcagtacaacggtggtcgcatattcaatctggttgttgaagaactcaccaaatgccttcatctgcttggaagcctttaacgcattgacaaccgtaaccaaagcattgaccttgacatcatgcgtcttttccagatcaatgacagatgccataacatcggataacttgccgacaccggacggctcgatcaaaatacgatccggtgaaaacttgtctaacacttcctgtaaattctttgcgaaatctcctaccaaagagcagcagatacaaccggaattcatctcggaaatctcaatgccggagtccttcaaaaaaccaccatcgataccaacttcaccaaactcattctctattaatacaagtttctcaccagcgtaaacttcatcaatcattttcttgataaatgttgtcttacctgctcctaaaaatccagaaataatgtcaatttttgtcataatttcatccttctttctcttgactttctgcttataaatatagcaacatatattatagcataaatccatttgtgtacaatggtcgaaattttccttttgtggaaaaaatgattatgcaaaaaccacaaaatatttttttgaaatggaggttatttctatggatccaaagagagaacatcacaaaatattagctgaccagttaattaaaaatctggcaaaacgacacatggaaggtttttactgtgaaacacccgaggaggcatgtaacctcgcttcttcgcttataaaacaaggttcttctgtatcctggggtggtacgatgaccatgaaagaaattggtatggacaacgtgattgccaaccgctctgatttgattgtctatgaccgtgctaacgcaaactcgcaggaagaaattgatgaaatctatcgcaaaactttttctgcagacaattttatcatgagtacaaatgccatttcccttgatggacaactcgtaaacattgatggcacaggaaatcgtgttgctgcacttatcttcggaccaaagcaggtcattgttattgccggcatgaacaaggtctgccatgacttagatagtgctatggtgcgcgcaagaaatatcgcatccccaccaaatgctcttcgatttgacaaaaaaacaccttgtactgcaaatggaagctgcggagactgcctctctggtgattgcatctgtaatcagattgtaatcaccagaaacagtcgcgacgaaaacagaatcaaagtaatccttgtagaaggtgaatggggttactaaaataacccacaaatgcctgccattcctgttctcacagaaacggcaggcatcttttatctgtaccctaaatattccaagaggccttcacaccccgccacaatatcgcgatatgttgcttcaaagtctcccgtataccaggggtccgccacatcatctgtttcctgcaagcactgatttttcttataatctgcaaaagaatggttgaaatccgtgaagagcaaatcaacatttccgatgcttctcccagaatgcgactgcatcccgcagccagccatctgccgcagtatctatccccaggccaaagccatgacccagcttatcatacatgacgatatcgacattttcctgccccagcgctttcctgatgtccgggatgattttctccacggccgcaaaaccggtagggtcatcccgcccgaccctggaaaatacagcaagccccttgtccttctcgtgaaccttaagctcccagtgcaggccatagatggggaagatggcggcgggccttggcagattatgtttatggcagcagtccttataatcagaaaatgcgtaggctgtcgtcatcaggcctccagcggagaacccgaacataccaaagccgtccatcgtatagccgtactctgcctgatgccctatcagataccttaccgccggcagcacatccttggatgcctcctcgcccttggcctgcggttcggtttcatgcagctccacattcacacggtagaccagcacaaacacactgtatcccctcctgtgcagctccatggctgccgggatgctctccaaataagaggctacgccgtcaaacccgccgcccgcaatctgcacagccacgggcttccctggcttcccctggaacaggatcccctgtacctttcccttgtcgggatcacgccttacctcatcctccgcataaagcccgctgatgaaatgcacctttttcagccctttctgctccacgacatagttgaaaccatccacgatgctctgcgcctgtgcgggctgcccgataagattgcacaaaccatggacgctcatgcctgacatggcatatatttcctttggcgacccggtcttcataaaaagctccggcctgccctcccatacgggatgctgcaggaagaacgccatcttgtcattgatcgtagccctgcggaaccctcccgcgtcattgtaaaactccgattcctttaccttcggcatatgcttgacgcctaagattgccggccagaacagccctttgtacttacccatgttttttccctccttatctatttcagaacggtctcggaaactccataaagcccgaatctccgctctttttgtacttgttacttttttcgtttcctcccattttcagagaaggattttaaattttttcagcaatttttcaaaaaactattgacatttctcgtgaattgtgcgtttctttatcctgttttttctgctcatttctatgggacttactccaccctctcttactctttggaaagctcaggaaataaagcctaaaattacggaggttcttgtaaaccgcctgcttaacggaaaaattattcattttaatttcgaggctacccttcaacatctcttttattccgttgctgttcttccctccgttcaatgcggtctgatttcttctgaaaaccttacggtttccggcgacggtaccgctgtccatactcatgccaacccgaggggacaccgtttaaatcctgaccccgataaaccatacaacccggatgttcctcgccatttttcagcccccgatgcctcatggggatgggacagcgatatggaaaaatactattacggatataccctctttcagctgtcctgccataaccattcactacacgttgatattccactccttttgcggtttaccagtgccaaaagacatgattctgtcagttttctggtagctttccatgaatttgaaaaacacatgcccgacctgcacatatcaaatatgtgccttgattctgccatggataactatccaacatataacctgttaaaagatcggcatattcatgcttttattgaccttaacgctaagtgtggtcgcccgaaatctattccggataacattcatattgataaggacggaactcctatctgccaacagggagaacgcatggctcccaatggctatgacaaagcctgtggttgtcttttatggcgatgtccttatggtaaaaaccactgttctaaatgtgagcaccatagttggggggcttttgaccccaacatcttttaaaaaggtcaaatgttttataattttataaaacacttgacctctcaaagttcactcttcctgttcttgaaaaaattatttccgatgtgcctcccagaattccactgcctcttcaagccaatgaggtactatggtattggaaccaataccaaatccatgtccgagattatcgtaaatccgtacagacacattgtcctcacccaacacggatttcaattgcggaagtctcttctctacatttccgaatccgtattcgtcctcgcgccctgcgatggaaaataccgccagtcccttatcctgctcaagcgctttcacattccagtccagaccatacatcgggaaaatcacttttggtctcggcagttttactttgtgacagcagtcctcgtaatttgcgaaggaatatgccgtagtcatcatgccgcctgccgagaaaccgaatatcgcatagtcatccatatccacagacagttcctgctcatgctcctttagataacggattacctgcaccaactccctgaccgctgcctgcccctgtttttcctgttccgtttctcccagctgtttgccaatcgggtaactgattaccaatacggagtaccccaacttgtgtaatttcattgccacgggatatccctcgcaatccgtcacattactgataaatccacctccgggaacgaccaccgccaacggttttccttgctttcctttgtaaaacattccggtcaaatgagactgatatggattctgttctatcatttccttcgggttaatatcggaaatcaactgcgcctctccactttccacaagccgggtcaggtaatgaaaagcctccagtgcattttccatctgatcacttctgccctgcgcttttagaaaatctgcatattttgccggggcaatcgcttttaacacgttatcctcaacattaaaaaacatatgcttatagccgccaaacaccggatgctgcataaaaaatgccattttatcatctttttccgctttccggaatgttccgtctgcctgataataatcttccttttttatattcggaaaaccgccgatgccaaacagtgccggcagaaacatcgcatttttcttataaacataccccacgaagccgactgccaaaatgagcagcacgagtattatcattgccagaattttcatatgttctttcactccttatctcttgtcagttccatcgcattctccttcaatatgttacttattgctgcgcgctgcgattgccgtgttcatttcctctactgcttttttatccaacgtatactgtgtaccaaaaagaatcgcccctgcggaagtcaggataatcggaagtatcagtacgcagaggataattcctgtattgatactctccggctggacagccgagccggtaacaaaacctgtagctgccaatacataccccggaatcgctcctccgattccctgcgccacttttgtaataaaagatgtaaacgatgcgattgccgcttctgcacgttttccggttttatactgcacgtaagtagtattatctgcctgtatactggttgtcagcggtactatacatccgcctgccacacctcctgccactgtactaatatagatcaaaagcatagatctcacatcaatcaaacgcagtgcggtaaacaggatggatacgacgattgccattacataaatctttttctttccaaaccggtttgccagaattggtccaaggaaaattcccaccagagcagttatcattgaaacaagtgacacccctgacataagcgtcatatcacccattatatatgtgtaaaaataagcgccggctcctcctgctatattactgcccaccccggctaccagtgccattacaaacattgcccagacaggtttataccgcataaactgtaacaattccctgaatgtataactttcttctttttttccttcaaaagctactctttcctttacacaaagagcccctgcaatagataaaaccaacaccatggccatggaaccgaaaattaacacgtaatagttctgtaacgttccttccgccacaagaatcggtgctgccacagccagtaccgcgccacctatcattgttcccaacgcgttgaaaagtgacaaactgtttctctccttgtcatccgcgctcatgaccgggagcagactgttcttggagatatccataatatcaaacgtccagcccagcagcagatacgtcacatacacaatcacatattttccgaccggaatccagactgcgccaaaccacagtaaaatataatttataacacagatgattgttcccagaataatcatagggcgaaattttcccatttttgtgactggaaatttgtccagcaaatatcccataatcgggtcgctgattccatccaccaccttggatattaaaaacagggtcgccagtgctgccggttccagaccaaccacagtcgtatagtaaatcataaagaatcctgacaataatcccatcagtggaatatttcccgcacataccatgaataagcccattttttccacgatactaaccttttgttctttactcttcccactcatttgttctctcctccttaaaattgtgataatgctgtattcaacatctctgcctgtccttcatccatcggtccggaaaacatctccgccacctgccgaaacgacaatccatagaccgcatccggtatcatatccacctcggtcatcgtcgacaaaaatgcccgtatctgcggatggttcagcaaatcctccagttttgactccacgctgtatattttctttaacttctcagttgcctcatatacgacttcatagtttcctgcagtgatataacaaataccgttcaccactgttgcgaatagtggatttgtcttatcttcaaacagaatctccggagcatgcggcaatcgcacctcgccttctccaccaaacggaatcgtaattttgattctaatcctgttatcctccataatttcccagccgcactcataccgtccgcttgccgagtcatacacggtctttacctgtctcaggtcataatggacattcggacaaattgcaacccttctgcctcccggagattcttccaaaagatggattcctcccacatggcggaacatccattccagaatcgccccgtaagaataatggttgagactgttcattccggtactggatatcttaccgtcttcatccagtgaattccatcgctcccagactgtggtggctcccagtttcacttcgtgcagccaccccggatactcctcgttcaaaagcaggcggtaggcggtatccgtcattccgttatcggtcaacacattacacaaaagagaggttcccacaaatccggtattcaatttgtttctgctctcgcggaaaagtttctttaacatctctctggtcagttcttcgtcctctgacaaatgatatttcaaagccagcagaagtcccgtctgtgtctttaccgcgcatcttccggtcggggtaaaatattcttcttttaccacacgccattgtttttcggcgatttcccgatattgtttttcctcttcctttcgcccgagaaccgccgctgccttcgctgtaagctccgcgcttgccgcataataaatatccgcaatatagccttcatcggtcgctccgtatacatttcccgccgcggctcccacccggtcaagcgccagccagtctccgtaatggaaggaatgtctccatccgtggtgctctccgtccaccttacggatatagtccacccaagccttcatactgtcaaactgctgttccaatatggcagcatccccgctgaacagatagacattccacggaacgatacaggccgcatcgccccatgcacaggaacatttcgacggaccgaaggtcggcaccacctccggaaccatccctccggcaatcagctgttccttatacaaatcgtacagatattttctgtaaaatgcataggtatccgccagataacatgccgtacccgaaaacacctgtgtgtcgcctgtccatcccatgcgctcatctctctgcggacagtctgtcggcacatctaagaagttatccttcatgccccattccacattggaaatcaactgatttaccagttcatttcctgtctgtatactgccggtaccttcgtaatcactgtagagtgtcattcccgtaaaatcttcacaggagagattggttaccccgctgatttttacataccggtatccgtaaaatgtaaaatgtgggataatgtctttttcttctccgtcagagatatacacatattctgataaagcggttcttaagttttcgttataaaagcatccgtcctgcaggatttcgcctgtctggattctgatctccttacctttcggctcatggacatgtagtttgaaaatcccggtaatctcctgtcccaagtcaaacacccactcatccttcggggtgtggatcagttccttcggtgtgaactgctcatgcgctgtcaccggcagggacagccgctccgtcagatgacccttcggtgcatctgcaagctgcgcgctgacaggtgcgacaggttccagcgtatcatcccgtttctctccgtcataaatattggaaaaaaacagattgcttcttgtcacttcccatgtgtcatccgtgccgattatctcttgtgtgccatcctcatattccagatgcacctctgccagcagtttccactcgtcgccgtaaaatcctttctgttctgtctgattgaacccgaacctccctttgtaccagccattccccaaaagaacggacaacacaccttcgcgctgcatctgcgcggtcacatcatacgtctgatactgtaaccactgattgtagttattgcagtacggggtcagatactcctcaccgatttttgcggattgaggaatgtctgtttggtctttgtctccatccgtaaaatatgcctcataaagacccagtccacagatataaagacgggcttttttcaccttcttccggagagtgatctgctttgaaaaaatcggatggcgcgcctccctgctgtcgcaggtaatccatttccccgcccatggctcgtccctctttgccgtctcaaagaactgtacttcggactccagcacttcgtctgcgtccgtagtaacgattaccttccagtaatatctggtacaaggctccagattcatctccgcttttacagccagactgtcgagctttgcctccccggtgtcccaaagaacatccgcgaaggtttcatcctttgccacaaggattctggcacatctctggttctttcccctgcattctctgaccttccacgaaaaaaccaccggattcagtaaaaatcccaccggattcgtgatatgatttgtttttgctgcgtaaatctgattcatattgctgttttccaagctccttccttttttcattgtgtccactgtaatttgagtataatggatttcccaaataaaatcatttacggtatttaatcattttacctaccaaacttaagatttatattgatacatccgcaaatgttttctataatgataaaaatgcaaagtgccaaagagcatacctttgcatttgcatgaaagccatgactttgaaacctgaaaaacatgcgaaggtagccgatgaaggcggatttttaaatatttttaaaaatatgggaggatataccaatgttgacggattccggactggatacttatctgcgaaaacacactgcacaggaagaacagaatctcttgggagctaccaatgattatcccggtatcgagacaatcactacggcgtcgggggaactctgctactgtttcacgcctaccccgctcagtatgcagatggcgctctcggagaacaaggttctggccaattaccaaaattttgcagtcatcaagcaggaccgctttgagacggttcccctgcatattcacgaatggctggagctttgctatgtctattctggtagctgtacatttacgctcaatgacgtatccctcactttatctgccggagagattcttttaatcagcccgaatacgcctcaccgcacgacaaaatgtaatgaagaagatattatgattaattttttgattaccaaaaaatatttaaacaacttctttgagaaattcgcaaaaaagaattttatcacgcaatttctcattgaggcgctcaacagccagtcccgacgggataactatatcctgttttccgcccaaaaaagaaaccggctgacattatttgccaaccagtttctgtgtgaattctactcgccctccgttacgtccgtcgccatccttgacgcacagatgactttattgatttgcgagttaatcaattacttccagcacaacatggcgctggcaagcctctcttcctccaaccatatttactccatcctgcgttatatagaaaccaactacgcagactgtacgctggaatcgaccgcggctttcttccatatgcatccgaactatctctcttcgtatatcaaaaagcatacaaactatacatataaacaactcatccagaaccagcggttatcacaggccgccatgctgctgcgtaccaccacgctgccgacctgcgacatcagcattgccgtgggatatgagaatactgggttcttcttcaaaaaatttgaagaaaaatacggatgcacgccaaaggaataccgctgccggcaaaccatgtgattcgccattgtccggattataacttattgatgtcgctctgtgtcaccatcacaatctcattttcacaaagcaattccgcgattttcgctctttccatctcatcggatttcagccgcagcaccataagcgccttgtttccgataatgtaattgagtgaatacatgtactcaatcgaaatattattttcttcgataaccgcaagcgctttgtcaagacctgccggctggttcggcaccgcactacagatgacatgattcgtttttgccattaacagtgcctgacaccactgtggtcaacttaatccacaaagcttgattttaaagggcactgaaaaagtctgattctaaaaaaagaattatctgtaccctaaatattccaagaggccttcacaccccgccacaatatcgcgatatgttgcttcaa

SEQ ID NO: 12463 - DNA, 4849 bp, Unknown
  gut microbiota DNA sequence
gaggaacagtgggcaaaattaaagctggtcaaggaagtggcagaagaagtatggcaggatgccaatacatcttttgcaggaaaaagcacaagatacagtatattttttgacgacaaaatacacttattagttggagaaacgaataaaggatggtataatatacatattgcgatagataattccaaagcaaaatgcaaggatttggagacaatacaatatggggaaaggatatgaactggaaaaaagggttctggcaatgatatctgaacaatatgagggcatatatcagttgaacctggcggacaagaaggtcatctgcatctatgacggacgggatgcatggggaccggatgacgttttggatcgtgacatctggagagatcgtctggtcggactttgccatccggaagacaaagagaatctacaatctgttttggcagaggattctctttttctgctagggaaaaaagaggcaaagacagacaagatcagcagggatttccgttttatgatcgagcagggctaccggtggatcaacctgatgctggtgccggatcctgcgcatgggcagatcacggtgacctttcgcgatgtgacccatcgctatgagtatgatgagatcatacgacgaaagaatatggaattaaggcggatgttacagactgcggaacagtatcgggatgctctcttgactgaatcggttgtcttatatcaggtcaatttttcaaaaaacctgatcgagaatgagatcttccaaagagataaaaagaccaatggcatggtaagggtattgaataccgtaggcatccatacaccatgtgcttatgatgaatattgcgccagatggcagggcagagtgtcaaaggatacgctggcggaataccgcaagttttcctctgcgtcttatatggtggaggcttatcaggatgggaagacactcttgcgacaggattaccgcaccctggattccacgggagaagagatgtggatcaataagacgatctatctgaccaaggacaatatccagggagatattatcggtattgtcagcctgcgcaatgttacagaccgctatcggcaggattacctgcgggagtctttggaaaagcaggcatcactggatctattgaccggactttacaatcatgtgactggcgaacttctgatcaagagcaagatcgataacgaaaagtacgtggacgctgcatttatcatttttgacatagattctttcaaaaagatcaatgatacccatggacattatttcggagactgtgtcttgcaaaaggtatccgattgcctcaagggctgcatccgtgaggaacaggacattgccgcacgatacggcggggatgagtttgtcgtattcatgacttacaagcaggaggatgacatcaaggatatcgttgagcgcatctttgatagtgtttcctgccagtatgaggggcttgtcatcagcgtcagtatgggcatctgtctttccagcgcctgtgatggcggctattatgacctctacaagaaagcggacaaatccttatacgctgccaaggcgggaggtaagggacaatatgtgtattatgaggcttagatacagataaaggagactctttttatgcagactatgacacttttaaatcaaacaaagatacctgttttaggatttggtacttataagatcacggatccgacacttgcaaaagaatctgtaacagaggcaatttgtcgtggataccggcacgtggatacagcggctttttatgaaaatgaagttgcggttggtcaggctatccgggacacgatagcagaagggggtctggcaagaaaagatctgtttgtgaccagtaaagtttggaaaacagaaaatacttatgataaggtgatggcatcttttgaaaagaccatggagaatttgggattagactatctggatctctatttggtacattggccggcatcggacgcttttgacccagattggaaggagacaaatcggcaggtttggcgagccatgatcgatatttatcggagcggacaagtgaaagccatcggcgtgtcaaattttttggtgcggcatttagagacgattttggagatggaagtgcttcctatggtggatcaaatagaaatcaatcctggatttttacagagagaaactgtggatttttgccagaaacaggggattattgttgaagcgtggagtcctttgggcagaggacgcatttttgatgacccgaccttgctgtccttggcaaataaatacgacaaaacagtagcacagattgcacttcgctgggaacaccaacacgatattgttgtactaccaaagacggtcacaccgagtcggatgacggagaatatgcagatttttgattttgaattgtcttatgatgatatggaaacgctggatggcatggatcccgtgggggcatcggggcatagtccggatcaggcatagggcattaagatataaaggatgtatggaggaatgaaagatgaaagaaagtaaagcaaaaaagagaggaacgatcgcggtaaaaattgatgcacttgtgctgatcatggttattctatctaacattatctgtctgagtgtactggtgtccagcagtagaaaatacatcagatcggcggtgcaaaatagcatgctggatatggtagattcttatgcgaagttgattgaaacggatattgaacaaagtggcaaagatgatttggattatgatggctatgccgctatcttagacgatgtcggtgtaaaagggatggagagttcctatgtctatgtggtcgatgaaaatggcaccatgttatatcatccgacggaggataaggtaggcaatccggtagagaatacagtcgtcaaaggtttggtacagcaattggcagagggagagcatccaaaagatgcggttgtgacctatgattttaatggagtagaaaaatatgccggatattccattattggtaataacaatattgttgttgtcagtgcggatgaagatgatgcacttaccggaatcaataccacaacaaggacagccattggtattttgatcgtactcattattctggccagcattgcggcacttatttttggcagaaggctggtaaagccacttgtgaccttaagcggtattattgaggaggttgccaatggtaatatgaatgccgatttttccggtattaaaattaccaatgatgagatcggcatgatggcaaccagtgtaaaagatatgacgggtacactgggcggtatcgtagaaaagattcgtgctaccagcgatgctatggcacaacacagcagcaaattaaatgataccagcgaacagactctggctgccaatggagagatcagtaaggcagtagaggatgttgcgatcggttctaccaatatggcgacttctatttccgatatcaatgtggatctgggaagtatgcatgatgagacacagacgatcgatgcttctgttctggatatcgaaacccagacacattctgtattggagagcagtgctatcatgaaccaaaagatgcatcatatgcaaagtagcagtgaaaagatggaagaaggcattggcgttattgcagagcgtgtggaaaaggtcaatgcggttgtggaaaaagtcagtgatatcatcggcgtaattgaagatatttccggacagaccaatcttttgtcactcaatcatccattgaggctgcccgtgcaggagatgccggtcgaggatttgcagtggtggcagaagagattcgtgtgctatctgataatacaagcggtgaattaaataatatcaaagagattatttcagaattagtagaggagtgtcaggcatgtatgcgggcatctcaggaagttgtttccgataatgctgtgcaaaaagaggagatcagcagcgtcttgcaggagtttgctagtttagatgatcagattggtcggacagcggacaaggcggaagaaatcaagggcttggtagatcagatggtttgcttgaatcagaatatcacggacaatagtaatggacttacggatgtaagttcttccaatgctgccgcaaccgaggaaatgacagccaatattgaggaactcaatgccatgatgaatggtgtggcggaaatggcgggacagatgaatgagcaggcaggattcttaaatgaggctttatcttattttaaatagcatctgttcacagaaataacatgacttttacacaaaaggtggtatcttttttacagagaacgtggataatggtatatgtaaggtaaaaagagaaaagatgagcgcgggactgggcgcagtgtgaaagggatgcaaagcgtaaatgaaaacattgagtcacaaatatctggcagaacatatcgcagggcagtatctgcgaggtttttccatgctggaaaaaaatgcatacatatatggggcaattgcaccggatgtcaacaaggtcacctatctgcatggatggaaaggtaataaaaagtttttcggacacaattatgagaacagcagtcagaccatggatcatctgatcaaaaaactggaacggtcgacgccgggtggagggatctatttttaccgtctgggcaagttgacccattacatcgcagacagttttacccatgtgcacaatggctattttacaggcagtcttgccgagcatgtgcagtatgaaagtgctttgcacaaatgcctgttagaacagatcccatttcaaaagatggtcttacctacctttgatgtcaaggccctgcatgagcatcatgatacttacgcagacctgtacccatccctagagatcgatcttttatatatttcatccatggtcttggcagcgaccctctgttatgctgacag

SEQ ID NO: 12464 - DNA, 16448 bp, Unknown
  gut microbiota DNA sequence
tatgattttcattattgatttttctttttttttcatttaaactgactttaaaatcatgatcggaggatatattttatggattatcttaatttttgtaaaagttatttttctgccacaagtattcctgtcaatcttttagacaatatgaacatactttattcttccgtacggacagtaaccaatattcctcaatataatgactattatgtcccggatgatcttccaaacttcccctgttttagtcactatgatccttcgatcgagtatggcattgtccgcgtccaagacacttccatacacatcgtgattggtcccgtgttcgagactgagatcacacctgagatcctaaatgcctaccttcgtgaaaataaaatcccattctctgaaagagataagatccaggattttttatgctctatcccgcgtatgaaccaattacaattagccaagcacttaatttttcttcatcaggcaatcaataatgaaacctgtgaattatcacacttttttccggattataccccgtcagcagatgacatggcgaccaataccagatccaatatcggagacgaagccaaagaatatttcaatacctattccaacgaactgcgactttatgaaattattaaaatgggaaatgaggaggaattagaaagttatttaaatcagattccattgagtattctggcaaagcctatggcaacatcggcgctgcgccaggcaaaaaatatgttcattagcaccatcaccaatatcgttatgatcggagccattcccggcggtgtttcaacagaagttgcatttgaattgatgggacaatatgtgcaggaatgtgaaaaactccaatctatccacgagattgagactctacgctacaatatgctggttaaattctgccaactttccggcaagagccacatcccacttggggtatccagtgatgtattcaatagcatgaattttattcgcagccatacaaacgaaccgatcaacgtaacagatgttgcagataatatcgaacgcagcacttcctatgttacaaattgtttccgtaaagaactgggtatttctccgggtgcctacatttcacgttgtaaattggaagaagccaagagccttttaatgtataccaacatgtctttgacggagatcagcaattatctctgctactccagtcaaagttattttcaaaatgcctttaagaaaaaatttcagttgaccccattgcagtatcgaaaaaaaatgcaacggatcaactgaaatcctctgtttttcatattttatttataagcaaataccttcaatttcaccagagtatagtcattgtagcagaaacgggatgcctcatcgccattcaaacgacgaccggctttccactgtccatctacaaatttgccttcttccagtgcgatgatgtcatagtttggtttttccgggtttgcagaaaatggcgtgatcatgcagccattcgccaggatataataggtatcttcctctgccttcaatatcaagcacacaccgtcttttcttgtcacaagcggtatgttcatcatgaccttgaagccaaagccgccaaacatcatggtgtcattttccggatcactatttgccatcattccggcaaagcccttagacggatcgctcggcgtcatatccattttttcggagatcactgcctgcaaatcgtttgtgccataagcccctgtcagaagcggcatcatgtcatttaaggttgatgcacaccaacgatagtcctcgacattctgtggcgtctgtaagagcggatcggatacgtccaccccaaacagataggcagaaatatcattgaaaggctgccccatatcctcaaagccaaacggcgcaaaacaggttgcgtgataatggccgatcgtatagatcagacgcggtgcgcaatgtgaatgtgtcgctgtctccgggataaagagcggattgtccatcttggtgtaggtatcacagatctcggtaaagtatggcacatagatatccggagagatcacatcgatcgacggtgctgcgtagcgccatacctccatgaccttggctaccggtccaccggtcggatattttccagcttcttcgcccttatccagccagcagtttgcagaaaacggcaggtcatatactgccttgcctgcggcagccactttctccacataagatgccacatagtatgcagtaaagatctctccagcacatgctccaaagacctgctcccagtttccggcatgagcgccattttccacggcttccctgacatcggcctccatgctgtctgtatgagccttcatataagaaacaaattctgccggaacttcctctgcaaatttttcatcagcaaaatcggaatgttcccggtcagatccctgcataccggtctcgttttctacctgcatgccgattacagtacccacgttttcatcgacttccttgatatgtgccataagatgagcaaaagcattcgcatcagccttcactgtctcctcaccaaaagcggaaagcgtcgtgtattccatgccgtaaaatgccatcagtctggtcttattcttgcccttttccatctgggctctcgggaatcgcaccatatcctttttcacccattccggcgcatacatacactgggcattcttccatgtaccaaaccaaaggaagatcagatgcatttttctttctctcgcctggttgataagtgtatcaactagtgtgaaatcaaattgtccttccaccggttctgtcagttcccatgtcacagggagcagtaaggtatttaagccttcctcttctgccttatcccatacgccctgcatataggcggcatcggatgaactggagttgtgtgactctccggcgattgcgataaaaggttttccatctacggtaaatacggttcttttacttgtcataatcctatctatcctttctattttactttctttatgatgactcctatcctaacctcattttccatcgattgtaatttccaatgacgcacactctgtcgcttttcacttaccaaatccgacatggtattctcttttttcctccggcatgttatactttccccatgaacattacagaattactctcaaaaacagttgaaaaaagcacggtagatcagcctgtcgtcaattcttacgccgagcatcaggcatttttagatacgacttaccatttccaaaattctccgcgccgcctgacctacgacctggtcaccttgaccggctggcacaccagtcctcggtctaagcaggagtttttctatgccacgatctctgcaccggacgcttacacttttttgattccttttgaaaacggtatgcgctgtgccctccatgcacatacacatattgaactcatctacattgtcgaggggtctttgcgcatccatatcgaagatcaggacgtcagcctttcacagggagaaatgcttttgatctctgccggtgtcatgcacggagaatatcttctcgccagagactgcaccatcctgtgtctggatgtggacgattctttctttgatcaatatattggcgccgaccgccgcaccgactatatgcaggcactccgaaaacttctcaaccaaaaaagaagcgaatatctctatatccgcttctctccttttgatcagacacctctgacctatcatgctttttataccatattggaagaactgatcgcctgccgccccggcaaaaaacatatcatcatcggctatgttgagcgcatcattgaccttttaacacaggaatttcgtatgcaggtcatgaccgaagataccaaggcatggcacaatgccctgctttctgatatcaagcagtacatcaatacccatcttgccactgtgtcagtatctgccgttgccaatgcctttcactatagcccggactatctgaaccgtctttttcgcggggcagaagatattaccctctctgcctacatacaggagatccggcttgccaaagccatgcagtttttacacacgacagaccgctccattgcctccattgccgaggctgtcggctaccataatcagggcttcttttaccgaaagttcaaggaacgctacggtctgctgccgggggatatacgaaggtgatcctactccgtctttcccaactccttgcagatacggtcatattcttcctcatccaacttgtaatgcttcttatagagaaaataagaaagtagcatcaaaatgcccggcacgatggacataaaaatcaaaagccccatagcctgctgattggtcacatgggaaagtactgcgtcgatctgggacaacttgcttgcctctgtgatcaggttctgattgcactgctgctctaattctgaaatctggttggtataatcggtaacccccagcaaaatatatgcggctgatgtgaccgctacaatgatggctccacccagtttggtgataaaaggacgtagggatgtgatgatgccttcatcacgcgaaccaaatttgagttcgttgtactcgaccgtattcataatagagatcatcatgatcagatagtagcaatactgtccgaaattacagagcatatagccgatcataagcaccacaaatttgcccatgcccttgcccggcatcagcccggaggcaaagatcatgacataaccgatggttgcgatcacagccatatagcccatgagtttcttacgatggatatgacgtgaaatggtcggataaaagatcatcaaaaatgccgtaaccgacataccgacggtcgtaaacaaagaataaagtccaccttcatatccatagatagaataaatataagttgaaccgataccgcccacgatcaatccattgccgatctgctggatcaaaaagatgactgctacccagatcaactgatcgttccgaaagatcgcatgtaccagtttcctgaaactgaacttctcttttgccttattctcctgcgccgtatcgcggtgctccttagtaccaaaaatggtgatacaaagaaaaagcggtgctaagataccgatcaccagcgcaatcctaccgtatgcgtaagcagcattaccgccaatggtattcttgcctgtcgtaaaaagcggtatcaggatcgttgccgccgtaccaccaataccggcaaaaagcgtagctctcgaggcaaactggtttctcgcatctgcatcggaggacagcgccggaaccatgccccaataagaaatatcgttcatggtataggtaatactaaaggcaaaatacatgacaccaaaaaataccacgaacttccagccctgcaactgcacattaaacatcagataaataaccaccgaggtcgataaaatgcctgccaaaagccatggcttgaacttaccatatttacttctggtgcactcgatgatattgcccatgatcggatcattaaaggcatcaaagacacgcgctccgatcataataccggtgatggcggtcaactgcgctgccgtcagcgaatgggtaaacaagacaaaggtcaaaagataactgttaatcagtgcgtaaaccgcatcacgtcccatcgttcccagcggataagtgatcaaattccgctttctgagtttttcttcattctccataaaaagtacccctttcctactctccatattatatgtgtatattctacaacgaatagaaaagatacgcaattcttatgtgcagttttcataatttatatcctctttttacaaatatccgccagacagcatttatcacaataaggtgcagtccgcgcggtacacacggcacgtccgtgatcgacaagacgatggcagagctcactgccctcctccggtggcacgatcttccaaagttccatctccacttttttcggatccttgatgccgtccaccagtccgatccggttgcagagccggatacagtgggtatccgtcacgatcgccggcttgccaaagacatcccccatgatgaggttggcactttttcgccccacgccgggcaaggaaagcagggcatcaaaatcatccggcacatggcagtcatactgatcgcgcagcatcttcatgcaggcactgatgtcccgcgccttacttttgcccagtccacacggatggacatatttttcgatttcttccggggtcgcctccgccagcgcctctaccgacggataagccgcaaaaagatcctgcactacaacattgactctggcatccgtacactgggcagccagacgcacgctgacgagcagtttccacgcatcatcataatccaggctacaatgagactccgggtattcttcctttaatctttctatgacaagttttgctaattctttttttcgcatccttttctcctctactcatactccggcagatgtatgcttccaccttcaaacattgccttgacctctcctataaaataaagagatccaaaaataataatacgttctcctttttcttctcctaaagcgatcgccttttggatcccatccaaaagatctccacttaccacagcagacattccatcttccaaaagattctgacacaactcgtccgcctgtaaactgcgactggtatcaaccgtagcacacaaaaaggtgtccgccagcggatacatggtccgcatcatggctctgtagtccttatctgccataactcctaccaaaaagacaaatttttcatccggaaacatattttttagtgagttgaataacgcttcaactccctgcggattatgagctccatctaccaaaacatacggtttttcggacaaaacctccattcgtcctggccacttggtttccgctaacccttgtcgaataatttcttcttttttcgacaaaaagttatccccgagatatccacaatggttattgaataatgtttccactacccccacagccaatgtggcgttagccctctgaaatacgccgtttagcggtatttcgtaggttgagatttttgtcaacaagttatccacatttgtaatggggacatccaaactctccgcctgtttttttatcacatccgctgctttttcatccataattccaagaactgcatgggtaccttttttcaaaatcccggctttttccgccgcaatttcttctatggtattgccaagaattgccgtatgatcatatccaatatttgtaaacgcacaaacctcaggaacaactgataatcccgccgtcgaatctttcgccccaccgagtcccgtttctaaaacaacaaagtcacaattcttctctttaaaatatagcactgccattcccaggcacaaatcaaacatcgttgtttcctgtctcatcggaagttctaacacacgttctcctaatcgtatgacatcatcttttccaatttcttctccgtcaacaacgatacgttctgtaaagcggatcagatgtggtgatgtaaatcttcctacaacaaaaccggcagcatgtaatatactacttacaaatgctgccgttgatccttttccattggttccggcaatatgaatgattttcatgcccgtttccggatgttctaaacgttccatcatttccgcggtcacatctcttccatatgcctttccaaatcttctttttgattgtatgatttcgataatttcttcgtattgcatgtgcgctataccaccatgataatgcctccatcattggcgtacatactgctgacacctgccgtatcaacaataaaaatatccttaaaagaggctaccttttctattttttcttttaattgtagcgcacgctccctacagttacaatgggaaattgccagaacacggttctcacagttcttggtcacttccatcatggactggaccatgcgatccaatgccttattcatgcctcttgcctgcgccaactgttgaatggagccttcctcggtcgatcccatgatcggcttgatgttgagggtgctggcaagttttgccttcagattgctgagacgccctgctttgcgcagggtctctaaggtctccagtacaaagaaagtgtgctggttttcgatgtaattaccgacattttcaaccactgtctcaaaatccataccggcttcttcacaggatgcaatatagagtccgatcaaagattccccgacagaagcggacttggaatcgatcacacagatcttcttatcctcatggtcttctaagaaaagatcctttgccagacaggcactgttgtaggatccgctcaactgtgatgacagggtgatcacataaatatggtctgcatcacaatccatcgcctgcatataggcatccggggaaggacaggctgactttgggctctcctcactggcagcgacctttttcaaaaaatctgcctgatcaaaggtcatatcatcaacgatctctgcatcatcgacctgtaatgtcagcggaacattggcaaaatgtccgttctctttcatttcttctgataattctccacaagaatcaatgattattttatacataaaaacgcctcccaacctgtttgtggttttgttttatttctcacgtggttttcatcaccacatcataataatatataaaaccacttttgtaaatactttttgcgcattttccagcaaaagtggctttttcctactcttttacaagacaaaagtcaaaatatagagcgattgattttcaaaataggtcagttcctgctgcccctccagatatgtaaagatcctatcctgcccgatcagatcgtcttttacttgcaggtaatcctgcaaatttgacatacgaagggagatttctgtcgcgccccgtcgatatttttctctgatccggctgccaatagcagacaaatctgctgtctcaaaatacagaccttcctgataaaagtaattgtccgtcacagattcacaggcaggcaggtcaaagggcatatccgccgtatgggtcgccgccagatcctgcgtactggcgcccagatagccataatcgatcttcttggcaccctgcaattctcccagaaaatgggtgttgccccaagtggtatcaatataatagtattctccgtccagattgaccagattccatgcatggttatcgccacctgccagaccggtcaccacgatagacgacacgcccagttgccacaaaagatattgcgtcgcatccgcatagccctgacaaaccgtcttcttacctataaatacgctgatgatattctgattattctggctatcgacatcataatccacctgactgatcagtgtttcatagacatacttgactttttcataatcggaggcatcgctgtcgatcccagccagccaaaggtctgcaacatcatcgatctgcgcttgcaagtcctcccgctcctgctgggtataggtataggtcggcataaattccatgccgatcacctgatcaaaactggaataggtgttgtactggtaaccggatgtccagaaaagcccgccgtaatctgccatcacacagcgatatgccttgtctaagacatcctgatccttggtggataccgtcacgcaatcggtatgatgctggatgcaatctaagatctgatcgtagactgtctgctcctctgccgacaactgctggtaggcaaagcggtctgccgaaatggtctcaacctcttttgcctcgcccacaacgaccttttccagccgcccattgacggtctcctgtaaaaaatccaccggaccgcaggcagtaagaagtaaaaggcaaagactgcatacaagccccagacaggcatatattctattatgtccttttgtattttttctcattctaatttccaaaggttaaaaaatcgttaaagttcaggcttctccataaaaagatacgatcagatctttcaggttgccgtaatctgcctgccccatcaattctcttgcggaatgcatggcaagcataggtacacccacatcgatcgtgcgcatcggtaaaagtgcagaggaaatggctcccaaagtaccgccgcccacaatgtcagatcgattcgtatatttctggtaagcgatcccatttgcccgtgcgatctgttctacaatgccaatggcttcgcagtccgtagcataagattgagaagcagcctccttgatggcaaaaccatctcccatgatcggctgtgatgtgatgtctgctttttccacatgatttggatgcagggcatgcgccacatccgcagagaccatcagtccctgataaatggcatcttttgcagtccgagccgtccatcccatagattcatagatcttttcgatgacatcggtgagaatggcagatcctgcgccctgcttggtccggctgccgatctcctcgtggtcgtaacaaatgccgatatttaaatgcttgtcacaagttgcctgacacatagcctccatgatcgcagcacaggaactgatattatcaatacgcggcgatgagatcatatcctctcgcagaccgatctgagccggttcttcccagacatagatagacagttcaaagtccagaatatcctccaccggcacttgcagttcttttgccagaaatgtcataaaggcatcctcatcctcgcccatgccaagcaatggcagcatatcggcctggcggttgagttctatgcccttattgatctcacggttcatatggatggcaaggtttgggatggttgccaatggtcttttactgtcgtacaggcgcatctgcggatgtaggcacttatctgaccgcagtgccacgcgtccggcgatccccagcggacgatccagccatgtgttcagaatggctccgccgtagacttccacattcagtttatgatatttcttggtcttgacatccgggctggtcttgatccgcatacaaggataatccgtatgtgccgcagcaatgcggagtgcgatattatcctgacttgccagcatctcatcctttttgggcacggtaaatgccaggatcgttgtgccatgatgattgatataatactttttgctttcttccagatgccatgcttcttccatggcaagcggtgcaaagcctgccgcctctaagtctgctgcgcactgctgcaccagatgaaacggagtgatccccgccttcaaatatttcactaagatctcattcttcattctacttcctccatatatagcatatcgccttttcttactgtcatacgtcctatctgcgcaggacgggcaacactctttgtataggaaacaatctagggcaagtatgaccgggggcactgatgttcccgtcctgcgcagccgccgcaaagcaaaaggcgacatgctatgcacgccgcctttccttaatcatgctgtatcccaatttcctgctcaatttaaatcaagatgtataaactaaaaaggtacattgaaaacggtctgattaatacttcgtagattagcctactactgttacgtttactgcctgtggtcccttagcaccatctgtaacatcaaattctacagcagcgccttcttctaaagacttgaagccctccatgttaaggcctgtgtagtgtacgaaaacatcattgccttcttcgtcagagatgaatccgtaacccttctggttgttgaaccactttactgtacccttgctcattacaagtacctccaaaaaaattatctatattggaaaccaatatgtgattagagtagcacacaagcgccgaaaagtaaaggcatttcggtctttcttacacggctttttccactgcgatcgaaagtctcccaaaaaaggctaatacccatgttttccatgcttcttccatgcttcgatccagagaaaatccctgcatggtgcaacctgccgtcaccagtaattcttccccgacatagcgtaaattcagggtcagattggctacctcggacggctggatggaaagactctgtccctctatgatctcgcgtaaaagtttttgcggacatagaaaggtaaaatgaaaagatgccggtttgcgcttgcccttgatcatatcaaagcacaatttgcgcacatagccataaggcacacagcgctccccggacagtccttcctccaaaagttcctcctcggttagatagcccttggtcagatgtccgtccagagaataagtcatcctggtcgtgatcgtcgcatctgacaacaagaaacgatcaaaggcttccgacgccaaaaggtcattcatgcaattttttacatctaatactttaagtgctaacattctctctccttggtatctgtgataggtcactgcctctattttaacagaactcctgcttcccgcctatccttattatatacgccggaaagattcatacagatccagcgccccatagccccactgcctgttgggataaaggtcaccggggatcgcccttgccccccggatcaaaaaaattttaacttgtgtcgtattgaccagagtatcctgccgtctgtcgcaccattgcagataaagtgccgcggcccctgatgcgatcgccacagccccgctggtaccagtctgcctttcataccgagcttccgccgggaaattgcccctgcctgctactgctccttcgaccgcatagcccggtgccgccagatccggtttgatccgccggtctatagtatagccacgcccgctttccaaaagaatagcattttccacggcattgtagcctgcaatggtcaaaacgcggttggcattcgccggattcataatggtcgtatccgggttggatgccagaaagtagatgcgcccacatgtcagcgcctgccccggcagatacatatgaaattctcccggctgtccgttttcgctgtagacccggatccgccatatgccctgcgccggttttgtaaaacgataatagatcagttggttgcctgccgtggcttccgggaaactgtagtccacttccaccgtcgttccatccagaggaaaatcatagatctgactacccgccgtctggatcccgaccgccggatgtacctccccggaaggcgaaacgatcgccacctcatagcgggcaggtgccagacaccactgttccatgacaaaaccgcagacatcttcttccaccacaacttccacctgccggtaggcctttttccccagtccttcttctatgtcctccgccgtaaagactccctgaaaatgctttcttgccgccgcaagatttccggtcgccgtcactacacatctgcggtaggcaaccgccagatcattcagataaagtgccagggaattgttgccgctgtggctgctgagcccgcagcccaaagacatacaaatcacgagcgcctgcccccgcatccttgccagttcatccaaaaactgtatgccgaacatgatgtcattttccgcatagcaggtcgcatcctccgggataaaataatactggcgcagataaggttttgcctcttttaaatgcaccatggcgatgtccgccgccggtgccgccccactgtgatctcctacgtcactgcctgcagccacgctcgccacataagttccgtgcccggtcgcatcacgattgccatagacagaaaggctatcttttccatacactctgccgtaataaggctgtggcaggtcatccgccgttctgaccgtgccttcgttttcttccacataattctgatcccagaccgcgacgattcggctttccccagcggcatccaaaaatgccggatgggtcgtatcgatcccagaatccaaaaagccaatcaaaacgccttttccatccaagcccagcgccgggttttcccgcacctgcaggatccctgctgcatccagggcttccatggacagaggctggtagcagtttggtatggcattatagtggtaatttgccacccgaaagtcgggatagcgatcgcgcgagacaaaaagaatggtgtaattgttccccacatccagaccacagatgccatccgaaagcggaggcaaatatgccgtgttgcgcacgatcagatcgtaataatcatttccatagatcatatcataacaattcatatgatatcttatgctatgatttgctttctatatccaattcctgcaaaaattcttccagataagtctcgccttcctcataggcaaaatccataaaatacgcatgggtctgctcataggcagcctgctcgctttccggcagggcaatctgccccaaggtctccaagccccgctcgatcgatccggtatcataggaagcaaaagcctccttgatctcctgccaaagatactgccttttgtcgcgagacatgacctttttctgctccgactctttttccgtctttgccagagcatcctgcatataggaaagttctgcccgcacttcctctaaggcatcatccatacaggaaaggagttcctcgatgtggcgatcgatgtatttctgattgcctacgatcgccgccatttctaaaacttccgcatattcgctgagatattccttcttgatctgtcggctggcactcttgacaccatgcaccttggcacggaaaagttcccggtcctccttagcatagactggtagttcctcccgcagttcttccatctcatccagataggtctgcaaagcccgcgcatagatctcgatatgatgtgcctgccctgcgttgtcccgcaagacgaccggcgtctgcttttctttgggcagcaattcctccagcgtgtttttgaagcggaacatatcgatcggcttgcccaggaaagcatcaaatcccttgtccttaacagctcgtaaaatatcttcctgatcgctcgccgtcaaaagcaccaatggcacttgactgtatttgcggatctcggatcccgcttccagcccattgacttccggcataagataatccaaaaagatcagatcatagtcctcatgtctggcagcctcaactgcttccataccgttcgccacgatgtccagttgtactttccaaggggctatcatatggcggaagatctgctgattgatgaccatatcatctgccaataagacccgcgccgtcggatagacataatccgggcagacatcatccttgtagttgactattctatcaaccaaagtaaagtgattgatctcacccggctggattttgccttcatccgcctttctatggcagaaggtcacctctacccttgtaccctttccctgctggctctccaccttgcaatcgccctgcatgagtttgcacaattccttgacaatagtcatgccaagtcctgtaccctcctgtccgtccacggtataggtccgataggactcaaacatatgcgccatctgttcttccgtcatgcccgctccggtatcctcgatcaggcagcagaaacgcacccggtcatcttccagatcctgacaggacagggtcaggtcgatctgaccggatttggtaaatttgaccgcattggagatcacattttgcaggatctcccgcacatgttcctcatccccaatgactgtctgcgggatcggcgttgcaaaccgcgcccgacagccgacatcatgcccatgcaagttgtataagagcatctgcatgagttccgtgatcaggtgttccatggaataagcgtgttcttccaattccaaacgtcccacttccatctttgaatacaaaaggatctgatcgatcttttctaaaagatcattgcctgcccctcgcacataagagatcatggcacggtttctggcagaaatggcatggctggtcatgaggatgtcactggctcctataatggcatgcaccggtgtccgcaggtcgtggctcatggtcgcaagcatgtggcttttcatctgtgcttgccactgtgccgccttgctctcctcggtcaactgctccagacgcgcccgctctgccgtcacatctgcaaccgacaactgatagcctaaaagccgcttgccctgacagatgatacgctctttacattcataagtcttgtcccgatagacataatcgcccacactgccgtcctgcacaaagatcatatctttatgtttccagaagaagtcatggatatcctcaaaattgcaaaactccttgccatccaggaaaatatccatcgccataccattggcatcgatcaattccaggtttttatccagcaaaaactgcgccacactggaatttgcaaaagcattctgctgcatgaccacgctggtcgccaccagacgattggcaaagatcagatataagatgataagacaacttgccagacataccaccaaaagcagggaatgtccccgtgttgatttgacctgccaggtactgcccaccacagacggcagacaaatggcgataaacataagggcattcgtaatgctgtcgcgtttggaaaaatgctgtgtctcatatgaatataaggctcccgccgatacaaaaagcgcgttagagatcgtaaagaaacgaaatgccaccacataggtatccggctggtcgaaatgtaaaaatatcaggataagtaaaacgatcagataaagaaataagcccacatggatagcgtgaggcaatttgatatgcagataatcgaccgcataataagagataacgg

SEQ ID NO: 12465 - DNA, 27878 bp, Unknown
  gut microbiota DNA sequence
ggcacggtccatatatggtgctgggagatccgcatcctgaggatgtttcacatacatcctttcactctcagatctcttgtatcttcaaggtggagggaacaaaagatttatatattgcggcggcagaccgttggtgtccggattgcatggatttagactacgaattctatgcaaaagtttacgataaattattttccggaaccgaggaagaaaaaagccgcatacgtcagatgccggaattttcgcgaatagatgatatgggaagaaatacttccattgctgattatgtctggctgccaattcgatttgtagaggcgtgtgaggaatacccacaggggatggtttttatcgactggaaggatgaatggcgttggcaggattatgtgggaaaataagaggttttatatcaccatatttttccgactgtattaaagatagtatgggtagtgtcttctgtgctatattaaaagaaaagtaggacaattgaggaggtaagccatggaaatttatgcgttacaggtcaatcacctgagtaatccattggggtatgcattgggaaaagggaaactgtccttttcgtggaaagtaaaagaagccaaaggaaaggcacaaaagtatgccaggctgcgcattgcggcagatgaagccatgcgggagattttgtttaattccggggaagatgtcaaggcaaatagtcttggttataaggttgatcttaagacagagccgcggacgcgctactattggactcttgagctggcatccgatgcagatgaagtgactgttagtgcgccgcaattttttgagacagcaaaaatggatgaagcatggactggaagatggattacttgtgccgctgaacaggccagacatccttattttgtaaaggagattgctgccaaagaagaggtcgcaaaagcgagactctatgtgtgtggtctgggactttatgaggcgtattggaatgacgaaaagattggcaacgaatatttaacaccatatcagaataactataaccgctgggttcagtatcagacatatgatgtgactgagcaggtaaaggatgggggaaaactgcggatccttctgggaaatggctggtatggcggacgttttggctttagcgcacatgaggaaaaaggatattttggaaatacgcacaagttaatagcggaagtgctagtcacctatgcagacggcacagaggaaaccattggaacagatgagacctggcaggtcgaaagaagccgaatcacatactcgtctatctatgatggtgaacatatggatcaaacgctgacagaccttgcggcagagccggttatcctttgccggacttttgaagaacttgccgcagcgggaaagacggatgggcagacggtggatgatatcagccagccggagaaagatgagcagattccaagaggaaggctgactgctcgctacagtctcccggttgtggttcatgagcagatgcagccgcaagaattgattcacacaccaaagggcgaagacgtctttgacatgggacagaactttgcaggtatctttaccttgcgtgttcatgaagcccggggaaccaagattcatatccagacaggtgaggttctgcaggatggatgcttttataatgagaatcttagaaccgcaaagtcggaatatatttatatctgcggtggcggcgaggaagtcataaagccgcattttactttttatggctatcgttatgtcaaggtcacaggagtcagcaatctgaaaacagaggattttacagggttggcactctatagtgaggtggcatatacgggtgacatcacaaccggacacaaacttgttaaccagttgatttctaatgttcgctggggaatgaaaggcaactttgtggatgtgcctacggattgcccgcagagagatgagcgtatgggttggaccggagacacacaggtcttttcgccgacagcgacattttatggagatacctatgcattttatcgcaagtatctgcatgatatgtatacggagcaaatagatctggagggcatggtgccggatgtggtgccatcggtcggtgtgcatagttgtgcctgcgcctggggagatgccgcatgtatcattccatggaatatgtataagttttatggggatgagcagatccttgcagatcagtatgacagcatgaaggcctgggtcgaatatatccgacgccttgacggtggtgatcatggctggcgccatgtattccactatggtgactggctggcattggataatccgtcaggcaaggcagatgaggtcatgggcggtacggaagaaggctatatcgcaaatatctactatgctgcgagtgctgaaattgtagcaaaatccgcagaagttcttggaaaagaagatgatgcaaaagaatacaatgaacttgcaaaacgtgagtttgctgaagtgaaaaaagagtacttctcacagacgggcagatgctgtatcaagacgcagacaggtcttctgctggcattgaaatatgggctttccgataatgtcgcgttgacgcgtgatatgttgaaaaaactatttactgcaaacgataataaattacagaccggatttacaggtatgccgatcatgtgtccgacactatcagataatggcatgaatgatctggcttacactctcctattaaatgaggaatatccgggctggttacatgagatcttactgggagcaacaaccgtatgggaacgttggaacagtctggatgaagaagggcatatctcaagtacgggaatgaatagtttgaaccattattcctatggatctgtagtggagtgggtctaccgctatgtgttgggatttcgtgtggatgaagcagatcctggtgcaaaacatttgaacatcgctccatcctataactggaatctgaaggaagcggcaggaaattttgacagtgcagcaggtaattataaagtggcatggaagattgttgatccgacgcaggtaagcctttctgtgcaagtgccatttgatgcaagtgctgacattgtacttgcggatgcggtagaagacacttatgcggataaggaaaatcctttatttgcagatgtatgtgatggtgtatgccatgtgggctctggtacgtatgagataacgtatcaggtaaagacagcgcttaagaagtcttatagcacctattccacagtgcgtgaattgagatcgaatgcagcgattgttaaaaatttgggtgagaaaatgggattggatcgtatgccaacgcagatgatggatatgagcctgcgcgatataatggaaaaatatgcgggcgctgccggaatgggaacagaaatgctggatcagttagatcaggtgttggcacggttctagaaagacagatattgctattggcggttttaaagttttgtaggcctcacttgcgtgaagcctacatttgccagtatgaatttagcgaacctttatggtgtcgcctcttgtgatgccgctttcgttaaaggcatccacgcgcaggaagagtgactggtctttgatgagtcctccgatttctacgctgccatcgaaggtcatataagagtgataaagtttatccggcgcatagccccagttgatgacatgacctgtggcatcatccgatgcagcccaatttaccagaagatcaagagccgtcgtaagttcaaaagtaacttcggcggttttttgcggttttgggttatctcccaggccgaagatgcggagtccgctgatggcaggagtctgatcgtaaggcagttgtgtgacggtcagacggataaaacgcgcctctatgccatcctcggaaacgatcagatcatgcggtaggtctgtatctgcatttcgtttgtctgtgatggtgaaaaagtgcgtgccgtccacagagccttccaacaaccagcgggtcttttgcggatcggtatcaatccaacgctgctgcataagtgcctcattcaaatggaagtcgtccggcaaaggatccggggtaaaggcatcatcggcaaagttgatctggatggcatggacatcataagtctttccaagatcgatctgcagccaaggcttttcatcctctgatgcggctttccaccaagtctggacattttcatccgtggcatttgccggagcataatctgtgacgatctcaaccgtctttcccattctctgtgccgtaggatccggttcgatctttttctctgaaacagaagaagcagaagccccggctccataggataagagcatccactctggatccgcccaaggatccgctttcaaggcatccatatcctgtggccagtcgccgtatctctggttgcagaaaagatcgccgttggcatcgtatccggcagaccatagaccgatacggcgttcaaagttatggtttttgcagatacgcatagtagaggtgtgccagattcgacctgcctcgtcttccatggtagagccgtgtcctgctcccggcaaaaatccgcccggcttgtaggagtaaggattgttctgtgccaacacataaggtccgagtggcgcgtcactgatatagacagcgtcgttataaatattatgaccggaagaaggcgtagcatattgtaaataatactttccggcatgcttattgacccagacgccttccatataaggcagttccagcaagtagttctttgcggcttccttcatgcttttcggcataggctggctttcgatcatggcaaggatgcctgcctgctcctccggtgtatggcttggcttgtggttttctccgtttctctcaaagcctttgatctcggtatcaatctcacagagtgcctgctttttcccgatcggctgcatgctgacaggatccagttctaccccatacaaaggctccgaggttgaagatccccagaaaaagtagaatctgccgtcatcatctacaaagagattgggatcccagaaaggaaaggctccgtcaaatgtctcataagtatcagaaaaaggatcggtggtgcgatagtagatacccttgtcgtggctggatgcgcagaaataaagataatcgccacaaacgcggacatccggtgcatagtcgtagatcggcagatgggtcgttgtaaataattcccagtttaccatatctttgctatgcaaaaatccggcggtcatggaagggaagatatagtaggttcccttaaagtagatcatggatggatccgcagcctcacgcgaagcagtcacgccaccctccggtgtgccgttgaactgatagcggtatccgaaattgataggattacaataaatgttcatgtgtaaataccccactttcttatcattcttacccttatcatagatgcaaaacacatagtcgtacattcgtatttttgcgtttactatcatattttggtaaaatatatcatattctgtgaaaggaaagagaggagccggcatggcaatgacaacaaaagattttcaggaacttctttgtgcggtggagcatttatattattggcaatgtgacgcgaacggaaatatacttgagaccaacgcgccccggaatatccggcaagggatctattctctttttatacaaagtgattttccacaaaaggtagagatttatagcaaggatgcagatacaccctatgcccttggtatgtatatgggcttggaatggtttgttgttatcgaaaagaaaaatggtaacttagagcagatgcacctgctcggaccggtctttttttcgccggtcagcgaggaacaactggaggattttttgcgggaatatgagacacaggggatggggtttcacagcaggcatcttttgatccgcagcctgaaagaacttccggtcatctttcagaaatatttcacccagtacgccctcatgttggattttgtggtaaatcatcgtcatctgtcctatgaagatgtcaattttcatgtcaaagatccggtggatgaaaataaggagacaagagctagactttatcgggagagtcgtatctttcttgcagagatgctgggacggcttgcgatgggagatttgtctgtcttgcaggataaaaagatgaaaaagggcatgaattatgccatgcttccgacaaatgcggcgacgatcacggaacccggtcgcaccctaaaagatgcggctttgatctttacagcaaaatgtgctgatgctgctgtctcaggcggcatgagcccggagattgccgatgccctggcagattcttatatgggacagatcgaaaaaaacctatccggggtggaactcatgcgtctgatgggaaggatctacgaggactatctgcggcgcatgcatgcgatcaaggaggaggcaggaaaatattcagaaaagacgcaggcgtgtatggattatattgatctgcatatcaaagaaaagatcaatgtgacgaccatagcccagaccagtggctattctgtctactatctgtcacgtcaattttaccgggagacaggggaacacctgccggcatacatacggcggaaaaagatagaatatgccgcaatgttattgcgtacgacagacttagaagttgcccagatcgcggaggatctgtccttttgttcggcaagtcatttttcggactgctttcataagactatgggatgttcgcccagcgcataccgggcgcgcatagagtagccagtttgcggaaaacctgttatactttgaaacagaaaacgttttgacaagggggagcgtatggcatatagcagagaagaagcggcagagcttatcataaaagccggctatgccttagtggaaaaggggctgattgcccgtacctggggcaatatcagtgcccggctttcggatacagaatttctggtcacgccaagcggcatgggctatgaccgcctgacaccggacaaacttgtggtctgcaagatcagtgactgttcgtatgagggggagattaagccgtccagtgaaaagggtgtccacggtgaggcatacaaataccgaccggatgtgaattttgtcatccatacccaccagttatatgcgactgcggtcggtacgacgggaaagagcctgtcggcaaggactgcggaggaagaaaagatcctgggggcggatgttatcagtgcaaaatatgcgatctcatccaccaggcatttgatgcgcaatgtttcggatgccattcagaaaaataccgcaagcaatgccttttttatgcgttatcatggggtgctttgtctgggaagggactatgaccatgctttcgctgtcagcgagaccttggaagatatctgcaaggacattatttgcaggaaagaccagttgatcgtggacgaaatacgcatgacagatccagggaccatcgcacaaagtctggggataagtcttgacgatttacaggctttggtggataagaccggaaagaaaagcctgctcttagatacttcaaaagtggtagaggacatagcgggaaccgagacaaagatctatcctatgatcgatgacatggcgcagatcgcaggcgtgcgtttcttatgtctggctcctgcggatgggacattccttacaaaggcagaaagccagttgcaaaagaagacctgtgtctttatccgggggatcggcgcgctctgtctggcatcggatccggaagaagcagaagcggtcgctatggtcttggagaaaaattgtctggcatatgcctatgggcgcagacagggagagtacgcgcatctgggacttttggatgcagccttacagcgcaacacctatgtgaagaaatattccaaattgaaatagagggacggacatggcaaagaagaaaaagcggatggagtaccgctactatgagatcccggcagacacctatgtacttcccctgctcggaaaaggctgggagcaggagtacggcgtaggcattcgggatatgcttcattttcataattatatggagatcggctattgctatcatggggacggggaactgatcattgaggacaggacctaccattattcgggcaagcagtttactatcattcctgccaatatcccccatacgaccaacagttcaccggggcatatctgtaagtgggagtatctttttgtggatattgaccgctttgtaaggacggaaatgcatctggatgccttgttagaagaccgtgtgcttagtgttattaaccggcggggtacgatgaaaagcgagcaaaatcacggcatcatggcacgcctgatcctaaatatcatccgggaataccgggataagaccatctattatgaggagagcgtgcgcggttatctctatgccctcgtggtcgaaatgatgcggcttgcagaggagcgcgaccgttccatgcatacgcatcgtgtcaacgaatacatccgcgatgccttagaatatgtaaatacgcattacatggagcaggtgcgtgtggaggatattgccgaggcgagtggactgagcgagagccatttccgccgtgtctttgaggatgccatgcatatgaagccgttggattatgtgaatctggtgcgcgtagataaggcgtgcgggctgatggcaaggcaggacatttccatggaggaagttagttttcgcgtgggctaccagacccagtcgaccttcaaccgcaactttaagcgtttgacgggctatagtccaaaccaatggaagcataaagaaaattatcaagagggtattctgaaaaattatcagatcagtgcattaaagggctgggaagcatgacttcccggctttttcttattttgtgcaatatgttcaaaatttgggagtaaagttcctgcaaattgttcaaagagggaaacgagaaatgtgaaaatcgtttctgaatggttgattttgcaaaaaagaggcgcgtttttaatcacaaataatcaaatggctaggtataatagatttatattcaagcaaaggaaatctcaaagacattcactcacacggatttccaaataagcgatgtttaaaggaggatttttaatgaagaagaaagtcgtttctttattgctggttggggtactggcaatgtctacattcgtaggatgtggaagtaagggaagcagtgatgcaacgtcagatgactcaagttcagatgacagcagtgcagcagcaatgtacacctcagatgatgagaacacattgaccgttgcagcatgggatgcaagtttcaacatcccggcaatcgaggcagcagcagaggcatacaaggaaaagaatccggatgccaagatcgagatcatcgagcagtctcagtcaaaggatatcgagaatgcagttacaacagcagcagaggctggagactacagcaacttacctgatatcgtattattccaggatcattacattcagcagtatcaggctaactacccggatgcatggcaggatgtagatgacgcagacatcgattggagcgatttcggatcagagaaattatcattctctaccatcgatggcaagcactatggtgttcctgtagataacggtacagtcgtatttgcatacagagttgatcttttacaggaatgtggctacacattagatgatgttaccggaatcacatgggacaaattcatcgagatcggtgagcaggtttacaacaagacaggcaagtatctcctttctatggacggtagcggaaatgaccttccttacatgatgcttcaggcagaaggcgtttcacagttcaaggatggcaaggctaacttagttggcaatgagacattagagaagatcttagacgtgatcgagagaatgcaggaaaagaacgtattacttcttgagaacgactgggatggttacaccaacgatatccagaaggataaggttgcaggtgttatgaatggtaactggatcattcctaccattgagaaggttgatgagaactctggtaagtgggagatcacttctatgcctacactgagcggcgaagaaggatatgcttctaacggtggttcttcactttacatcacagcaaactgcaagggtgacaaggttgatcttgcaaaagacttcttggcatacacctttggtggtggtgaaggcgcaatcgatacatacgacaatgcacttcgtaacggtggtgttatcacaacatgtatttcagctggtaagtcagatgtttatcaggaaggcgttgcttacttcaacgatcagccaatctacgctaagatcgtagaaatgggagcaaatgttaagactgttgagcagagcgattaccactacacacttcgtgagaagttgtcagcagcaatcacaaacatccacaatggaacatctattaaggatgcaattcagcagacacaggatgatatcgactttgcaatggaagagtaattccatacattatatttaaaaaagcggggaatcggatcttccgactccccgttttccataaagaaacctcaatgaaatcgaaaaggggggcttaacttgagcaagcagcataagagtttgaacatacagggtaaacaacaaagagcaggctggttcttcttggcacctgcagcgatcatgatcgcagtctttagtttttggccgatggttcaggctttcattacatcatttacaacaggaaccggtgtcaaccaaaagatggcggatcctatattttacaactacacacgtatgtttgccgacaggacattccttcgttctgtaggtaatacattcctttatctggcgatcgaagtgccggtcatgttagttctggcaattcttttggcacagttactgaacaaccgagacctcaaatgtcgtggacttttccgtaccatggtattcttaccatgcgcgacatcactcgtatcttatgcattgatcttcaaatcactctttgcattagatggactgatcaacacgatctttgtcaatcttggtatccttgagaccaactacaacttccttggaaataccggaagtgcaagagccatcatcattatcgcactgatctggagatggacgggttacaacatggtattctatctggcaggacttcagaatatcgaatattccgtatatgaagcagccaagattgacggtgccaacggatggaagactttctggaagatcacagttccgcttttgatgccgaccatcgttatgaccgttatcatgtcaatcaatggtaccttacagttgtttgatgaatctgtaaacttgacacagggtggacctgcatattcaaccatgaccatgtcacattacatttacaacaatgcatttggtcagggtgttggtaagtttggatatgcatcagcaatgtccttcttcatctttattttggttgctatcctatctgcaatcagtatgaaagtaggtgataatcgtgactaataaaaagaactcttccgctatccagcgtagattgataccaacttatatttttctgattatcgtatcctttatttcggtattcccgttatactggatgatcgcagcagcaaccaaccgttctgtcgatgttgcaagaggtaagatcacttttggctcttatgccttagagaacttccaaaatctgacatcccagacagatctgtggggagcacttgggaactctttcctttatgcgatcgtacagacagtcgtagcactttttatctgctctttggcaggatttggttttgaattgtaccacgacaaaggtaaggataaagtattttctatcctgcttcttgcaatgatgatcccacaggtggcaaccatgattccactctttaagatgatctcatctgcaggacttttgaatacggtatgggcatttatcttaccaagtatttccacaccgtttttgattatgatgttccgccagaactcacgtaacttcccgattgatatcatggaggcagcgcgactggacggattgtcagagtttcagatctacttccgcatgtatatgccggtcatgaagtcaacctatgcagcagcagcggttatcaccttcatgaacgcatggaacgcttatctttggccaaaggttgttatggctgataccagagcacagaccatgccaatgttgatcgccaacctggcaagtggatacacagtagattatggaatgcttatgatgggcgtattgttctgctccatcccaaccatgatcatcttcttcgtattgcagaagcagttcgcagaaggtatcacaggttctgtaaaataagtttggcaagtcatacttgctatgatgtttgattaaagttaagtgaaggtaatgaatatggcagaatttcgatatagtatcataaaaaatcctgaaatctttatggaaaatcgtttgccggcacattccgatcatgcatattatcgcagtgaggaaagtgccctggcaggatgctctgatttcagggaatcattaaacggtatctggaaattctcctatgcaaaaaacatctcatctgcgatcgtaggctttgagaaagaggactacgattgcaggacttgggatgatatccgagtgccggcacatattcagatggaaggatatgacacaccgcaatatgccaacacccagtatccatgggatggaagacaggcagttctgccgggagagattccggaggaattcaatccagtagggtcatatgtcaaatattttgaagtgccgaagagcatggagaatggtccggtatatatttctttccaaggtgtagaaagtggtatggcattgtggctgaacggccattatgttggatacagtgaagattctttcacaccatctgaatttgaactgacaccgtatcttacaaagggcaccaacaaattagccgtacaggtctacaagtggacggcaggttcttggtgtgaggatcaggatttcttccgattctccggtatttatagggatgtttatctctatacgataccaaaagttcatattcgcgatatgaagttaaaaactgtccttgacaatgagtacaaggatgctgtcttacaattagatttagaggctaccgcagatggcaaggcagagatctgcctgtcagatgatgaggtagaaatggtcatgacgggggaccttaccaggggatccaaccacatggaaatgccagttaagagcccgtctctttggagtgcagaggatccttatctgtatgatctgaccctccgtgtcacagatccggcaggagttttagaggaagtggtaaaagaacgggtaggtttccgcaagtttgaaatgaagaaccgtatgatgcatatcaacggcaaacgtatcgcattttacggtgtcaaccgtcatgaattcagtgcagaccgtggcagagccatcacggaggatatcatcttaaaagatatcatcaccatgaagcagcacaatatcaatgcagtccgtacctgccactatccaaatcaaagcgcattgtatcgtctttgtgatgaatatggattgtatgtgatcgacgagaccaatctggaaacgcatggaacatggaatgcacaccagatgggactggttgacagagattttgttgtaccgggcgatagaccggaatatcaggagttgatcttagatcgtgccagaagtatgttcgagcgcgacaaaaatcatccgtctgttgtgatctggtcttgtggtaatgagtccttcggtggcaaggatatcttagaaatgagcaagtccttccacaaatgggacgacaccagactggtacattatgaaggtgtctggtgggatccgcgttatccggagacaacggatatggtaagttccatgtacacaccggcagcagaaattcgggagtatttaaagaagcatcgtgacaagccgtatattctttgcgaatatacacacgctatgggcaattcctgtggtgcgatgcacaaatatacagatcttatggaagaggagcctcttttccaagggggatttatctgggactatatcgaccagtcgctgacaaagaaagaccgctatggcaatgaatttcaggcatacggcggtgactttggcgagcgcccgtgtgattacaatttcagtggcaacggcatctgctatggcaaggacagagatccatcgccaaagatgcaggaagtcaagtataactatcagccgatggcgatcgagatccatgaccggatcgcgaccatccacaacaaaaatctctttaccaacacgaatgtatatgatgcgatcgtgacgctggaaaaagaggggcagtttgtggatcagcaggtcatgaccattgatgtagagcccttgggaaagaagaagatcgaattggacgtttcggttccgacagacggcgaatatgtgttgaccttatcctttgtattgcgcgaggataccccttgggcaaagagaggacatgaggtggcatacggacaggaagtgctcgggcatatgccggaggcagtaccgtccgacagaccatatcaggtgacaagaggctggcataatgttggtgttaagggacaggattttgaagttttattctctatcttacacggaggacttgtttcctaccgttatggtggcgtagagttgttcaagtccattccaaagccaaacttctggcgtgccctgactgataatgatgtagcaaatctcctgccatttcgggcaggacagtggaagattgcaagtatgtattcttcctttaaatatgaacacggacgtgcagcaaccgactgcacgattgatgaggcagagaatcatgtgaccatcacctatacctaccatttgccggtcaaaccacagatggattgtcaggtggcatacagtgtctatggtgacggcgaggtcaaggttgcaatgactatggatccatccgctgaagttggcgagttgccggagtacagcatgctctttaccatggatgcagattatgacaatctgacatggtacggcttgggaccggaagagacctatgtcgacaagtgccatgcaaaattgggactttatagcaataaagtggctgacaatatggcaaaatatctggttccgcaggaatgtggcaacaaagtcggtgtccgctatgcaaaggtgacagacgaaaaaggcagaggacttttattccggggcgataagttacatttttcagccctgccgtactcgccgcatgagttggacaatgccctgcatgcgacagaacttccactggtacattacacctttatccgtgtcggcttggagcagatgggtattgcgggagacgatacctggggcgcattgacgcatccggaatatctgatcgacaacagcaaaaaattaacattgacattctctttccgaggcatatagaaaagagagttttcagcaaatgctctcacgaaggtgggagcatttgtcttttgggagaaggaggaatttatggacttggacaaggttttatacggaggagattacaatccggagcagtggttagaccgaccggatatcttggaagaagatatcgccatgatgcaggaggcgcatatcaatacggtaacgctgggagtgttctcctggtcgaccttagagccggaagaaggaaaatacaactttggctggctggataccatcatggatcgtctggatcaggctggcatatcggtcattttggcaacgccatccggtgccagaccacagtggatggcagagaaatacccagaggtgctccgtgtgaatgagaggcgtgagcgtgctcattacggctatcgccacaatcactgttatacctccccgatctatcgtcagaaagtgcgtgccatcaatatggaactggcaaagcgctatggcaaaagaaagcaggtcattctctggcatatttccaatgagtatggcggggagtgccattgcccactctgtcaggaggcttttcgtaactgggtaaaggacaaatataagactgtggaggcactcaatcaggcatggagtacgactttttggagtcacacttaccagtcttttgaccaggtggagagtccgtctccactgggcgagaccatgttacacggcttaaatctggactggaagcgctttgtcagcgaacagaccggagattttattgcggaggagatcaaggcgatccgtgatgcgggatcggatattcctactaccatcaatatgatgcatgatttttatgggctcaactatcaccaactggcaaaactgatcgatgtagtgtcctgggacacctatccgacctggcacaaagaacaggagatcctgaccgctacggacaatggattttggcatgatttcatgcgttctttgaagaatcagccatacctgatgatggaatcctgcccgtccagcaccaactggcagtcggtcagcaaactgaaaagaccgggcatgctggatgcgcaatccatgcaggcgatcgcgcatggatctgacagtgtgctttatttccagatccgccagagccggggagcatctgagaagttccatggtgctgtgatcgatcactatggcggcagggatacccgcgtctttaaagaagtgaccaaggtgggtgaggaattgggagccatccgcgaactggtcggatcgaccacccatgcggatgtggctgtgatctatgatattgagaaccgctgggcaatggaagatgcacagggacctagaaacaaggggctccactatgtagaagccgtgcaaaagtcctattatgctttccgcaaacttggcttaaatgtagatgtgatcaatatggatcatgcctttaagggatacaagatcttagcggcaccaatggcatatatgttccgcgagggctttgctgaaagagtccgtgattttgtggcacagggaggtatcttcattacgacttatcattccggcattgtggatgcgaccgaccgctgctatctgggagcaacaccggcaggacttacagatttgcttggactgcgccagaccgagatcgacggcttgtatgatggagagaccaatcaactggtgccggaggaccgcagtatttttgcaaaccagatctcatacgagagcaagtatctgtgccagttgatcgatgtgaccagcgcgcgtgtgctgatgacctatggcacggatttttaccagggacagccggctgtgactttccagccttatggcatgggctatggctactatattggggcggatgtggagcagtcatgctacgacgatctctacaagcgtatcgtggaactttcccgcgtgtgcaagccgtttaactacatcccggagggcgtggaagtgacaacgcgcagcaaggaaggatgcgattatgtgatcctgcagaacttttctgccatgaatcaacatgtggaacttggcgagggcgagttgcttttgggtagtcggagtggtaaaatatcaccttacgagactattatcttacggagggataaaaagtgatctaccaggatgtatatatagaaaaatctgtccatagaaaggcaccggcggttaccaagatctacaatgtgcttatgatcatgatcacgatctttatggcactcaattttgtttttgtagattacagggtgtttggtattcccttgatcgttatgatcatcgcctgctattttgtgacgcagaataccaagatagattttgactatacctataccaatggtattttggagatcaccaagatcaaacgtaagaccaagcgacaggagttgatctcctgcgagatgaaggacctggttgtggttgcccgttccaagacagagccggtacagccatacatcggacgaaatatgaagacttacgattgtctttcccatgacccggcggttacttattatacgatgatcatccgggatccggatatgggaaatgagatcaaggtcttgtttgagccgggagaggatctgctggaagcaatgcagcggatctcaccggacaaggtacatatataagcatatgaaataaaagcaaatggaaggagaaaaaggcatggacgcaaaggatttgcgagcaaaatttgtagagatctacggagacggtggagatatccgcgagtattttgcaccgggacgtgtaaatctgatcggagagcatacagactataatggaggtcacgtttttccatgtgcccttaccatcggtacttatggtgtagcaagaaagagagaggacgataagatccacttcttctcagcaaatctggaggattgcgaggttgtggaagtatctttgtcagaccttagttaccagaaaagttacagttgggcaaactatccgctgggcgttgtctgggcatttgacggcaagggcaagaagatgacacaaggctttgatatggcgatctggggcaatatcccaaacggatccggactttcttcttctgcatccttagaggtattgaccggaaccatcctgcgtgatctttatggatttgctgatctttctatgacagatctggctttgatcggtcagtattctgagaataatttcaatggttgtaactgcggtatcatggatcagtttgccgttgccatgggcaaaaaggattgtgcgatcttccttgatacgagcgacctttcctatgaatatgccaagatcgcattgccggatgccaagatcgtcattaccaacagcaaggtaaagcatagtctggtggacgggcagtacaataagcgccgtgaggaatgtgcagaagccttggcacagttgcagacggtcgttgacatccagagtctgggcgaattggataacgaaggctttgaaaaatacaaggaagttatcactgatgaagaatgtaaaaagcgtgcccgccatgcggttgcagagaaccagcgtaccattgaggcagttgctgctttaaaagataacgacgtagaaaagttcggcaaacttatgaatgcatcccatgtatctctgcgcgatgattacaaggtatcctgcgaggagatcgatatcttggtagatctggcatggtctatcgacggtgtggttggatcccgtatcaccggaggtggctttggtggctgtaccgtcagcattgtcaagaatgatgcagtagacgcctttatggaaaaagttggtgccggatacaaggaaaagactggtattgatgcagaattttatgtggtagacatcggcgacggtgccagaagaaccgtataaaaaattacatagaaactatagaaatcccggacaggttctttgccttgtccgggattttttaactatatgtttactgatcgctcttatgtatgagataggtggagatcatgagcgccattttacagatgacggcatcatcaaacttgcggatatccagcccggtcaattgctcgatcttgtccaggcggtagatcagggtattgcggtggagatagagatttctggcgcactctgcaatgctaagacccgagtccagaaaggtatggatggtgtgcagggtctcatcatcaatatccgtcaggtggagcccgtggaaatgatcgtgcagatattcttcacaggtctcgaccggcagttgatagaccagtttgccaagccccagatcctgcgcccagtggatgtgctccgtatcggagaaaatattgccgatctccatagcggaggagatattgagaaaaatacccggcaactggtctaaggatgtggcgatacggtcataggcaaaatgcagggagatcatggcttctgcctccagagtgccctgcatatcaaagagcatctggcgcagtgtctcctgggaggattcctgcggtaactggcggatgagcgctatatgacattcatcggtctggatcagagtatccgcaccggaggagaagaactgggcaaagatagactgctccatggatgagatcggttgtctggtctccatgaggaccgggaaaaagtagccgttcttttccagatgaaagcggtggatcccctcggcgatctcctgatcagataaaagccccagcaaaagtccgcgcaaaaagccctccttggatgtactgctgtgcccggcacggagcatattttttaaggtgatgagcaattcttcatcatcgatttggctatccgtaatggaaaaacggatgcctgtctgattttgtatctggtctaataattcctcaatctcttctgcgcttgtcatgatctctcctcgttcaaaatcctctgtatttttatagatattttaacgtttgtgcaagcacttcgtcaaccaagttaaagtgacgaacatcccttgtttattttggttagtttaacgatgacaggtgggaggggatttcctataataagttcatgagttggcgaatagtgcttataccaatcagaaaggagatttcgtatgacttcagttactgttaatatcaattctattgacaaggtaaagcgctttgtcagtgcaatcacatcttttgacaatgatttcgatctggtatgcgatcgttatgtgattgatgcaaagtctatcatgggtatcttcagtttggatctttccaagaacctgacactgaatatccagaaggatgacaatctggatgctgttttggcagccatcgatgagttcatcgtaaaataatgacagaagatttttagtattgaagagaggtttttattatggcaagcatttcattaaagaacatcaacaaagtatatccaaatggattccatgcggttaaggatttcaaccttgatatcgaggacaaggaatttatcattttcgtaggaccatctggatgtggtaagtctactacccttcgtatggtagcaggtcttgaggatatttccagcggtgatcttttgatcgacggcaagcgtatgaatgacgtagagccaaaggatcgtgatattgcaatggtattccagaactacgctttgtatccacatatgaccgtatatgacaacatggcattcggcctgaaacttcgtaaattaccaaaggctgagatcgatcaaaaggttcgtgaagcagccaagatcctggatctggaaggtctcttagaccgtaagccaaaggctctttccggtggacagcgtcagcgtgttgccatgggtcgtgcgatcgttcgtaatcctaaggtattccttatggatgagccactctccaacctggatgcaaaactgcgtgtgcagatgagaattgagatctctaaattacatgagaaattaggcgcaaccatcatctacgttacacatgatcagaccgaggctatgacacttggtaccagaatcgttgttatgaaggatggtgttgttcaacagatcgatacaccacacaacttatacaataagccacagaacttgttcgttgcaggatttatcggatctccacagatgaacttcatggatgctaagatcgctgtcaatggtgagactgttacagcacaggtgggagatgctaacatcacagttccggctggaaaggcaaaggctttgatcgaaggcggatatgacggcaagaccgtagttctcggtatccgtccggaggatatccatgattcccagatgttcattgaagcatcaccaaacagcgtgatcgaagcaaagatccgtgtatatgaattacttggtgcagaagttttcctgtatttcgattatgcaggcacacaggttacagcccgtgtagatccaagaacgacggcaaagcagggcgatcatatcaagtttgcgcttgatatggagcatgcacatttctttgataaggaaacagaattagtgattactaactaatctttttcttatatatcttcctatcttatatgatgataccctcggagcgatccgggggtattattattctacccacaaacataaaaagtgtgttatactataggacaaagcatcatgccataggtggctgatacagataagggagaatattatggagacaataaaatataccggcaaattgcagcgatactttcgggcaccgatctatatgatcatcttgtttgttgccggggatgtcctggtctacctgcaaaatatcaaggcgggggcattggtttcggtctgcatcatcatttatgcagccattgccctttggtactaccgtacctgtgctgcgaggctgaatgaggagattatccattttgcgacgcattatgggacggtgcaaaaggaactgctgaacaagtttcagattccttatgcacttatggattacacaggaaaggtcttgtgggtcaacgaagaattcgcgcgcgtgaccggcagggacaagcattacaacaagtccattacttctatctttaaggagatcacccgtgaggagatccagaaagcggtcaatgacaatttttccgtggaactggaatttggcgaccgcaagtatgcggcagatatgcagcgcctgcaattccatgaagaccaagatgcggatgccatggagatcatgacagaggcagacaatttcaattctctgatcgcacttctcctgtttgaccagacagaactggattactacaaagaagaaaacgaaaagcagaaattggtcgtcgctttagtgcatattgacaattatgaggaagtctttgattcgatcgaggaagtcaagcgctctttgctcacggcgatcattgatcgaaaggtcaataagtatttccagaatgtagatgctattgtccgtaaacttgaccgagataagtttatggtactcttccagcagcagtatctggcaaagttggaggaggacaaattctccattctggaggatatcaagtcgaccaaggcaggtaatgaactggagatcacactgagtatgggctttggtatcggtggcaattcctatgtgcagaatgcagagtttgcccgtgtagcgatcgatcttgccttaggacgtggcggatcgcaggcagtcatcaagaataatggcgatgtctcatactatggtgtgcgtggtaaggagatcgagcgaaatacccgtgtcaaggcgcgtgtcaaagcacaggctctgcgtgagatcatggagaccagagaccagatcatcattatggggcatccgatcgctgatgtcgattcctttggtgcggcagtcggtctgtattgcgcggcgcgtgaaatccgaaagaatgcaaggatcgtcttaaataccgtgacaagttccctgcgcccactggtcgagtctttctcagaggaagcaggctatccggcggatatgtttatcaattccgagcaggcagaggaaatggcagacgcacagacgcttgtgatcgtcgttgataccaatcgtccgagttatacggactgtccgcggcttttggagatcagcaagtccatcgttgtatttgaccaccatagacagggaagtgaacaggtcgtcaatccaatcctttcctatattgagccgtatgcatcttctgcatgtgaaatgatcgcggaggttttacagtatttttccgaaaaagtacatttgaaatcaaacgaggcagattgtatctatgccggtattttgatcgataccaacaactttatgacaaagacaggtgtgcgtacctttgaggctgcggcatatctgcgtcgctgcggtgccgaggttacccgtgtgcgaaaacttttgcgtgaggatatggcagcctataaggcgagagccgagatcatccgccatgccgaggtttaccgggggctctttgcgatctccatctgtgaatcgcaggagttggaaagccctaccgttgtaggagccaaggcagccaacgaacttttgaatatcgtaggcatcaaggcatcttttgtactgacggagttccagcacaagatctatgtgagttcccgttcgatcgatgagattgacgtgcagcagatcatggagcgtctgggcggcggcggtcatctgaatgtcgcaggtgcacagatcgaaaatgccagcgtggaagaagtcaaacgcagaatcgaagatattctggatattatgatagatgaaggagagatcaaactatgaaagtgattttattacaggatgttaagtctcttggaaaaaagggagagatcgtcaatgtaagtgagggctatgcccgcaatatgcttttgccgaaaaagttaggcgtagaagcaaacaataaaaatttgaatgatctgaaattacagaaccagcatgccgacaaagtagcacaggaaaatctggaagcggcacaggcaatggcaaagaagatcgaggactggctggttgagaccaagatcaagacaggcgaaggcggaagaacttttggctccgtttcttccaaggagatctgcgcggcagtcaagagccagtacaatgagacgatcgacaagaaaaaggtgcatttggaagaaccgatccgtgcgcagggcacctatgaggtcaaagtaaaattgcatccacaggtaacagcagtgatgcgcgtacacgtatcaggagagtagcatggaagaagcactgatcaaaagaacaatgcctaatagtctggagtccgaacagtcagttgtcggttccatgattatggatcgtgatgcgatcctgacggcatctgaaattttgacaaaggatgatttctatcatcagcagtatggcgtcttgtttgaagccattgtagaactttataatagcggacagccggtggatctggtcaccctgcagaataagttgcgggaaaaggatgtgccgccggaagtggcaagcctggaatatatcagtgatctggtcgcagccgtgccggtgacggtcaatgtggcatcctatgcccagatcgtcaaggacaaagctctgctccgtcagatcatcaaggtcaatcaggagattgaaaacgattgctataacggcaaggagagcgtgacggagatcttggaaaagacagagcacgatatttttgccttagtacaaaatcatggaaattccgagtatgtcccgatccggcaggtcgttatgaatgccatccacaagatcgagcaggcatccaagcagaagggaacggttaccggtatcccgaccggatttatcgatctggattatcagaccgccggattgcagccgtccgatctgatcttgatcgcagcgcgtccttctatgggtaagacggcgtttgttttgaacctggcacagtatgttgcctttcacgaggatctgtgtactgccatattttcactggaaatgtcaaaggaacagttggtaaaccgtctgttctctttggaatcccgcgtggatgcacagaaactgcgtaccggtaatctgcaggagtctgagtgggaaaaattgatcgagggtgccggtatcatcggtaattcccatttgatcattgatgatacgcctggtatcagcatttcggaactccgcagtaagtgccgtaaatacaagatggatcaggatctgcgtctgatcatcattgattacctgcagttgatgagcggttccggtcgttcggaatccagacagcaggagatttctgagatttcaagatccttaaaggcgcttgccagagaactgaatgtgccggtcattgccctgtcgcagttatcccgtgcggtggaacagcgtccggatcacagacctatgctttcggatctgcgtgaatccggagctatcgagcaggatgccgatgtggtaatgttcatttatcgtgatgattattataataaggataccgaactcaaaaacatttcagagatcattgtagccaagcaaagaaacggcccgatcggtacgatcaatctggcatggttgccggaatacacgaagtttggcaatttagatcatacccagcagtaagatgtcgaaatcttacgattagatttgcttgtccgcctttctgtaagcgtttatactggaattatacatagaagagagcagtatacatacaggaaggactggttttttggaaaaggcacgttatatgatctcggatgcggcgcgcatggtggcattggaacaacatgtgctgcgctactgggaagatgaactgcagttggatatcccgcgcaatgagatggggcatcgttactatacagatgagaacatcaaggaaattcttcgtatcaaagacctgcgggaaaagggctatcaactcaaagccattcgcatgtatctgaaaaaggaaaagcgcaacgaggaaaaggagcaggaagccagaaagaaccacgtggatattgatggatttgtcaccttgacctcttctaaagacctggggctgggagaagatatggatgctgagcctgtcgcagatgcggcatcggatccgatacatccggtcagccggcgagatgacagtcaggtgtctgcagaagcgcagcaacaggcacgcatcaagatcgagcagtttcaaaaactgatgacagagatcgtggcaaatgccatgcgtgagaataatgacgcgctgacgacccatgtggaagagcgcattttaaaagaaatgaattatctgatgcaggagcattatcagttggaagaagatcattataagaaattggacgaagccatccgcagcagcctaaagcgcaagcggagccgtggagttaaatggctgctgccgacaaagaaatcagaaaaatagagaaaataaaagggcggcgtcatgaaagatcatagcgtcgcctctttgtgcttactgattagccctgtgcttctaagaagttgttgatctcgtctaccaacatatcagggtcaataccgtgtaccatagcagcctgctcgatagtctccatctgagatgatgggcatcccaaacagtgcatgccgatatttaataaaattggtgctacattctcatcgatctgtaacaattcaccaatcatagttgacttatttactctagccatgatccttatcctccttatttttgatggtgttattataatgcctttttttgccttttgcaattcctaatcttgtttttaaataagaacttgtctttttaaaataattgatttattatgtggttacagcagagagctgaataaacaacaaggtgattggaggaatttataatggcatacgtaatttctgattcatgtgtaagttgtggaacatgcgaacctgaatgtccagtaggtgctatctctcagggagacagccagttcgaaatcgatggatctgcttgtgttgaatgtggcacatgcgcaggtgtttgtcctacaggtgctatctctcaggagtaatccttagatagttacataacacagacaaagcaaaaggcgtccgcgtaagcgggcgtcttttttgggttctatgaagcagtctacgcaacgtagataaaaagaaaaggtggtgaatcaaagatccatcaccttttgcatttacagtttcgctaacataccaagagcatcgtccgggatgatcaaggtgtagtgttctttgaagtaagcatcctgtccgacagaaaaatctgcctgtgaaccatactcggtcaggatattgcaggccttgttgaaatcttccggtgtgtgatcgctcttgctgatgatcagatagaaaacatcatccgaaggactcttgtataaggagttgcgtccatggtaaaaatcaccaaggacatgtgacaggcggatcatatcatcaagggatgagaatacaaacaacttggtgatgtcgaccggtacggagatctggctggcatccggcagactggcatctgcggacttgccgatacgggctgcggcttcttttgccttggaaaagagggacaaaatatcgtctgccgcggttggcggatgtggcatggcgtcatcataagaatccatatcaaaatcatccgaatccatatcctctgaaaaatgagagaaccgggtatccagttcctcagggtattccaccttggtcactatcaataaaatggagtcagcggtaagtggaacggcctcgatcatcagaggaatgtcctccgcatcaaagccgaattcgtaagaggctttctccatcatctcgcgaaaaagagatttggctttctctgtgccataagcgagttcacttaattttaagtgcctgctatcgagatcttctctggtaagggtgcagcgaatctggttatcgtttactttttcaattttcataagatcacatcctttacagaaaattaggtaaacttata

SEQ ID NO: 12466 - DNA, 25724 bp, Unknown
  gut microbiota DNA sequence
aaaatgtctaaaaatgttaaaaaagtataaacaatgtagaaatgtcttgcgtttcaaaaaggaatttgctataaaatatgcaagagatgcttttccggttctagggaggagcatatgaatgtcatattttctatctgatcgctacgagacgcaggacgttttgtatgagacgtcgcatacgcgggtagtgcttgtcagagcattagataccggtgatttacatgttatcaagggtattagaaaggacccgactacaccggaacatttttttcttgaagcaagtctgctacaggatctgagtcatcctggaattcccattctacttgaaacagaagaagatgaatcatatttctatatcgtagaagaatatatttatggagattccttagatcagtatttgctttatcatcaaaacatttcccaggatacatttttacaatttgccatgcagttatgtgagatcataagatatctgcatacgcatgatccatatcctattttacatttggatctgaagccggatcatattatagtatgtggcaatcagttgaaattaatcgactttggcaatgcaaagattcttaccagttcgggaaatgatttccaaaattttggaacaaaaaaatatgctgcaccggagcaaaagcatggtggtgcggtggatcaaagaaccgatatatacggtctgggcaaaatcttttcttatatgcttttatttttgccaatgcaaaaacgtttgcggttccttggacttgtcacccggatgcttcgttatgacaaaggcaggcgcatcacagacataagtcgcgtgcaggatcatttgcaaagggtgtggcagaaaaacaaaaaagaaaagaagaacaaaaagcatctcttaaatcgtatcgctgttgtaggaagtgagagtggtgtgggggcgacacacgtggctgtggcactggtctgttatttgaaccgggcggggttttacgcgtattataggaatgaaacagaagcgccgacactcgaacgcatgctgcaatacaatatggcttgtataggacaggatggaatgatatatcacgaatttttccggggctatctggatgatggaccggcactcgccaagggcgaacctccctatgggatacaggtcatagactgtggatgcaggacagacgtcacggcaggtgcgactatctatgtctgtagtggcagagtctggcagagacaagaaaaggtattggcggaaaatatgatcctcgtgggaaatcatttctcacggcaggaagccgggcagtatgcaagggtgcaaaagaaacgtatgtatttgtttccatggcagaaaaatccgtttcatacgacactggcggtacaaagacttttttcaaaaatgatagagagggagttgttatgtgaaaaaaagaagcaggcagatgcctaaaaaagtaatggggttctttggcacaagggagggagcgggctgtacgcatatggcgctgagcgtagcaaattatctgcactcagtggaaaagtgggaggtaatgtacttggaattgggggatttcagtcatttatatcccatgttttcggaccgagtcgtagagaaaagcggcgatatcctctatgcctatcaaggggtattctatctgatctgtcccaaggagaaagaggctttacgcctattggatgctttcgacgggatgatggtcattgactttggcagattcgcaaaggaaaatccacttttggaaagcagatgtcagcgcagagttcttatgggcggcttacagccatgggaacgcgaggcttatgcgacatgtattgaaaaaaataaaaagaaaagcgacatggcgcaaatggaatactatagcaggcatgtaaatagaaagtcgcaggtctcatttgcaaaagaaaacggcgtgtgggtcagacccatgccggacatagcagatcctttttcgttggaggaaaaagatatttactatttgaaacagtggttacagaagtgatcacacaagaaggaggaggtaaagcaccgaacgaataagcaaatgacaaaatgttgttatccttatgtttgaaaggaaacaagaatgctaatacagtaaacacgaaaaaagatgagggcgtatctgataaagaggtgcgccctatttgttatgtggcttttcttggcagatgacatagcacgacaagatgtgctataatgaatgcaaatttgcacacaaatgaccattggagggtagaatggacaaaagagatagaagaaaagtgggcggcggcagccggaagcatgagcgaaagaaccagcagataccgaatcatatttatctgctcgcaatcgcctttctacttttggtcgtcgtggggatgatctttgttatccgcagatacacgccgaccaaggagcatatgagtttgagcgattactttactttgaccgaggaaaatcaggcagccgttatcttaaatggcgaatataaagaagtctcggacagcgatgatgcgatctatgccattgcgacagaccagggcgtttatctggagatcagtttcttaaaatccaatctggatgacggttatgtttacgatacgacggagggagtcctgcgttatgtgacagatcaggatgtggtctctgcttccttaaacagtgatgcctacacggtaggaaagtccagagaatctctgggcaaagacgttgttgtttcacaaaatggcgcttactttgtgtcagcggattttgtcaaattatataccgatatgtcctttgaactttttgacagtccaaaccgcgtcgtgatcgagacggcaggctatgagaaaaaggttgcaagcctcaaacgtgatgcggcactgcgccgtttcggcggagtcaagagcaagatcttaaaggatgcgaaaaagggcgatcagttgacgatcttggaaaactatggcaaatggagccatgtgctgacagaggatggtgttctggcttgtgtccagaacaggcgcttatccaagtcggaaaagcagacggtagaggcgacgctgccggagcgtacttacaatcatatcaccgtcaaggatccgatcgttatgggctggcatcaggtgacatcccagtctgccaacagcggcgtgtcacaggtggtggcgggcacaggcctcaatgtcatttcaccgacctggttctcgctcagcgacaatctgggcaatatcaagagtcttgccagcagcgattatgtgacttattgccaccagaacaacattcaggtatggggcttagtcagcaatctggaaaataaaaatgtcgacacgacaacggtactgaatacgacttcctaccgggatagtctggtcaacaacctgatcacacaggcgatttcctatgatctggacggtatcaatgtcgatatggaggcgctcagtgtttctgccaaggatggctatattgagtttatcaaggaattgtccatcaagtgcgaaaagaatgacattatcttatcggtagacaactacgtgccttccgcatccactgctttttataatagaagcgtgcaggcagactatgcagattatattgcggtcatggcatatgatgagcattatgtcggtggtgatgaggcgggatccgtcgcatccatcggttttgtggaaaaaggtgtagcggatactctggaagaagtaccggcagatcagatcatcttaggcatgcctttctatgccagagtgtgggcgcagtccgatagcggtctgaccagttcggcatacggtatggaagatatgcagtctttcctcaatcgcaatcaggcaacgagcacctggtcagaggaagcaggtcagtattatgccgaatttacggaaggtgacacgacctatatggcatggatcgaggatgcgacttcactttccaagaagttagacgtcatgaaagaaaataaactggcaggtgcatccttctggaaacttggcttcgagacaaaggatacctggcagaccataaagacttactttaaataaagccaaacagactgtcattacatatttctatttttgacaccatatattataaaaaacacgtggtgatcttatgaaacgagaaatagaaatggtgatggcagtcttttttattgcgatcagtctcttagcaagtgtctggggcgtgtcggtcgtttctgcaaaaaagacggcaagccacctgaaagtagtgatcgacccggggcatggcggcagtgatccgggtaaagtggcggtggacggatctctggaaaaaaacatcaatctggcaatcgcacagaaactgggggcatatctggaaaagcagggcgtggaggtctattatacaagggagagtgactgcgaactctgcaccgagtccggtggcagcaaaaaggcaaaagatttacaaaagcgctgtcagatcgtagaaaatgtagacccggatgtgaccatcagcatccaccagaattcttatagcgatgccgggatctccggcgcgcaggtcttttattacagtacctcagaaaagagcaggctcttggcggagcagttacaggagaaactgatatccatggtcgatccgaccaaccacagggcagccaaggcaaacgattcctattatatgctgcgtaagaccgtcagtccgaccgtgatcgtggaatgtggttttttaagcaatgagaaggagtgtaagaaactacaggaagaaaagtatcaggacaagatcgtggaggcgatctatcagggaattgtgacatttgcacagatgcaggagagcaactagcgtttttagttgtgtaatttacgaaaagtgttataatgaggactatgaaaacgaaagtatttgtggctagagacaatcagatagaagaagcggaactcaaggaagcctctgcggtcattcgtagcggcggcttagtcgcctttcctacggaaacggtgtatggattgggcggtgatgcgacaaatccggaggcttcccgcaagatatatgcagcaaagggtcgtccgtcggataaccctttgattgttcatatagcagatttttcacagttggaagatatcgtggcagaggtgccacaggaggcgagagacttagcggaggctttttggccgggaccgcttaccatgatcctgcgcaagaatgaggtcattccttatgagacgacaggaggtctggatacggttgccatccgtatgccgtcccatccggtcgctcgcaggtttttacaggacagcggttgtatgatcgcagcgccgagcgctaacacatccggtcgcccgagcccgacaacggcacagcatgtgtgggaggacttacagggcaagatcgaagtccttttggatggtggaccggtcggtatcggcattgagtctaccatcgtggatctttccgaggaccagcccatgatcttacgaccgggctttattactcaggagatgttatctcaggtcttggggcaggtcggtatggatccgggcattgcatcggaaaacagcaagaagccgccaaaggcaccgggcatgcgttaccgccattatgcaccaaaggcagaccttaccttggtcgagggacatatggatcaggtgatcgcaaagatcaacgcactgaccggggaggcacaggtcaagggacagtccgttggcgtattggcaacagcggaaaatcaggatgcttatatagcggatcatgtgatcgtgatcggacagcgggaggatgaagcggagatcgcaagacacctctttgatgtcttacgtcagtttgatacgcttggtgtagatgttatatattcagagagttttgcggctgccggagtgggacaggcgatcatgaaccgattgctgaaagcggcagggcataaacggatttttgtataagggaactttttgggagaagaagtaactatggaagaaataaaacgtgtgatctttgccgcgggcagtggaacatcccgcgcacccatggcggcagcgatcatgaagcagatgacggagggaaaagatatcgatgtcttagcaagaggagttgtcgttttattcccggaaccgatgaatcaaaagacggaggcagtgctgatcagcaatggcattgcaccggataattttgcggcagagcagttgacggcagcggatatcgtgccgggcacactgattctgaccatggatgaggcacagcgcgtcaaggtgatcgaggagatcgagggggcagatgaggataatacctttgtcttatcgacctatgtgggagatgagatcgaggtcgtcgatccttatggggcatccttacagacctatggcttatgctttgaagtgctgaaaaagtccatcgaaaagttattggcaaagttagagacagctgataaagggggagcatcatgagtgacaaaagacaggattatatcagttgggacgaatattttatgggcgtagccatgttatcggctatgcggtccaaggatccgcacacgcaggtgggagcctgcattgtcagcgacgatcataagatcctatctatggggtacaatggatttcctatgggatgttcggatgacgattttccttggtgtcgtgagggagagccttacgataacaagtatttttatacgacacacagtgaactaaatgccattctaaactatcgtgggggcagtttggaaggggctactttatatgtttcactgtttccttgtaatgagtgtgccaaagccatcatacagtccggcatccgccgtattgtctatgatcaggacaaatatgagcacacgcctgccgtcatggcatccaagcgtatgctgcgtgccgcaggggtagagttctataagtatgaacatacaggacgcgagatcacgatctcgttatagtttttaggagaagatttgagaaaaaaagaaagcaatgaggtggcaaatgctctggttctgatcgtccagatcggcgtgactatgttagtacctattttgttgtgtgcgatcggtggcgcatggctggatcataagttgggaaccagatggattagtgtattggggtttattctaggggcgatagctggttttcagaatgtctatcgtctggtcaagaaatatctaaaagacacaaaatccccgggtcaattgcaaagagaaaaagaagaacaggaaaaggcatcacatgatcaaagcattaaagagactgaatgaggctctgccgggactgctccttggcattgccatatatggactgatcgtagaatttgccggtgtgtggtttgtttccgacaagttgcgctatacatcgggcttgtggatcggcatcgcctgcgctatgggcatgggaatccatctggccatggtgatcgaggaagcggtgcgcatgggagatactggaaccaagcgcttatcctttaagtctgttctgcgctatctggttgtggtatttgtattttttatcatgatgtattttcacctgggtaatctggtgagtgcatttataggagttttggggctaaaggtgagtgcatatgtacaaccttttatgcataaaatgatttttagggacattgcgccggaagaatcaacgaatgaacaggaagaggaggtgaaattgtgaatgaagcaattctaatgtcggcttctgctgataacattgactttatgatacatggcttgttctcatttcagttatttggacaagaagtatggatcaccacatcccatgtatgtattgccattgttatgcttgtgcttgtgatcttttctattgtagccaatcgaaaaatagcacatgctacagaagtgcctgatacctttcagaacgttctggaactgatggtagaaaaattgtccggtatcgtggaaaacaacatgggttcccacgcaccaaagtttacgaattatatctgtacgatcttcgtatttatattgttcagtaacatatccggactgtttggactcagaccgccaaccgcggactatggaaccacatttgcccttggtatcattacgtttgcactgattcacatcacaaaatggagacaccagtccttcaagaggatctgggttgacatgtgttctccattaccgccgtggtttccactatggctgccgatcaacttgatcagcgagatcgcagtgccgatttccttatcactgcgtttgtttgcgaatgtattgtcaggaaccgtaatgatggccctggtttacggtctgttggcgaagattgcatatgtctggcctgctgtattacatgtctattttgacctgttttccggagccattcagacatacgttttctgtatgcttaccatgacatacatcacacagtcctatggggacgaagaataatttatatttcatattaggaggaaagaattatgaatatcacaggagaagatttgattttagcatgttccgcaattggtgcaggtctggcagttatcgccggtatcggacctggtattggacagggtattgcagcaggttacggtgcagcagccgtgggtagaaacccgggcgcacagggaaagatcatgtcaaccatgttacttggacaggcagttgccgagacaacaggtctgtatggacttcttgttgccatgctcttacttttcgtaaaaccattagtaggctaatgcgtgtagtttggaatttcccgggaaaggaggaactacaggaaagttatgacaagattatttgacttagattttcagttgctgtttgactctgtttcactcggcatttctgtcttctttctattcctgatcatgtcgtattttctgttcaatccggtaagaaaactcttgcaggatcgacaggaaaagatccgtcaggatattgccagtgcggcgcaggataaagaagactccgccaaagtcaaagcagagtacgaaaagcgtttaaaagatgttgataaagaggctgagacaattctttcagaagccagacaaaaggcgcttaagaacgaagccaagatcatagcggatgccaaagaggaagcggcacgtattattgcaagagccggagaagaagcggctctggagaagaagcgtgcagcggatgagatgaagcaggagatgatctccatcgcttctgtcatggctggcaaggtcgtggctgccaatatagacaccacgattcagaatgaattggtggaagaaacgctaaaggaaatgggtgatgctacatggcaaagttagtttcaaatgtgtatggtgaagcattgtttgaactggcaatggagcaggaccgtctggatgcctatctggaggagagccagggagttcttgatgtccttagggacaatcaggaatttagtcagatgatgactcatcccaacatcataaaagaagaaaaattgcagatggtagagactgtttttaagggcaggatttccgatgagatggtcgggctgatgcggatgatcgtggagaaggatcattttgcaaagatgccggaggtattgaccttctttatcgacaaggcattggaagaaaagaaaatcgggatcgcctatgtaacgacaccgatggaagttaccgatgcccagaaaaagcagatcgaggaccgtttgctagagaccactgcataccagtcatttcgtatgcattatgcggtggatgccgacctgatcggcgggatggtaatccgtattggggatcgcgttgtggacagcagtgtgcgcaccaagatctcagaactatcgagagaattatccaaaatacagttgaaagtaggtgaaagcgcttcatgaatttaaaaccagaagaaatcagctctgtgatcaaagagcaaatgaaaagatatgcagcgcagcttcaagtggcagacgtcggcaccgttatacaggtggcagacggtattgcacgtatacatggattggaaaatgccatgcagggagaacttttagagttccctggagaagtgtatggtatggtactcaacctcgaggaagacaatgtcggtgcggttctgcttggcaataaccgcaatatcaatgagggagataccgtaaagacaacaggacgtgtagtagaagtgccggttggagatgcaatgttaggacgtgtcgtcaatgcgctgggacagccgatcgatggcaagggaccgatcgagacagacaagttccgacagatcgaacgtgtggcatccggcgttatttccagaaagtccgttgataccccgttacagacaggtatcaaggcgatcgattccatgatcccgatcggacgtggacagagagagttgatcattggtgaccgtcagacaggtaagaccgccatcgcgatcgatacgatcatcaaccaaaagggacagaacgtcaaatgtatttatgtagccatcgggcaaaaggcatctaccgttgctacgatcgtaaatactctggaagaattcggtgctatgtcttataccacggtagttgcatctaccgccagtgagttggcaccgctacagtatattgctccgtacgcaggatgtgcgatcggagaagaatggatggaaaacggagaggatgtgcttgttgtttatgatgatttgagcaagcatgcaacggcataccgtaccctttctttgctgctccgtcgtccaccaggacgtgaggcttatccgggagacgtattctatctgcattccagacttttggagcgtgcagcacgtttgaatgattctcttggcggcggatcactgacagccctgccgatcattgagacgcaggcgggcgatgtatctgcttatattccgaccaatgttatctcgatcacagatggtcagatctatctggagaccgaagccttcaacgcaggtttcagaccggcgatcaatgccggactttccgtatcccgtgttggtggttccgcacagatcaaggcgatgaaaaagatcgcagccccgatccgtgtggagttggcacagtacagagaactggcgtcttttgcacagtttggttcggaactcgatgcagacacgacagagaagctggcacagggtgagcgtatccaggaaatgttaaagcagccgcaatacaagccgatgccggtagaatatcagatcatgatcatatatgcggcaaccaagaaatatcttttggatattccggtcgaagatgtactgccgtttgaggcagccctctttgcgtatgtggataccaaatatccggagataccggaatccatccgcaccgaaaaagtgctgacagaggataccgaaaaggcgcttattcaggcgattgaggaatgtaagaaaagctataaatagcaaaggcggtgagatgaaatggcctcaatgagggacattaaaagaagaaaaacaagtatttcaagtacgcaacagatcacaaaagccatgaaacttgtatctaccgtaaaactccaaaaagccaagaataaggcagaagaaacgacaccttacttccggtatatgtatcagacagtgtgttccatgctggcaaaggcagggaatatcgatcatccctatttgcgggagagcgcgtcggatcaaaagggaatcattgtgatcacatccaaccgtggtcttgcaggcggctacaattccaatatcatccgtctgatcacgggcagtgacatcccgctggagagcgcaaagatctacacagtggggcgcaaggggcaggaggctctggcgcgcaaaggctatcacatggagtccgactattcggatgtcatggaggctcctacttatgaggatgcgcaggcgatcagtaaggaagtcttaagtgcctatgcaaaaggcgagatcggtgagatctacttagcatatacacatttcaagaatacagtcagccatgagccgaccctgcttcgtttgttaccggtacaggtaaaggaagaagatcttgcagcaaatgacgcggaccttctcatgaattttgaaccaaatgaagaagaggctctggatatgatcattccaaagtacattaccagtctgatctacggcgcgctggttgaggcggtagccagtgagaacggtgcgcgtatgcaggcgatggactcagcgaccagcaatgctgaggatatgatcaacgacttatcactgaaatataaccgtgcaagacagggttccatcacacaggaactgacagagatcattgccggtgcggaagccatttcctaatctttaccaagggagaaggcaaaaacaaagttttgatgaattaggagtgacaaatatggcgaaagaaaatataggaaagatcactcagatcattggtgcggtacttgatatcaagttctccgaaggcgaactgccggagatcaatgatgctatcaatatcccaacaaaagatggcgggaaattggtagtcgaagtagcccagcatctgggagacgatactgtgcgttgtattgccatgggaacgaccgacggattggtacgtggaatggaggcacacgctacgggggcaccgatcagtgttccggttggcgagcagaccttaggacgtatctttaacgtattgggcgagcctatcgacgagattgatgcaccgcaggacgtggaatatatgccgatccacagaaaggcacctgcttttgaggagcaggcaacttccacagaaatgttggagaccggtatcaaggtcgtagatctgctctgtccttatcaaaagggtggaaagatcggactctttggtggtgccggtgtaggaaagacggtacttatccaggagttgattcataatatcgctaccgagcacggtggatattctgtatttaccggtgtaggagagcgtaccagagagggaaatgacctctactatgaaatgaaagaatccggggttatcgacaagacttgcatggtctttggacagatgaatgagccacccggagcaagaatgcgtgtcggtctgaccggtcttaccatggcagaatatttccgtgataagggtggcaaggatgtattgctctttattgacaatatcttccgtttcacccaggctggttctgaggtgtccgcccttttgggacgtatgccgtcagccgtaggttaccagccgaccctgcagacagaaatgggcgctttacaggagcgtattacatcaaccaagagcggatccatcacatctgtgcaggcagtatatgtgccggcggatgacttgacagacccggctccggcaaccacgtttgcccatctggatgccaccacggtattggagagatccattgccgaacttggtatttatccggcagtagacccattggcatctacttcccgtattctggatcctcgtatcgtaggacaggagcattttgaggtagcgcgtggcgtgcaggagatcttacagaagtacaaggaattacaggatatcatcgcgatccttggtatggatgaattgtcagaagatgacaagttggttgtcagccgtgccagaaagatccagagattcctgtcacagccattcttcgtagcgggacagtttaccggattggaaggaaaatacgtgccgattgcagaaaccatccgcggatttagagagatcctggaaggcaagcatgatgatgtgccggaaggacatttcctgaatgcaggaaccattgatgaagtacgcgcccggatgcagtaagggaggcgactatggcagataatttgtttcaagtcgagatcataacgcctgaccgtattttttataaggggcaggcaagcatgatcgagtttacaacgaccgaaggagaaatcggtgtttttaaggatcacattccgctgacgacagttctggcaccggggatcgtgacgatcacggaggcagacggcgcaaagaaggccgtggtgcatgccggatttgcggagatcttgggggagaaggtaacacttcttgccgaggtggctgaatggccggaagagattgatctggaacgtgcgagaaaggcggaagaccgggcaagggaacgtctgaatcgcaaggatgctgatctggatgtcgcgcgggcagaactggcattaaagcgggcgctggcgcgccaggatattttggcataagaattgacccaccatggagtcgcgatctcatgcggctttctattggtgggtttatttttgacaagaattacgctatactaatacactgaatgtagacttttgttgcgtagaagaaaagtcacatagaaaatctggtggatatataagaaaagataggaagataatgaaagaaattacaataaaactgaaagggagagattcctggatctccgtgatcctgggaatctatggtgccctaggtgcctttatttctctttcgcgggaagcaaccatagacaacagcccggatattgatctggagagtcagatcatgttatatacgcggaccatgtaccggtctttttcgtccaatcgtctgcggacttttttatttgcacttgtgatcggcatactggtctatatggtcctgcaattcagccgaacttataaagaacgtctggcagatctcttattcagtcttctgtttgcgtcagggcagttggttgccatgatctttaaaaagtggggcggctggtacgccatgatggatgccatggaggagagcggtgtggcagagatccagatgtaccgcattttcttgaagtggtctgcctatgttctgatttcctattttatcgtggctgccatgatgcatttcttccgaaattttgcggagcaacaggagatcagaggacaagcgggacgaaaggtcccaccggtattgcagattcttttgatggcagtctgtatgtttgtggcgtggcttccgtattttatttatttctacccgggaaccagcaacgaagatacggtcattatgatcatggagtataacgagatcccgtcttatatccagaccatgtcagcggtgcaggcggatgatatcttcatcacaaatcatcatccttatatcctgacgctggtgttttcttggtttattaaattaggattgcattttggagacatctgtattggcgtggcagcctatgttatcttgcagatgattgctctgtcactggtatttgccggatgtctgtattatatccgcacttgtggcgtgacgacaaagcgcatgatcggagccctgctgatactgatgttcttaccgatctttcctatgtatgccatctgtatgctaaaggatacggtctatgccaccttttgtctgatttttattatgatgatgcactatgtggcaaggacaaagggacaggctttccgcaaggtatggtttgatctggcaatgtttgccgtagcctgtatgatggttttgaccaaggtatatgcaatgtacattttgctgatcgttggcgtggtatatatggtcaaatatcgacggacttttgcccggatcatcgcgtcggttatcctgccggttatcttatataaggtggtattctgcggcatcctgcttccggcactgaatgtagcaccgggaggcatccaggaggcgctgtccgtgccgtttcagcagacggcgcgctatgtcacggaatacggcgaccaggtgacagcggcagaaaagaaagccatcaataaggtgctcccttacaaaaaactggcaaagaagtacaacccggaactgtcggatccggtcaagaaatattacaatcaggaagcgacaaagcaggatcttaagaattattttaaggtctggtggcagatgttcctaaagcacccggaagtctatgtggagtccgtgttgcataatacctatcagtattatgacatcaataagatttccagcctggtgtattataagtttaatgattatctgcaattgcacgataaagaagggcaatatacctatctttatgtggagaacacagaggagtatctggaacagcgctacgcgatcaaccaattggttcttttttcggaaaaagtgccaatcgtgaatatctttgcctcgatcggattgtggccgtggctgtttttgtttgccctgctctacaatctgaaatggaagaaaaaagaagcgcaggcgctgcttctggtgccactgattacgatcgcagtctgtatggtgtcgccggacaatggaaatacacgttatgtgatgccgcttttatatacactgccgtttttgatccctttggaacttctgccggcaaaggcagatgataaaaagggcatggaaacagcggaaatagcagaagatcaggcatagcctgggaggaaaatacaatggatatggagagacgacttgaggtggaaagcctcacgagagaattacaggtcttagaacgggaagaacaagagttaagagaaaagatcgacatgatcgcgatcaagaagggcgatctgctcaaaaggattgcagattattcggatgaaaaatacgagcaggatgcactgacacgcttgtatgagcagagaaggggcaagtaatggaacaaaagacagagagaaaacttgtctggactaatacagccgtagtatgtctggtcgcccttttgtgttgctttttgtggggcagtgcttttccgggcatcaagatcggttatgggatttttgacatttcgggggagcagaccggattacagatcatttttgccggaactagatttttcctggcaggaatcatggcggtggtgatcggaagtttttcccataaacgtccgcttttcccaaagaaaacgtcctggttgccgatcctgcatctgagccttttacagacgactctgcaatattttttcttttatatcggcctgggaaagaccagtggcgtcaaggcatccattatcgaggctttgaatgtctttgtggcattgtttgtggcatgccttctttttaaacaggaaaaattaaaacaaaataaaattattggatctatccttggatttgcaggagtctttcttgtagagatctggggaagccgggggacgggaagcagtctgggtggtattggcataggagagatctgtgtctttatctccacggtcgcttatgctttttcttcggtctatctgcggaagtattccgaacaggaagaaccttttgtattaagcggatatcaatttatcgtgggcgggatcacattgatccttctgggatttttgatgtgcatcttcctgccggcgagtctgggatccggctatgcggctatgacgacaggacaggtgttgggagccgttgcaagccatatggcgggcgggtttttcagcctcaaaggatgcggtatcgtgctctacctggcaatggtatcggcggtggcatattcgctctggggtgtcctcttaaagtacaacccggtatcaaaagtggcggtatttggctttaccacgccgatctttggcgtgctcttatccgcgattttattgcaggaggcggacaccttgcgcataggcgttttggtgatctctttgatcctggtatccataggaacacttatggcgcagaaaaactgatttctgcgccatttttatctgtttatccatataagattctagtatctgcggatctggtcatcctcatccccgacattgcggtcgatctttttgatgacaacatcataggaaaaggacggatccacctgtacggtcgcggtctcgccaacctttttaccacggatggctttgcccagaggtgattcaatgcttaccatatcacgcagggaagaactgcggatggaggtgaccagtttgtaagtctcctcgcagtcttcatccgggatgtagagggtcacgatcgtattgatacccacctcatcctcggaagtatggtcctcaatgatggtcgcattctttaacatgcgctccagataacggatgcggctttcgttctggttcttgtccttttttgcggcataatattcaaaattctcgctgaggtcgccctgtgcccgcgcttcctttacggcttcaatggctgcctttctgacaaccagtttgcggtggtcgatctctttttgtatcttttctacatctgacggtgttaaacgttctcccatagttatactccttattctgcctgaatttaaaatgtgagacgcggtctttctttcaagtctgaccgcatatattagtatagcacagggcgtcaaagagagaaagtcagacggcatcagaaaaagatatagcaaaaatcgggcattgatggtaaaatatagcagtatatgtgtaaaaactgtctttggacagtaggaatcaaggaaggaaatcggcattatgggaattagccttgtgttgttggcatataaggaagaagataatttacgtgttcttttgccacagatcattgaagaagtagaaaagtgtaatgaggaatatgagatccttgttgtagatacagccaagcctttggataacaccaagggtgtttgtcaggaatatggcgcaagatacatcaatcaggaagaaccgggattcggaggggctttccgtactgcgatcaagtatgcgaacaagagcaagtttttgatcatggacagtgatggctcccatccgccaaagagcattccggcaatccacaagatgtttgtcgaggaaaaatgcgatgttgttatcggatcacgttatgtcaaaggcggtgtgaccaatgatgccaagtcgtcacagatcatgtcgcatatgctcaattttgcattccgcgtctgtctgggactgcatgccaatgacctgtctacagactatcgtatgtatcacacaaagcagttgaaaaaggtcaaactgacctgtgaaaactatgatgttctggaagaagttttgctccgcttaaaactcaacaagcgtgacaagaagttaaagatcggggaagtgccgatcaatttccagaagcgtatgtacggcgagtccaagcgccaacttttgaaatttatcatcagttatatcaagacacttttccgtcttatgggcgtgcgtatccaagatgcactgcataaataagagaccgatagaaagatgaaatgtgatcggagagatcacaggaaggcagtattagatgaaaaagttaattgaccagatcttaaaatttggtgtggtaggaatcatttcttttattgtggactttgtcattaccatggcagtatcgaccggacttcgtcagggcgcgggcatggggacatcacaggcggcgttgatcggtgcctttttcggttttgtcgtatcggtcattgtcaattacatcctttctatgaagtatgtgtttgagcgcagggatgatctggatcgtaaaaaagaattcatcatctttgttgtgctcagtgtattcggtctgggcatcaacgaactcatcattcttttctgcattgatattgtctatgcaaactgggcatggcttcatgcactggttggtgctacccttgcaacagcgggcgctaagatcgtggcaacggcagttgttatggtctacaatttcgtgaccagaaagatcttcttagaaaacaaaaagacggaaactgagggagaataggatatgaaaagaatgcttatcaccggattttccggtttcgtcagccgtcattttttaaattatcttgtagaaaataatctgtcctatgaggtgcttggcgtagatgtcaatccgccgaaatttgccatggaggactatacgccaacactggctatgtcctttgagcaggtaaatctccttgataaagaggcagtggaagatatgatcgcaactttccgaccggactatatcctgcatctggcatctttttccagtgttgcctatagttggcagcatccggcagactgctttatgaacaataccagcatctttttgaatgtgacagaggcattgcgcaagcatgacttgtgtgactgccgtcttttgtcggtgggatcttcggaggaatacggcgatgtcaaaaaagaggaactgccgctgcaggaggatatgcctttagttccggtcaatccttatgcggttgccagagtttcccaggaaatgatggcaaaggtattggcagacagttttggcatgcagatcatgctgacccggtcttttaaccatatgggaccttttcaggatgaacgctttgtgatcccgagttttgtgcgcaggatcttagatattgcagaaagcggtgcaaaaagcggcgagatcgagaccggagatacttccattgtgcgtgactttgtggatgtacgcgatgtcgtgcgtgcttactaccgtctgcttttggacggaaaaacgggagaagtctataacatctgtggcgaaaagggcgtgtctctggcagaagtcgtggatcagatcgcagatatcgtgggcgtttccgtgacaacccgcgtcaatccggactttgtgagaccgggcgacaatcaggtcgtgatcggctcggcagaaaaaatccgacaggatatcggctggacagcggagatcccactgcgtcagacgcttatggatatgataggacacatgtgtgcatagagcggtgccggagaattagatggaaaaatactacgggatgaacataagaaaaagattacaaaatccatacctgatttttgtactaggttgtctgctgggcagcctagtttttgtatgtatctatggtctggctgtggtaaatgtcacaaatgtggcatggctgacggactcctcacaggcagaagggctatgggatctgacccagcattatctgggctgggtcttctaccggaaaagtccatggcactttccactggggctggtcgaggggatttacagccagccggtgtctatcgtctatacagactccatccctctctttgccctactttttaaaatactatcgcccctgctcccggcaaattttcagtattttggcttgtttgaactcttgtcctatgccctgatggggggctttggggcgctgtttgtgcgggcattttcaaaaagaagccagatctgtctgctttcttctctcttttttgtcctgtcaccggtcatgttgaaacggactttttatcatacggcgttgtctgcccactttttgatcctggcggcattttgtctctgggtctggagaggtagccttttgccggagtatgcgtcgacagagagggaaacaacgggacagatcatcagaaggcgctggcgttatgccgggcgttggatcatccttttatgtctgtcggctctgaccaatgcctattttacgcctatgatccttggcatctggctctgtagtgatctgcaggagtatctggcgaaagcgggaaagaaagacaaggggctgcttgtaatctatctggtggaagtgctcgttgccggactgatcctttttgggatctgttatatcatgggctatttttatggggatgtgtctgtctctacgacaggactggaagaattgtcttttaatctgttacagttttttgatccgagcaatgatctttgcgtcattgatcacaggaactatattttcagtaaacagaattattcctcacttttgccgacccttccgactgtatccggttggcaggaagaaggctttgcttatcttggctttggcatgatctttctccttgcctgccttgtggtctatggcagcatccgctggatcgcaggtaaatatagaaaaagacatgagggggagaaggcgcagatagggcaggcgcaaaaaaccaaccggcgatcttggagcatcagtattctggtcggttttttggtttttacctttcttgccctgtcaccgcgggcgagtcttggcagcaggatcctgtatcagatctcctatccgcaggtcatctatcaggcgctcagtgtctttcggtcgacggggcgcctgatctggccggtctactatggactgctggcattggggatctatggcatggttttcctcttggaaagatccaggggcaggttttctctgggatttttgatcggtcttttagtattacaggtctatgatctctatccgggtgtttcctacaaacatcaggcatatacctatgcggcagagaccggcggcgaaagggatgcgtctcaaagccgggataccatgacagcggcatacaaaaagtatttgtcgtcggatgtctgggatatgctgggagaccagatggatgagatcgtcttttatccgccgacccagtttgggatcgagtgtgatccaaagacatcctgcatttttgaggaatatgcgcttgcccatgctatgtctttgaacgtgacctacatgagccgggatatgagcaggacagcggatcaaaagacctatgcgcattttgaaaagcgaaaagagggagagaaatttacgcataccctctatatcttttttgatatttcagatataccaccgtctgaggagacgcacttgcagtattatcaggtggacggctatgtgataggggtagagaaatccctgattttatgatatgatacaagtattttatgaggacaaaggagacaagcaatgagcaaaaatgtagcacttattacaggtatcaccggacaggacggtagttacttagcagagtttttattggaaaagggatatgaggtgcacggtatcatccgtcgttcttccgtatcgaccacagagcgtatcgatcatctgatcgctgagaatgccattaccttacatgatggagacctttcggattcttcttccatcatccgtgtggtaaatgaagtccgcccgacagagatctacaatctggcagcacagagccatgtaggcgtgtcttttgatgcagcagaatatacaggagacgtggacgcgcttggcgttcttcgtatccttgaggcagtacatatgcttggcatggataagacctgccgtatttaccaggcttctacttctgagttgtacggaaaggttgaggaagttccgcagaacgaaaacacaccgttccacccattcagcccatatgcggttgcaaagcagtatggcttctggatgatgaaggaatacagagaggcttacggcatgtttgcctgcaatggtatcctcttcaatcatgaatctgagagacgtggtgagacctttgttaccagaaagatcacccttgcagcaggacgtattgcctgcggattacaggatcatctggaactcggcaatctggattccctgcgtgactggggctatgccaaggattatgtagaatgtatgtggctgatcttacagcaggaccagccggacgactatgttatcgcaaccggtgttcagcataccgtccgtgaatttacaacacttgcctttgccaatgacggtatcgaactagaatggcgtggtgaaggcatggaagaaaagggttatgacaaggcaaccggcaagatgctggtatgtgtcaacccacagtggttccgtccgacagacgttgtcaacctctggggagatccgaccaaggcaaagaccaaactcggctggaatccacagaagaccagttatgaagaattatgccgcatcatggcacagcatgacttagaacttgccaagagagaggcaaagttaaaggcagaataaatgacgcaggagaaaaaagaacgccaatctaactttgaactgctccgtattcttttgatgctgacgatcccggtttaccatctgatgctctataatggtgttttctatatggactatcataagaatgtggcaccgggattgttcctctccagtgggggagcgatcacggcggattatgcctttatcgctctgacatcttattttctgctggaaagcaaagaccgcccagtaatccggcggtttttgacgtttggcgcacaggtgctgaccctttatgtcatccgttttattgtcattcgcgggctttggggattccattcaggaaactggtttgtagaagactatattttgggtggagcatggtggttcgtagcaccttatatggtcctgctcctggtctatccgtggctgaaccggctgatggagaggctgtcccgcggctggcatgggatgctttgtctgggcttggctatctggtttgtcatcaatggcatgaccctacagatgaattttgtcaatgatctggtcgcttttctgcttacctattttgtcatgggttatctgcgcagggacgattacaggcgctggatctttccgacagggaagaaatggatggctggcatttatatgacaggctttctgtttacgtttttttacgcctggtatgtcaagatgccgggagtcatggcaaatgacgatgccgccaatctggtcgtaaagcatctgatcggcaaatatgcgcctttgcaatttgtcatgggacttgccgtgttctttttcttccgggcattgcggctccgccagtcgccgcttatcaatcgtatggcaaagagtgtattctttgtattccttttgcatgagacagtcatgggcgtctattggtattttggcaagatcaatgggcagtatccatactattcggtggcaggattttggggctggctggtcgtctatgcggcaacctgtctgcttgtaggaatagtggcgcagaagttatacaccggatttctggcaccgctctggaagcggggcattgatgccttttgcaaaaaatgcggatttcagtagtgttaggaaagccgatggatcgagagataagaaaatgaccaatacaagagcagaaagaaaacagtatcgcgcgatcgatatcgcaaaatttgtcatggcaattcttgtcgtggcgattcatgtgcgtccttttacaggacagacagtctttgtctatgatgacatcatagcgcgtatcgcagaccctctcttttttcagattacagcatttttgttttttgaaaagatatttgcacaaatatccggcgatctgagacaggggatgtcctggcgcatgctgggacattacatgaagcgtattttggctttatataccgcatggtttgttatctatgcgcctgtcgttttgccgcggacatggcaggagtgcggaaatatccgcgggatgcttttggcactgcttaaaaaatactggctgagcggttattatggggcaatgtggtttatgacagccctcctgctggctatgcctctggtctttatcctgacaaaatatttaggatcgcgactgtgtcttctcttatcggcaccatggtttttgcttacggtggcaaggatggaatattgcagtatcaccgatggctggcaggtggcgggttattttgactctgccatctacggtatttttggctggtatggaaatggtctgacttacggatttttcttttgcgctctgggcatgtggatcgcttataaacggacactgggaggacaaaaaaacgacagcagggacttcgccctgccgagtctgatcagttttttactcctgatcattgaatcctatgtcatccgtgacaagggactgggacagagttttggggctatgttctttttgatcccaacttcttatttcctcctgcagtggcttttgtctgtggacatctttgaaaaaatgggagagcagagcaggaaacggttggattgcgcctgtgcgcatatgcgcaggcttagtattttgatctttaccatacactatggcgtcatggaaggcttgcagtatatggttggaaaatataccacatatgtctggaatgcgacagtcctatatttcgtggtattggtcgtaacgatagtcttagcagaacttatcctgctggcacaaaagaagataaaatggctgcatatcctgtactgacgatggcaagaggctgtttgcagaaaatctgacagaaaacatagatcaaatgaaatgagttataagagatgacacagaaaagacgaaatgagattacaggcttgcggggcttgagtgcctgcgcgatcgcctatatctttcactatacagaattgtttcataccatgccggaacgtttccccatacaggcggcagtcatgggatttttggc

SEQ ID NO: 12467 - DNA, 27254 bp, Unknown
  gut microbiota DNA sequence
tctttatttgaaattccatcttcattctgttttaaaaatggtaaatactcgcttgcgttgtccagaattttctttaattcatattcatacaactgatgaggaatcacacgattatccgtatttttttgttttggcaaaaactgtcgtaacaccagccgcccatacatctcctgataagcggcttcatcctcttcatctggctgaattttccctactattttttcaagaaacttcgagaaagtttcaatatccgccttgcttttgatctggtctgcgatctctcggttgacatgataggaataggccacatagttgttatttcgtgcttcacgaaagaccatatcatattttgttggacagtacttacgtataaagtattttaatgtcttaagatccgctttatgctgctcatatattttcactttggcctccgaaatcgttgtaattccggattccgcatctaaaacttctgccagtacactccaatcatgtaaattgcgtaatacagaaatcagttcatagtcatctccaatgttgaccatgatctccgccattttatcatcatccatctcaagcgaaagggagccaaaggcttcatactcatcttttccatataaatcctgtaatttacaagttcctcctgccagtaaacgaataatatgatattcactgtatggaaaagtttcgcttacattcttgtttggctttctatcatccaacatagatgccgctaaaagattatgtttttctgtcactctctcatgctcttttaaaatcgcaccaatagcctgcgcatctgatgaccacggattttcaaagccattatctataaaaaatcccagaaaattctgatatacttcctgaatatccagcaatgaatccatatgttccacgctgatctgattcaaaaaatgtcctctatgagcaactaaccatgcacatgccaaatatacctgcctcacatcatgtttctttttatcatgcattaaatccgaaataagatggtgaattgtcggatattctcccatatattgaacatctgtatattccttatcattaaagaaaatatacctgtctgctgtatcttcacgccacaaataactctctgataaacgtataaaaaagcgcggatcaatctttgcaatctcatccgcaaagatttcctgcaaaagtttcactctctgttgtcttcgatccaatctgcgccgcgcagagcgaaaatttctacgctcatcacaaagggcagcagcactaaacacatgactcccccatgcatcactcccatgaaactttaacaaacgatattctgtgtctgtcacagcatagcccacagaatccgttccaatgtccaatcctaaatagtactttttctcatttttcatttgacattcctccatctttgcgctaccatacaaatgtaaattgtagttcccctacaaatttacactgcgagttcaaataaaaatttattcaattcactggtttttccagcagcacagggtgtgcttaaaggcttcatatagaagtctttttttattataaacactaatcaaaatttaataaatcattttctctttcttatagcacaaaaacgcggacaccttccctcagaaaagtatccacgttttttctaatttgctccccaatttctaaagaacgcatgatttccaatcatagtatatcccgtgatgccgtaataatcagcccacttcttggtcatgaaaaagagccagtcgcccgaccggtagccattcaaaacctgtctggcggcattggtgcaggattcattcggtccacgctccaggatcagggctagatgcccgtctcgtaccggctggaactggttggtctgataaatgacccccgataaggtattcgggaacagggaactcttgactcggttcataataacggttccgactgccaactgtcctgcataggactcgcctccggcttctgcctggatgatcgcagccatcagtttcaagtcagcatccgaataagagatcgagccaccggtattttccgtaggaatctgcggtgtattgcccgcatctcctgcattacctgcatcggatccatcactgccgcctccacctgtagctcccccttgctgctgttgttgctgttgctgctgcaggatctgctgtgccagggcagcctgcgctgctgctgcctctccctctaatgctgtctcattgtcccggaactcttggatcttggcattgtattcttccacggacatctgtgccgctgatacttcccccttcttggcactgtaggcattgccggcatcattgaccagatcgtcaagttcatcctgctttgcagaaagcgtatcattataggcagaaagttctgtctttttatcactaagtgctgccgacttttccttgatggtctcctgcaactttgcataggagttcatcatctttcggtcataggaagtgatagaggacacatactcggctctctgcaaaaattctaccatggagccactctccagaagggtggtcaaaagcgactgggatccgttctcatacatgtattggatacgggtcttcatcccctcatactgttcagcctctgccgcctctgcctcagccagttccttttccaactgactaatgctggcattggcagattcgatcgcattttgcgtatccgtgatctcctggttgacgctctgcaaacgcttgttatatgagttataggtcgcgccaagatcatctgcttcgtcctgaagatcgtcaacaactttctgtgcatcgttcttctggctctctgcctcgtcctttttctttttgttttctaattgttcctgtctgatctcctccagagacttagcgtagacattgcctatgccccctgcgctccacatcacgcaaaaacacaagaaaagaaccagacactttttccaaagttttttcatatcaaacctcatctttatcggcaggatgtagagattgcctcgatcgcaaccgcaccgccccgcacgatctcaaccttgctcttgaactgctttttcaaaagtgtgatcagatcgtcatttctgtggtctgtcagcgtacattccaaaagtacactgtcctcgccgatgtccgccactttaacattgccattgttgacgttgaagacctgcgcgattcgaaagacttcttccttgccctcattgtcaagccccttgaccttggcataaaggatctctttcatgtgcaaaggcacatgcgtcaggtcgatcaccttgatgacttccaccatgcagtttaactgctttttgatctgttcaaaggtgatgtcatcactggtaacacagatagtcatgcgcgagacatcttcatgctcggtcgtgccaacggtaagactttgtaagttatagcactttgcagaaaaaagaccggacaccttcgccagaacgcccacctgattttctacatagagtgcaatccatcgatttttcattcccatatctgacacctcctacttcaaaatcatttcgctcataggattaccgctctttaccataggaagaacaatctcctctgttgcaatcataaactctatcaccgtaggtgcatctgtccgctcttttgcctcagccagcgccgcttttgcctcctccaaagaagtcacgcgctgtccatgcgccccataactctcagcccatttcacaaaatccgggacatatggcgggcacgcttcattcggtcccttgcaaccgtccggacatccgatctgtcggcgcagacaggtgatctcataacgcttgccatagaacaactgctgcatctggcgcaccatgcccagataattattattcaaaatacagatggtcagtggcactttttcgcaaatagcggtcgccatttcctgcatgttcatctgcatgccgccgtctcccgtaatacagacaacatccttgtccggtgctccgatcttggcgcccactgctgccgggaaaccaaaccccatcgttccgagaccaccggaagtgatcatctgcttgcctctcggcatggtaatatactgcgttgcccacatctggtgctgtccgacatccgtcacgacaattccctgggggaaagtatcgttgatggcttccatgatcatctgtggcgaaagtccatggtctcgtcgcatttccagcggattttcttcctgccacatgccaatcttcgccagccacttgtccgtattcttggcttctgcccattccaccagacgttccagcgcgatcttggcatccgaaacgaccggcacatccacaacgacatttcgtgaaatagaagatgcatcaatatccagatgtacgatctttgcctttggtgcaaattcgttcagatcgcccgtgatcctgtcgttgaatcttgtgccaaccgagaagagaacatcgcattcgctgaccgccatatttgcggcatatctgccatgcataccgctgttccccacatatagaggatggtctgttgggatggctcccttgcccataacggtcgtgacaaccggtatatgcatcttttccgcaaaggtcgtcaaaagttcctgtgcccctgagatattaacaccgccgcctgctaaaagcaaaggctgcttggctgattttaagatcttgtacgcctttttcaactgcccgatatgtacggtctcatttggcttgtagcctcggatatccacatgatccggatatcctgccggtccgttctgggtctggatatcctttgggatatcgatcaataccggacccggcttgccggaacttgcgatctgaaatgccatctttatgatcctgcccagatccttgcggtcacgcacggtcacaccatattttacaatgcttctcgtcataccaacgatatcaacttcctgaaaggcatcgtttccgatcaggctctgcggcacctgaccggtaaagatgacaagcggaatactgtcgtaatgtgcatctgcgataccggtaatcgtattggttgcccccggtccactggtcaccagacatacaccgacgcgtcctgttgctctagcgtatccttctgcctcatggatcagcgcctgctcatggcgaggcaaaacaacatggattgaatcctgcttgtacaactcatccacaatatcggttaccattccgcccggataagcaaaaatagtatctacgccttcttcctgtaatgcttttacaaataattttcttcccgtgatgtccatattatgatcaacctctcttatatatctgataggtgtagattacatcaaagtaagtctgctcctcgctctcctcagtcatcgaccatgccggatctttttccagatttggcaaatgtgcgtcggcttcataggcataatcgatctttgtgatataggctgtatcgcaaagatccagcatctgccggtaaatactgtctccaccgatcacataaatatcctcggaattatatttttgcaattcttcctgcaattcgtccatggaatgtacgatcacagctcctttgacctcataatttggatttgccgtcaatacaatattgatgcggtctttgaggggtgcctgatttggaaaactctctaaagtctttcgtcccatgacaacgacatttcctgttgtcatctgacggaaacgcttcatatcctgcgggatacggatcaaaagttcgttgttcttgccaatagcccaattattgtctgctgatgcgatgatgttcatatatctactccttatactgcaatcggtatgttcttaatctgtggtcctgtcacataatcatctaaacggatgtcatcctcggtaaaggcataaaaatccttgatctccggattcagccagaactttggtgccggatgctgctctctggtgatcagttcctgcacgagtggaatatgtctgtcgtaaatatgtgcatctgcgatcacatgtacaagttctcccacttccatatcacacacctgtgccaacatatgcataagcacggcatactgacatacattccagttgttggctgccaaaacatcctgtgaacgctggtttaaaattgcatttaaaaccaatttgtctgttcccggtcttgtcgtcacgttaaatgtcatcgaatatgcacaaggatataaatgcatctctgacagatcctgatgtacataaatatttgtcatgatacgacgtgaaaaaggattgtttttcagatcataaatcacgcggtctacctgatccatcataccttctttatacttatgctttacccccatctgataaccataagccttgccgatcgagcctgtctcatctgcccattcatcccagacactactcttgaggtcatggatattgttggactttttctgccagatccagagcatctcattggtacaactcttgatcgccgttctgcgcagggtgatggcaggaaactccttggataggtcataacgattgaccacgccaaacttcttgatcgtataagcgcttgtgccatcctcccattttggtcgcaccttctctccttcggtgctaattccattcgtaatgatatcattacacatatctacaaaaatctgatctgctagactcacttgtcatttcctcccatctttatgtcaaatcatatatcatttcaatcaatgtatagcaatgccatattattatttattgtagcgaatttatcccaggagcgcaacaaaagaagttgccttttgtcgcaaaaaggattatatttatagaagaaattaatcgaaggagtaagacagaatgagccaggaaaaagttgacttacgcaaagaacagaaacacaaccgtaagaagatcctcaaaaagcaaaagatggaacacatccttcttgctgtaggcggtattgttgtggcagtcgctatcgttgtatgggcaggattttctgcacacacaaaatacgaggagaaaaaggctgaaacccctacttattacagtgtagatacctcagatctgacagagtatctttcttctttgcaagactagttcatatacatattgatacaagacatacaggcacttcacaaattcatgttgtgaagtgtttttttatgcatttttcacaggctattgacatatcctagcaaagcgtgttataagtgtactagtacaactaatacagtttcagaaatggtaaaggtggtgattccttttatgattcaactaaactatcgggactccaagcccatctacgaacagatcaaggatggcttaaagcgtctcgtgatcaccggagcgattgctaccgatgaaaaacttccctccgtgcgcgaacttgcaagccagttggcgatcaatcccaacaccatcgccaaggcgttccgtgaattggagcaggagggttacatctacacgatcacaggccgtggcagttttgctgcagacagaaaagatatttcagccgggaggaatgacgaattgctaaaaaaatttgacgagatcgtaaaagaacttctcttcttaagcgaagacaaggagcaattaaaagaacgcattgaagtgctggcaaaaggaggtggcaaagatgattcagatcgataatgtttccaaatctttccatggcacacaagccctcgaccatttgcagatgcatgtacctaagggtgccatctatggtctggtcggtcccaacggtgccggaaagtccactatcatccgtcatatcgtcggtgcctaccgcccagacgaaggcgagatcctcattgacggtgaaaacatccgggaaaatgcgtctatcaaagaaaaaattgcctacatcccagatgagatcttttatttttcgcaagcgaccacgcttgatatgatgcattactacaagggcttatatccgagttttgacgagcagtatttttataagatctgcaagtgttttcctatgttaaacctcaagaaacctatccggtctttttccaagggtaccatcaagcaggtggcatttgttctggctctgtccatccatcctgccctgctcgttttggatgaaccggtcgatggcttggatccggtcatgcgccgacagatctggagcctgatcatgggcgaagttgctgatcgtggaacgaccgtactcgtctcctcacacaatctgcgtgagttggaagacgtctgcgatcacatcggcatcctaagccatggccatatcatattggaacgctctttagacaatttacagagcagtgtcaccaaagtgcaggttgcctttgacggtgatcttccaccgatcccggagggactgcaggttttacattccgtgaccaacgggcgtgtttctaccctgatcttaaaaggtcagccacgggaggcgcaggaaaaaatggcagccttgcatccactgcttttagatgttcttcctctgagcctggaagaaatctttatctatgaaatggaaggagaacattatgaagtcaaaaacatccttttttaacaagaccatatacaggaaaaatctgactcgctttgtggcttttccgcttctttactttgcatttctttttatcagtatgtcctgcaatatgctcgtaaaccgcctgaatatgcaaaagtccccggacgcctatatccagaccctaaaaacacatcaggatttgtatgaaggggttatgaacggaaatgtaccaatctttgttgctatttacatgatcttagtgaccttggctgtcttttcctatttataccaaagacggtcctgcaacatgatgcatgctttcccggtcaaccgtaagatcatgttttcaaccggtattgcttctattttgacgcttactctcctgccgcaactggcagtaaccctgatcaataccatcctctatcttgtctttggtgccggaagtctggtatggattccatggtattggatgctttgcatgattgcttatgatctatgctttttaggcatagccctgtttaccgccatgatcagtggacagttgattacaaatttcatcttctactggatcttcaattttatgtttatggcggctgaggtcgtgatccgcatgcttttatccttcctttgtttcggtgtttattcttcggatattttccggaacaaactgctctgtatgacgccgtcagcctatctgccgcatcataccggaatttatatcaatgatgccacctaccggatctatcatatcctgccagaggctctgcctaccctgctggtctatgccttagtcggcattgggcttgccggactcgcttacctgctttaccagcataaagccttggaaacctgtggtgattttatcgcagtgccatttatgaaaccggtatttacactgggtatgacctttttcgcctcattgttggcaaccgtcggcatcggttatgccttaaccaatctcctttccgagaatgagacggtattttttatcagcatcatgatcctatgtctcggcatcggtgtgatcctttatttcataatacagatgctgatcgaccgaaccagacatgtatggaaaaggcggtacatgaaatactgctgcatttacaccggcgtcattttcgccttcttgctctgcgtgcgttttgatgtatttggtatcgaaagacaggttccgacagcatccgatgtttttgaagtagacatgacgatgggagaaaccacctatgctcttacagatgccgatgagattgcggatttcatttcgatccacaaagagatcataaatgaaaaagaagaacttttagattattccagacattgcagcgagccttatggatttttggatatttcctaccatttaaaagacggcagttcactgagccgttcttaccgtctgccggattatgccggcaagtccgaagcatatcagaatacctgtcaaaaactcctgtcactctttaacgacaaggatgccatcttgacccatggtatttcaaaaaactatgcagaacttcaggcagaggatgtgactttttatccttttgacgccccggacgatggatctgaagaaaagacttatacgaatgcccagttgcaaaatctctatgaggcatttgtgcaggatattaaggaaggcaactacaagatcacagatctggacgccagcgcgccatgctactcggattccttcgctcttgtcctaagatccccggaaccgatcctgttggaccgcaccaagtattccttctactacaccggtcgttcttccttaagtttatttacaaactacgttagcgtcaccggcgccctgtctccggtatccaaaatggcggtcgctgaggagaccaaggaagccgttgccgcaaatggagatatgaccgcacatttatatatccacccgacaccggactgcacccataccctgcaggcgatgatcgacatgggcatgatcacaaacaccgatgatctgaccctatccacagcaggggaagtctatatgtttactgatgagtaaaatataagttaccataatataagaaaaaccatcttcgcgaccgcactaagcggggcgagatggtttttctttgtcttaacaatctccttattacgcaaaaaaggaacgaatcaaattcgttcctcatacaagagcgacagacgggactcgaacccgcgacttcctccttggcaaggaggtgctctaccaactgagccactgtcgcatttattatgttgtgtcctctccgtgacgacaaaaattattatatataaccctctatagtttgtcaacaaaaaaataagaatttttttaactttttttcatatactctactagacaccgaaaactgggggaattatcgtgagcaagaaaaccaaaatcgtcgtatttcatctgaaagaattaatatatactgcggtatttgccggtcttggcgtactgcttgtcattctcttatgctggatgttttccagccacgagaaaccggagcctgtgcaggaaaccatctacatgcccggcgtatatactgccggatttaccatgaacgacagtgccatcgaagtccaggtcgttgtcgattccaaccatatcaatgacatttcctttgtcaatctggaggagtccgttgcaaccatgtacccactcatgcagccggcgctaagtaacatcagccagcagatctatgagtcacagtctctggacaatattacatacgaagccaacaaccagtacacgaccgaggtccttatgatggcgatcgaggatgccctcgaccatgccaaaataaagccttagtcaaaatcaaatcttgtcaggctgcaatttttcacgccatatgaggcatactcctcatttgtcatatcgtgaaaatacgaacagaccacgcgggcaatgccattatgagcaacgagcatataggtcttatccgcctctttgcccaattcatccaaaagattgtaaatgcgctgggctaactgcagcatagactccccgccctcgtggcggcatacaaactgcttttttgcctcaaagaagtccgcagcatttcttggcgaagttccttcccatttgccgaaattctgttccaccagacgcggttccatgcgcataggcacacctgtcatctccgaaatatgccgcgccgtctccgcagcccggctcagcggcgaatacaggatctcatctatgacaatccctgctttggcgatcttctgcccggtcgcaattgcctgcgcatgccccaggtctgtcaaggctacatccgtctgcccgcagatacggtctgcaacattccattcactctctccatgtctcacaaaatatactggatgcattctatgtcctcctgtgtataacgtttttactatcataccataggcaggcaaatttcttttccatgcgtaatgccatttttgttaaaagcatccactcttacataataggactgcccctctacgaatgctcccactttatatgcctgacatgctcccataaccatacaactatgataaagttttcccggtgcatgcccccataaaatgttatatccacaaacgctttcatctgaaacagcagatactaccatatctcttgcatcggtttgttctacctgaaccctcgccatctccggtcgtttaccatccccgtttccaaagactcgtattcctgagacactcggtaaaacatgataaggcacatctatgatcgtcaatttgataaaacgcagatctatgccatcttcaaataccacataatcatgtggaaggtctgtctgggcttgccgcttatccgccaaaaccgtccagtccctgccatccgcagatccctctaagagccatcttgtcggatgtatattgcagtctatataacgttccatatcgggtcctgccatcagacttcccggacagtctatcctgttttccatatcatcagcaaaattgatctgcaccacatgtacatgatcacaggtcaccagatccagacacaaccaaggttctgcatcctgctcttttgctttccaccatgtctgcacattttcgtccacaaccaatgccgcctcatgtcccttttcacacccggaggaagtcacctttgcccggtaactgagcagataccacctcggatctgcccatggatccttttctatatcttctataatataaggccaatcaccgtatctttggttgcaatagagatttcccacatcatcaaagcctgccggccaaatgcctactcgtctttcaaatacatgattcttactaatacgcatggttgccgtatgccaccactgaccccggcgatcctgcatggtagatccatgtccggctcccggcagaaatccacccggcttatacgaaaatggattattctctgctaaatgaaaaggtcccagcggtgcatccgccacatagaccccatccgcataaacattgaattccgctcccggacaagcatattgtaaataatattttccggcatgctttgtcatccatgcaccctcgatataaggcattccggcataggttgcccgtatcatcgccttgttggcttccgggatcttatctgcatcttctccgcattgatctaaaattcctgaaatagggcatcaatctcagcctgactctttggttcttcacaatgatcttccccaaagcgctcataaccaatatgatatgggtcaccaaagatcaaatcttttttctggcccataggttccatggtcgcaggatccaactctatcccccagataggtgtcgcatttgcgcatccccagtaaaaatagagtctgccatcatcatcctggaacaggttcggatcccaataatccatatagcccggtatttcttcatacggcccatggatcggatccttggtgcgataaaaactacactttacatcccggctagatgccgtaaaatacagatactcacctatggcacgcacatccggtgcatagtcataaattggcatattttctggcaaaggataactatcccaatgcgccatgtcctcagagacccacaccgaacctgtcatagaagcaaacagataatatttgccttgaaacataaccatcgaaggatctgccgcctcccggttgactgtcattttataccgatcccgtggatcctttttaaactgataagcatagggtacatttaccggattacaatatactctcatttgacctctacctttccatagaaacttctgtctctgccatcaatccatgcattttctgtgatccggatgctatccttcagacggatatctttgctggaggctccgatcaaaagatcaatatcacccttttctatcttccacttcatatccttatctaaaaatgcaagttgagacggcgaaatgtgacagataatctccttttcttcatgcggttgcaaaggaatacgctcaaaggctgccaattccatgaccggtctggtacgggatgcaaatcgatctgatacataaatctgcaccacttcatcacctgcacagtctgacacatttttcaagaaaaaactacatacaatgtcgcccatggtatctacttctctattttctatatgcagatcccgataataaaactctgcataacttaagccatgtccaaacggatagcgcggactatgcgacatatccacataatttgcaaagccgatactgccactctgtgactccgcagacccccacggatgattgtaataaatagggatctgtccgcttttatatgctaccgataccggcaaacgtcccgccggatcattctcaccaaacaaggtctgcacaatcgcctccgcaccacactcagcaccattccatgcctcaaggatagcatgcaatttttcatcggctatatcagaagaaatcggtctaccaaagatatggacacccacaagcggcttgcctatttccgctgcctgttcaataaatgcatcctgacactccggaagattgatatctgttgcatccacaccttctcccatagatgccagagagcaggtgccgtattttcctcccagagtaagaattgccagatctgcctgcccgatcatctgcaatgcctcatcaaatcctgattgatcctgaccggcaatatcatagcccttggcatatacgatctcgcaggatggtgcatacgctttcaaatattccaaaagagacggacagtccggtttctgggtacgcaaaatagcatcatactcttccccctgatccaactggatatcagtccccggaaccgttggaatagtcttaccggtcgtattttcaatcccggcaacccctgcaatactgttcgccaccgcataaatagattccatcatagatatgtgcgtataaccgccaaagaacatacgcgcattatccgcatggggaccgatcacagcgatcttttttatcttatctttacgtaaaggtaaaataccgtcgttcttgagcagtgtcatggattccatggctgactgtctggtcagctgctttcctttatccgccttccgataaacattttccagtttgtcatccataagcgggtaaggatgttcaaacaaacccatgcgaaacttggcacaaaggacacgatataccgcctgatctaacacgccaatatccaatgcctgatttgcaaatctttcctgtaattccttgccataaccggcaggacttggcatttccacatccataccggcagccagtgccatctcccctgcatctgccatactttcaccaatacgctgataattatggctattttctatgccaccataatcactgatgcacagaccatcaaatcccatctgttcccgcaacaagtctgtcaaaagtttatgagaaagagaagccggctctccatcaatggagcaatagcaaggcatgattcctcttaatccagcttccttgatcgccgcctgaaaaggttttccatatatttcctgtaaaagtctttcgggtgtatcactatgggttccatggattccaccttgcgagttatgaaatgccaaaaagtgcttcgccacactttccgcctgtctgccatctacacttgtttcctgaattcctttggtataggctacccccatggcacttgcaagagcaggatcctctccataactttctccctgccgacccatgcgggaatccctagatatatccagaaccggcgccagaatatgggtaataccacaagccaattcctgctcggctacacaagatcctatttgttcttccagatccggatcaaaagatgcccctctggcaataccggacggaaaactggtcgcctcctggataaaggctccgcaaagtccctccatgtgaaaaatcgcaggaatatgatgcgggctcttttccataaccagcgtctgcacatcttttacccactgcgccgcgccttgtaaggtcggtatgcgccgcatttccaaggtactgacctcgccgataccataaggcactctctcagcgatccatgcaagatccatggcttttttatcgaatgggaaaacacagttgacctgtgccatcttttcttccagcggcatatccaaaagcaggtcttttgccctttcttctacagatctcgtttcatccaaataaattttattctttccatgtaaactcataatttccgttctccaccatctcaatttctttatttgccagtaccacccgacagcttgtccccaccggaacctgcacttgcagatcatacagatcatcctcccgcttttcccagcgcacacggatgatcccataagggcacctgtgccagcattcagcaaaagtaagatcgccgcccaccaatggttgtacccggaaccggcgatagcctgcctcctcggcttccagaccgcacaccctgcggtagagaaaatctccgacagcgccatatgcataatggttcatggatccttctgttatctcaccggattctgtaataatgtcccactgctcccatgtcgttgtggcaccttttcggatctgatatagccatgacggattggtgtcctccagtaaaagtttgtatgcctcttttacataaccatgatccgcaagcgcaaacaataaataaggtgttgccgtaaatcctgtcttcagatgtccaccatccgcctggatacacttccacagttcttctaccattgtctgattgaccttctcagcctttgccaaggaaaaatataaaggcaagacatagcccgtctgaaaagcctccgtgtccggcatttgccccttgccctgcataaacttatctatataagtgtctgctactttctcacctaatctccggtattcatccgcatcccggtcttttcccagaatccgtgcaattttttccatataatcacaggcatgcgcataataggcagttcccgtccattttccttttgcaagccagtccggcaggctgccataaggtgcacaccagtcaccaaattgaaatgggagggaaaatacataaggtgtcttgttggaaagaagccccatattagcccacctgcggacatccttcatgtattttttcatgaccggatacatttcttccaaaatccgcacatttccactatagcgatacaattcgtatggaacgataatacaggcatctccccagcaactggtcgtcatgctcggtgtgataccttttctaacgggaacaacaaaaggaatggatcccgtttttccctgctctgccttcatgtccttcagccatttcatcaaaaagtgatccatggcaaaattaaaacatgcggtagaagcaaacaaagcaatatctcctgtccagccctgccgctcatcgcgttgcggacaatctgtcggaatatccaccaagttactttttccgctccatacgatattgttctgtaattggttcagatccttattggaacaggaaaaaccgccatctcccagaagatcggaataaaccgcctgtacctctatctgcatctgttccggccggatgcctttgacagcaatataacgaaatcccatataggtaaaacgcggcgaatatgtctgttctccatccttgcagtgatattctatgatctgcttggcagaacgaagattttgcacataaagatcatcaccatccagaacttccgcatgacggatggtaatgacatctcctgcttttgcctgcaccgtcattcttatgactcctgctaaattctgtccaaagtcatataaaaactctccatccctggtctgtccgatatactttcccgcaaagatctcatgtcccaaaacaggctctccatagcgaacctgaatagttggtttttctttcaactgtgtgtcttctgcctttttccatgcgtagacagcacggcttggatctgcctcataaatctcaccatcatagaaatctgcaaaaaggtatgtcccgctttgcgccacttcaaaggacgcatcggtaccgacacattcacttgttccatccatgtattccacaaaaacgtcagctaaaaaagcctgcctgtctgccatcaaaagagatctgctcttattggtatcctgtatataggtagaccgtcccactgcccagccagcggcgacgatcgcccgcaactcataagtgcccggctggatattttccaatgggtagataccatattgtaaatgatgatcataatccgtaaatcccggtgcaaagtattctgtattgatccgttttccatcccaatacagatcatagatccctatggctgttgccataactttcaaggatcttaccgacttttgcaaaatgatctttttgcgaaattccagaggtctcggtgataagggtgacgtattaatgatcgatgaatccgtgatccaattccccttccaaggtagttccatgcgacctgtttcaaaggtcgcatgggcttctgtatggttaccgtctgtcgtttttacctgcacacggatcgtatatgtctgcatcggcaggagttcttctcccccatagataacataggcgatttcgtctatttcctcctgccatccatttaaggaaatacatgccttctctacacgaatcttttgttcatcactttccatgcaaaatccaagcactggctttgactgatccgtataataaatggtatctttcctttccaataaagaacgatagtcgatcgtaatatcactaattttaatcatattttcctatcctttattctttcacggctcccatcagagatcctttttgtaactgtttttgtgcaaatggcattgcgataagtaccggcaaagtggcaatgatgatcacacagtaagataccagataacggttccaatccggtgatgttgctgtagtaagtgtcgcattatctgccacgatctgcttgatccacaactgtaaaggccacaaattcttatcacttggaacataaagcattgcattgaaccatgcattccaagaaatgatcgctgtgttgatcatggttaccgttaccagtcccatagcctgcggaagcagaatacggaacatgatggtaaagtgtcctgccccgtccaactcggctgcttcgatcgttgattttggcacctgtttgaatgcattaagggtcaaaatgataaacatggcattggtacagtccggcaggatcatagaccatacggttccggtcattcccagattccggatgaccatataggtcggtaccgttccaccattaaacataagggaaataatgataaagagcatcataattccggatgcctttggcttacgatagatcacatatgctgcgatcacatttaataccaaaccgaccaagacattgcccaccacatataaaatggtataggcataactcttgataatcgccatatcatcataagataaagtcttaatatatccgtcccagtttggttttccgtccgctgttacccatttccataagactccgttgtgtgccaggagtaaattgccatcggacaaagacgccatcagggtatgccacatcggaataattgccaatgccatgcaagccaataagataatcccgataatgacgtctgctaccctctctccaaggctcgggtgtacgaccattccttctttgtatttcggttttctagccatctctcattcctccttagaacagcgacattttcgttgctttttcagacattttgttaccaaagatcagtaacagggttccgataatagactgcaacaaaccggatgctgttgataaactaaagtcatttcctgaagaaaatgccattcgataggtgtatgtactcaggcaatctgaaaattcataagttgtcggcatatacaaaagcaataccttatcaaatcctgtcataaataccaatccaatctgcatggtaaacatcataacaaccagtggcacaatacttgggattgtgatattccataagcgctgccatctgcttgctccatcaatacaggctgcttcatagagattctggtcaatgccattgatggctgctatgtaaacaatagctccatagcctgccccctgccaaatgccaaggaaacagttaatgaaccagaacaccggtgaattgactgccagccagttctggtttggaagtccaaacatagtcaggaacatggtgatggctccaccttcttttaaaaactcctttgccaaagtacacacaacgaccggtgcaacaaaatatggcatatatgtgatggtctgtaccacacgggatcttcttttatttctgacctgactgatcagaagtcccaggataaccggaatgataaatcccaatgtcagattcaatagtgccatatagaccgtgttgcgaaaagcataaccaaattgtgcccccgcaaacagttcctgaaatttatccagtccgacccacggactgtcgaataagcctttcgcgactttataatcctgaaatgccatcaaaatccccaccatcggaatatatttgaagatcaagagaaatgtaaatgggatcaagaagatcagataaagcactccatttttcttcagatcatatttccatgtgtttttcgggttatacgtcgccgatttagattttgtttttgccatagaaccttcctccttgtttctgcttatactttatcataggcatcattctatgtattatgtttttcattttttgattgtaaatatcatttttcgcacagggtaacctgtacatcatgcaccttgttgtcctgcatatccggaaggatattgcctgtaatctcctggccatccataagaatatgtgctactccctgctccagatgcataggattatggatgcagatccgataatctgcatcgcggaaatgccgcactaccgtcgcctcattccaatctgacggaaaacacggtgcgatccttaaaccttcgtaagttctctgtaaacccatgattccttcataaatactgcgcaaagcccatgccgatgtacctgtcgtccatgaccagtaggattttccataatatcccgggtgcgtagcgtagcaatttgtaaacacatatggttctgccccggaattgctggatgggttttgctcactatccggcatgatctttttcaaagtacggattgccttattggcgcgtcccaatttacaatccataaagatcttaaaactggtcgcatggcaatatacaccgccattttcaaacaagcccggaagcataccggacatacgccctacatttggtgaatatttttcataggctggcatattcagtggaaagccgaaatctccttccatgccatccacggaagcaaccacatctgccatacgctccggcggtacaatctctgccagcaccgcccatgtctgcgcgttgagataaatcttgctcccatcgctatcctttgaaccaatattttccacctgactgagggcacgcatataccatttgccatcccacgcataggtgttgatcgcctgtgccaatttttcatattcctgtcgcaaaaagacggcatattcctcattgccgatataatgcatcaaggcttccatctccagcagtgccatacagaactgttccgacagcatcacgctttctgcctccggatcggtcgtgatatttaaggcatcgttccaatctgcaaaatagatcttgaccagaccgtgctttcctttatcacggatcagacaggataccgctgcgcgcagatgctccatgaccgttgcctgaccgccatcctgccaagagatcttttgttccaggagagaaagatcccccgtttccttgagcagttcgcacactgcccatatgatccagaacggctgatccgaatagcgggtatcatcatatggataccatgtcaagacagcatgaccattctgaaactgatggcgtaaacattctaagatctcttcttttgccttttcctgccggtaattcaaaagtcctaccgcaatctgcaaattgtctcgaactcctttcttaccgacaatgcagcaatccacctgctttttgatccactctttcatgatatggttcacttttgcatccggggtttccagtataagggaactgtacttatccacattataggcgatcgccttttgcagactgtcctccacagcctttttctctttatactgtctgcccacagaaatggcttcttctacggattcgctcactcccatgaccatataaatttctttactttcacccggcgcaaggacgatcttatgttgcaggactgcccctaggacaaataaggccgcctcggaattactgcaatccagtcccttcacaacaatgtccggacgttgaaaaagtgcatatgccgacgcatctaacttagtgatcgttcctacgccgccgcaaaactttgaaagatctccgtcaaaagcaaagaccggttccgacgaggcaaggaatgcgttataccgcttatgcggagcaaagggatgatcggaagaacagtaaatcccattcagatccctatcaaaatgtgtttccatgcatcgataattttcataatatctgggataggaaaagccttccagttcaaaactggtcgcctcaaaaacactcaattttcttgtccgctggctctcattttttatgcgtatccgccaaacctcgtgataagcatccttcggcacatacaggcaccagcaagatgtgatctgatccacctgagaagacaactctgtatatcccagatgatgcgtgcatttgaaattttccacttcttcattgagcggtgccgcacctatattccaactctgcatagactcatcatcacggatgtaaacatagcgtgcatcattattattcagcatacacatatccgctttctcattcaggtaataacttcgtccatgcccattctgggaaatctgcgcacagtagcctttctcactccaaagataattaaaccaatagcgtggcagtttgggctgatagatcacgcaggctttttcatcttccgaaaattcatataatttatcttccatatattacctctttctaatccatccacagatgataaaatacactggctacatttcccggcaagtcaaagacaacctgaccatttttcgctgctttctccacagaagagatcacattgccctcagtatctaaaaactccaggactgccttattctgtgcctttatgatcatgcttccctctaaggtctccgcatataactttccgttcattgtgatacaagtcatcgtgatacccggtgcatactccggtccgtctgagatcacgttatcatcattgccacatcgaccaaacgcagaaatcacaaattcattggcatctgccagcttcattttgtccctttcctcttgatatagcggcatgacggagagtgagattcggtcattgcatgccttgaccagaatacgatcatccagcacaacgttttcttctggcgcaccactaaagtatgcggcatacggtgtatgtacctcaaatcttgcatgtgccggatcgaaacagatctctcctgttgccgaaatcaattttccatccaccagacctgtatcctccgggattagtttccaacacttcattgcctgatccagtttctctgcaaactctgtataatctcccatacctgccatctgacggatatctctaatgacaagatttttttcgtccagataaatcttggcatcctcttccaggcagcctttactagccttaggaagtcgctggtcatccgggaatcttcgaaaagcatccctatcctttgaccatgcaaactgcacagcatgctttgcttcagataaatctgcagtattaaagtagcccgcattgatcgcaagatccgcatctccccgatatttatgcccattttccacaaatgccgcacgcagaccggtaatatatggtgcgatcagattgaccatggcgtaccaatttggcaatgtctccaaatcctccatggaaaagacctgctctactttgacattgcttttggctaccaatcccttcaaaaacacatttgccatgaacccccactggcacataactgccgggtcattatagcaatcaaagacatcatggatctcatcatccggttggttgtccttgtccgatgtatgatgattgtagaggatcagaccatcccaatcattcaaacaagcgtaggcgatcatctgcacaaaagaagtcgaccggaacggatgtaatccataatcattccattccgtaatcataaatggtttcccttcgacacaggacacagatcccagtgataaaagcgttgttgccatctgtccaatatatttttgtaccgtgagcggattcactgatacactttccgagggccgccccgtcataaatgtccttccatagaccggcaggatcgggtgattaaaatacgtattattctccatgaaatcaccgtcaatatgtccatagacatccgcggcacccgcgatcagattgctggcagcaatcggtactttgactcccagagagagcagataatttttatattcccggtaaaaacgtcgattggaccaaagtccaaattccatataatctgcataacgcgccgggctgacatcgcctgcccagtcatcccatgcattgttggttggctggtaaaaagatccccgcaccatcttaaccgtattctttgccggatcctcatcctcgcgcagggcacatactccatcactggtccatgctcttgccagtttttcccggttgtcatacttcatcaataggaaataattaaagcgcctttgtacctcttccatataaggcaataactgtggattctggtctacttcatcaatacctttgatcgccgaatcctcattattcatctgcacgacagctaccgccggatcatccttataggcaagccctgtataaggattgacgtggcaaagaaacttctttgcatagtctctttgcagatcgatcagacgctggttaaacataggaaaacacttgatacaaggaaccatatctcccggatattccagtccgtctccagctagaaattggcgggcaatcagaagatcaaaatgcagataaatgcctttttcctttaatttagctgccagataatcaaaacgatccagaccttccgggttaaactctatgctggacccctcactatattttaggagaggtgcctctttacaactgctccaggtgcactcctcctgaccgatcggtgcatctgctgcatgcatgcggatgatatttactcccatgcttgcaaagtggtctgccaatttttctgccagttcgtgactcggtgtgttggatctcgctgcaatgttaaaccccaaaaaacgtgctcgtgtaccatcttcaaaatagaaatggtcatcttttatctgcaaaaatccatgtttgcccgcaggcgcatccaataaatgtgaaaaatccaagactcccttgttgacttgtgtcttagaaagtttgatatgctgcttcatgtttttctcctttttcctgaaattttggtataaaaagaccgccataccggtatgacggtcttaaatatcctataaggcaatatctttttattttgctttgtcaatctgtttctgcaagagttcgcaaacgctggatggatcatttgcttccatacctgctacatattcatcccatgtcttttctccacggattacctgtggcagattctggctcatataatctctaactgtagtctgcattgcactccatgtctgtgaatcatccgaatttaataaggatgcataatcagatgcacttccggtatcttcatacttggtccataattcatatgcatgctttaacactgcggattcgtcttgctctatggtatagtcatctgtattaccattcagctgcaatcctacacacattctggttgcagtcacagcaccacctacagcatcgtcaagtgggatcagttgggtataaagcggatttccatcatcccctgttgtcaattcataactgcccttgtatccatattcttcatataagtttggatccaacttagtttcgctgatctgctcttctgtcagtcccaggtttgtaagcaaagcgccttccattgtgtaagtccaatcaaagaaggtaaacagtgttgctaaatccttatcctcacatttgttggtaacaccaagtgctgctgcctttctgctgtcatgatacatgcagtcaggatctttaaatttctgtgcatcgctaccgtaagtatcattgatcggaagtggtgcagccattgcataggcatcttccttatctgactcatccatgcaggtatcacggatcacagaacctaaagcggttcctgtgtaagcagaccaaagacctaccttaccctgactaacgcctgtggtattgatcatatagaagatatctgttctggtatagaactgcttatccaaccatccctgatcgtaccaattctgcatacattctgtgtatgtcttaaagttttcagaagttccgtcatactctaccgttccatcattgatgtaatagtagccgttaccaccaccaaaagaagaaaccagatcgcctaaggtactatttcccatataagaaatagaaatgtcataagcatcatcccagcctctttctgcgattgccttgtcaaatgcttcaaacatccactcccagtcgctgatagtcagaggatctgatgtaccacttgggaagataacattatcttcataggtattgtccggatcatctccatcgcttgcgctaaaggaagtcacttcatttttcttccatccggtcagattgttctgtttctttgcctcagaaagaggtgttacttccggatgaccatttttctttactgtatcgctatcccaatcccatacatattcggtcggtgtagcatactttacgatccagtcacgacgatacatatagccctgccaaggatctctaacggaatcgcccaacatacagatctgataataatgtgtcttgccttcatcatctgttgatgtgcaaagcatcttgagttccgggttctgctccagatatgcaacataatttggcatatatttttctacatattctgtgatatccataaggattccgtcatctgccaaggcttctgcactttcagatgaaaccgtaagatccaaaagatcaggataatcacctgtggagatcagtgtattaaagttatctgattctgatccggcaaccggcacctgaaaatcaaaatccaggctctcaccatcgccaataccaccattttccgtatcccatgtctgcgcctctatgtactgtactgctgcggaatcgttgtaatccgtataatacttgcccgcgccatctgtctgaaagatccacattgagaaatgatctggatcattcgatttgctactcgatttaccacatccggtaaaaacccctgctaccatggttgcagcaagtgctaccgatagcattctcttccaagttattttctt

SEQ ID NO: 12468 - DNA, 21976 bp, Unknown
  gut microbiota DNA sequence
atgtagaaaaagacagttcggaagaattgggtattttaacaaaattaggaggttttttattatggcaaacagatttgtgttgaacgagacatcttatcatggtgcaggagcaatcgcagagattgcaacagaaacattgggaaggggatttcagaaagcatttgtatgctcagatcctgatctggtaaagttcggtgtaaccaagaaagtgcttgacgtactggatgaggcaaagatcgcttatgaactctactcaaacatcaaaccaaacccaacggttgagaatgtaaagaccggtgtggaagcattcaaggcatccggcgctgattatatcgttgcaattggtggcggatcttccatggatacagcgaaggcaatcggtatcatcattaagaacccggaattcgcagatgttgtaagtcttgaaggcgttgcacctacaaagaataaatgtgttcctatttttgcagtgccaacaactgcaggaaccgcagcagaggttaccatcaactatgttatcacagatgcagagaaaaaccgtaagatggtatgtgtagaccctaaggatattccggttgttgcctttgtagatcctgagatgatggcaagtatgccaaagggacttaccgctgcaaccggtatggacgcactgacacatgcgatcgagggatatattacagcaggcgcatgggagttgtccgatatgttccacttaaaggcaatcgagattatctcaagatctctccgtgctgctgttgagaacacaccggaaggcagagcagatatggctttgggacagtatgttgctggtatgggattttctaatgtaggtcttggtattgttcactctatggcgcatcctttgggcgcactttacgatacaccacatggtgtggcaaatgctattatcctgccaacaggtatggagtataatgcaccggtatctggcgaaaagtatcgtgagattgcccgcgctatgggggtagaaggtgttgacgatatgacacaggaagagtacagaaaggctgctattgatgctgtcaagaagttgtcagcagatgttggtatcccggcagacttaaaggatattgtaaagagggaagatattccattcctggcacagtcagcatatgatgatgcatgcagaccgggtaacccaagagagacaagtgtagaggagatcacaaaactttatgaatcacttctctagtctgtaactagtttgtaacaccgcaaagagtacactcatcttagtataggatgagtgtacttttttagaattatagcccgattggttcacaaagagccaatcggttttgggtttagcaaacgttttttcacatacaagtggacgatttctattgttaggttgctgatgtggaattggtctattataatcaatatgtgacaagcaatgacgtgacaagagcctgcaatggcccagatcatgtggaaggatgttagatgaatttgcaaaaaaagaaacgagggtttctgtttcttgaggtagtcctgattggtcttacgataggagtcatcttctatggcagatatcaaactgtgcaaaggacagagggaaaaaaggtcgaacaggaaaaagaaacatcaatagaaagggaaagtcggcaagcagagcaacttccagaacagttaccagaaccagcggataccgactttgtcaggatcatggactatattccggatattgtcatcaaccttaaatatgccacaactgataattttaccggaacggtcatctacgattttaaggatgcctatttgcgctatggaacagtaaaaaaactcgcagtggcacaggaaaaattcaaagctatgggatattacataaaaatatgggatgcatatcgtccgtttgcggcacaggaaaagttgtggcaagtctgtccaaatccacgttatgttgccaacccggccaatggtatgaaagcacataaccttggagggacaattgacatgacgcttgttacattcaatggaaatgaggtggaaatgccgacggcattcgatgatttttctctcaaggcagaccgtgattacagcgatgtgccggaaacagcggcgggaaacgctaaaatgatggagcgtgtgatgacagaatgtggttttgtaggttatgcgggagaatggtgggactattccgatacaacagcctacgaagcgtacgatttcaaaccataatctaagaattataaacttttctttagaataaattcctttagtgtctttggaaactgcgttataatgatttcatgttgtttcaataaatagggggtataaataaggatagagtcagcccaagtggctggctcttatggaatggtaggatgaatgatatgaaaaaaggtactgtgaaatccattttaatgctaggatttttttactttgtatttcttggtgcagaatactattttgataatatgatggcttttgtgacagatgcagatggtgtggtcttagcacagagctatattttaggtagtagtgtgctgggttttttgttgtatgcaccaatggaaaaaatgttaccggcaaagggaaaacaggtgttttggagcatgagcagtgccgccgtgattctgatgttcttttttatcaggattcatagcggctatggacatacattgcgcgcaggtttgtttttattcttgttgcttgggtattttggaagtggtgtgcattatttggtggcgcagacttttgcggcagaaaatgagacagaaaaatcgcatttggcacggacagtaggctgtgcctatgcctttgggattttattacagtttatcaataacaattgtatttcatccgtagcagtgcaggtgattttcttatgtctggcatttgctgttatggaaggtttgtttatggtaaaagcacagcaggtcgatgcgcaaggagaaacgcatccgctcatagaagcggatggtgttgcacgaaagactggcatgctgttgatttttattgtcgctctcatgacatttatttttgcaacattagataacgcggtgacattggtacatgctggtggaggtgcggatattggacaatggccgaggcttttacttgcatgcagtggtttgcttgcaggatttttatatgatatcaaaaaaggtgcttaccagaacatcatcatgtattgtgtgatgatgctttcaacgatttgcgtggttgtgatcacgtgcggtggtccatttatattgggattggttgtattttatctgtcagctggtttcttttccatttattttgccagcagttttatgcgtctttcgtatgcaatgaaagagggaaaactatgggctggactggggcgtgctgtcaacaatctgtgtgcggtgggaacggcttcgatgtcactgacactgttacattcgccaagttatgtcaccattgtcattgcgcttgtgttatttgccgttacaagtgttctgatttttgtataccagagatatggggatcaaatgcgatggaaagaggaaaatgcaattttatcgcaggaagcacaaaaaacagaaaagatattagaaacacataagaaaaatgaagaggaattgcttgcactttttgcacaggaattttccttaacaccacgtgaagtggaagtgcttgcgtgcatgcttcattcagaagataatgtgacagagatggcgacgcagcttgctatttcgcgggcagccttgtaccgtcatatttcgaatatgaatgagaaaacaaataccaaggcaagaattggtttgctccaattttattatgcctggatgcaggaaaaataaaggaatctgacaatttgagacatatgtcaactcccatattacgaccgcatatgctagaattttacccatcattaagtagtaaatactttgttggagggtgagcatatgcgacgacgtaatgtgggagttttttgttgtttactctgccttgtattggcatgttctaccatgatgtttggatgcggcaaagcaaagcaggaagaacaaaagagtgcgacaaatcagaaaacggaaaagacgaatgaaccggaaggaacaggagatgacgtagcagcacttttaaagaatgcgaagtatgtggctgtgattcatacaaaaattaatcctgaatttaatatttatcttgatgaggatgaaaatgtcgtggcattggaatgcctgaatgcagatgcaaaggacgcatatggcaagaaatcgtttgccgggaaaacactagacgagacattacagactgtggtttctattgcagcagaaaaaggctacatgaaagaagaccagacggtagcacttactatcacagaatgtacgaccgatttgaacgctaccgagttacagacaaaaatggatagtgtagtaacggaagcggcaaaagaacagaatatcacagttacgacagcgatggatatgagtgaagaagtcaggacggcacaaaaagaagcgggattgtcctgtgtgcggtggcagtttcaagtgcgttgtctgtggtggcagcggttcactttaaaatgggatggtatgcaagaaaataacaatacatagataaaaaacgacaaaaggaggaagacaacatgaaaaaaacaaaaggaaggatgcgtggaattttatcgctggttttagcaatgcttttgacggtaacgatgattccggcacaaaaagtattggcagaaggagaagcggcaggaagtacggcggaaaacacgggaaatctgacgtttgcttcgtttgaaagtacagatatatcacatggtgaggtgcaatggaaaaatggtgatgcagatacttggcatacacaaacaacaacaggggatgtaacggcaacaaacgtacgaattgttgttaaggaaaatgccaatttggggcagcatatggcgttgcgtattaatggacaggacatattgcaaacaaatttggaaacattaaagtcggatgagggattgacactgcaagcagatgaaaagtatcagtttgaacatattgaattttcttctgcggcgggtggttccggcggtgaagaacagcaaccacagccacctaagcctccagtatcacagggaattgaacttatcttagaaggcaatgcaaaagataaatttgataccttgattgcaacaggagatactgccaacaatatttatgtgaaggtgaatgacgaagcatcttatcagaaaatcagtgacttgacaaaaggcagtacacctcaggttaccgtatctccggatggacgttatcagtttgcggattttgtaacaaaggtttctctctatgtaaaatatgatgcgaactatatggtacagtttatgccaaatgcagcgggcatgggctttagcgaaaatgcaccgcttgttttgaatggctcaggctcacagcatatccagattgataaaaaggtcaacacgatcacctgggcgtatgacgatgtgcgttatggcaaagatgcttatttggagcatggaacagcagaaattattgcagtaaacggaacaccggttgcacaacttccgaaggatccggacaattttgcagcaaatgcaggaaacaaagatggcggacactttgcagcagatcctggtgctaagattaccattaagctgacaccggattatggttaccagttatcgggagttcagttaaatggcggcgctacgttagaggcacaaaaagatgtatctacgttcacatttaccatgccggatacaagcgttcacttcaaaggcatttttacaaaatcagaagatgccgtagtgacaacgggaaatacagtcaaaaatgctgcaattgcaaatggtgcaaatgctacaagcagcggaaatctggaattgaaggtatctgataacacgaattacaacacagcagcagccacagctcttgtttctgatgctgtagcagcagaggcagtagatctttctttgaaccaggttgtcagcaaaggaaatggcaccaattgggaaaccggaattacggaatttgaaaagccaatcacattatctttggcgttgaaggattatgacgccaattatgattatacggtagtgagaaaccacaatggaaaactgacagcacttgatacaacagcaatcaacggaacggtttcttttgcaaccaatcagttctctacctacgttattgtaaagaaagaaaagagtaagacaccggtttatagtactgaggctaatgccggcgcaggtgcaccacagacaacattttcacagacgacaaaggaactgttagatgccattggtctgaccgcggcagaaaagaaagcaattgcaaatggtgcaaatgtaaatgttgtgctcaatgtaaatgttaagacattgacagagaaagaagcaaaattaatcgaaagtgtcattggcaagaataagatggcagaaacatatgatatcaatcttttgcttcagattgcaggcttagcggatcggaatatcacagatccaagcagtgcaatcggtataaccatcacaatcccggataaatttattaacacagataccagtgtgaagagaatttatcgcatggttcgtattcatgatggaaaagcaacggtaattgacggaacgtttgatgcgaatacaaaacaatttacatttgcaacggatggattttccacctatgcattggtatatgaagatgtggctgcaactacaacaaccccagcaacgacatcgccaaagacaaacgatacttcattacctatcgcatggcttctgcttttaggtgccggtctttgcggatgcatggcagtaacgctcgtaaaaaagaaaacgaaataaaaagtacatgacgatttgatagaatgctcccacagatagaagtgatggtgggggcattctttttgcttgtgatgatgtctgcatttttatgttcgggaaaatccctgtggttgcaaggcgggggagtttatagtaaaattgtggaaggtttaaaggaaaaataagaatcagaggaggtcttgattatatggaaagttacaagaaggaattcattgagtttatggtagagagtgatgttttaaaatttggcgattttaccttaaagagcggtcgtaaatctcccttttttatgaatgcaggagcctatgtcagcggaccacagttgatgaaactgggcgagtattatgcaaaggcgatccacgatgcttacggcgaagatttcgacgtcttattcggaccggcatacaagggtattccgctggcagtcatcacggcagaagccttctatcgtttatatggaaaagaagtaaaatattgctccaaccgtaaagaagcaaaagatcatggtgcagatatgggttctcttttgggctataaaatcaaagatggcgaccgtgttgtgatgattgaagatgtaacaacttctggtaagtctatggaagagaccgttccaatcgtccgcgcacagggtgacgttacgatcgtaggtcttatggtaagtttaaatcgtcaggagatcggactctccggcgaccacagcaagtcagccctggatgaagtggcagagacttacggctttgcgaccaatgccattgtgtctatgtcagaagtggtagaacacttatataatcatgagcatcagggtaaaatagtcattgacgattctatgaaagcggctatcgacgcatactatgaccagtatggcgtgcgataaagatggttattttatgaacaaaacaaacaagatccggtatgtgatcccttttatcctctatatgggactattgatatattttctgctttttgcagaggcatttcgggaaaatgcagtggatgagtatcgctacaatctgatcccttttcgggagatcatgcgttacatccaatatcacaagacgattggaaccgggcgggtacttttgaacctgctgggcaatatcataggctttgccccttttggatttttcctgccctgtatcagcagacgaccgatcgatctctgggcggcaacacttttttccatggagttttccatcacggtagaagtgatccagttgttcagccgcgtgggctgttgtgatgtggatgacgtgatactcaataccttgggcggtatgctgggcttcctgtgttatcgggtttggaggaaatatagacatgaatcgtagaagtagaagatatagtgggcaaaagaaacccttatctacaccatccataggtgcggcattgggagcggcggcatcgcttttgatcctggtactggcactttttattgcagcaaatacagatggcagcagtgccaatatcatcggcggtatctcggtgcttgccatgatcctggcgatcgcgacatgcgtggcaggagcgcatatggcacgcaatgataattttgaaaaaatatcccgtatccttggcgtggtcgttccggcgatcgcgacggcatgctgggtgatcttatattgtatcggtattctgattggataaaagacaggtgggtagaaaaatgagacaattagagcgacaggaagaatatgaagaacgatttgctctggtaagtgagcgggtagatcagttaaaggaagatgcggaggtgtcggatccctttgcttcttattttaaagaagtggcagcatttcttgggctggtaaaaaagacatatgtctgtgtggcagagggcgcctatgagaggctttccttagaggaacggcaaaagatacacgcggacttgtatggcagattggagccggcggtctatgaggcttcttatttaaatccggaatatgctgaggagacgctgggagcagaactgggcggtatgctcagcatgctttatgcagatctgttatcgaccataccggatgcctttgaagaaaggctggacctgctctgcatctggaacgaactctttgtagaactccacggttgttttgtggaagaaatgcaggagatgggaacagagacaggagcattctccggggaatccttgaaatggattgcaggaaatgtaaaggatgcgatctactggttctatcatgactatgcggaaagttttgtaccggatacgattctgccaatgatcgatccatcctatgatttctttaccaaatggatcgaggaagcagacttatccggcaatgcctatctttaccgcatcggtgcaccggtcggtaagaatgaacttttgatggcagattatctgcgaaagatgccgcaagatcagatcgatgctatggcgcatacctttacggagggctatcgcaagggctttgagatggctggcaaggatatccatgcgaaaaagacggtcaagatcgaggcaccgcttggcatggagcgtatggtaaaggctgccatggcacagtttgcagacatgggcttaaagacgaccatcctgcgtgaggcgacgatctcactttacggcaggggcggtggcaagcgtggttattacagtgtatcgccaaaccgtcagtatgattatgaccacaaggatgataaggcatattattttgataaatcctttgtagaacgccgcttggaagtcatgcgtgacacctttgaaaaggaaaaagacaaggcactgacctttggcggtccggcggttgtggaagtctttggcgaagaaccatttgcgccggtcaacaaggaggcaaatgccaagtattccgacaagcagaattctctgaacgtatataatgctgtagaatccggtaagatcaccaacacctatatcccgggagaatcctacagttttaccatcattgcctatccattgccggcgatcggcgatcaatttgaggagatctttgccaagaccgttgaactcaacaccttagactatgaaaaataccagaccatccagcagcatatcattgacgcactggatcagggacagagcgtacatgtgaccggacgtggagacaatcacacagatatccgggtgcagctgcatccgctggcggatcctgcaaaagagacgatctttgaaaactgcgtggccgatgtcaatattccggtgggggaagtctttacatctccggtcctggaaggaaccaatggtgttctgcatgtgacccaggtctatctgggagaactctgttacaaagatctgaaggtcgtatttacggacggcaagatcacagcctatgactgtgccaactttgagacggaagcagagaataaaaaatacattcaggacaatgtcctttatcaccataagaccctgccgttgggcgagtttgcgatcggcactaacacgacggcttaccgcatggcaagagattatgacattgcggacaaactgccgatcctgatcgcggaaaagacaggaccgcattttgctgtgggtgatacctgttattcccatgcggaagatgtgccgatgtataacccggacggtaaggaagttgtagcgagagacaatagcgtatctttgctccgcaaggacccaaagaccgtgaaccaggcatattttaactgtcataccgatattaccatcccttatgatgagttgggcgatatcgtggtggaatgtgcggatggcagaaagatcaccattctttcacagggcagatttgtcctgccgggaaccgaggaattaaacgttgaattggaacgataaatagaagagacttacaatttaaggaggaaaagaaaatggctaaagtaggaattgtaatgggcagcgactctgatatgccgatcatggcaaaggcagcagaggtcttggaacaactggggatcgattatgaaatgacgatcatttccgcacacagagagccggatgtgttctttgaatatgcgaaaggggcagaggcaagaggctttaaggtcatcattgcgggagccggaaaggcagcacatcttccgggcatgtgcgcagcacttttcccaatgccggtcattggtatcccaatgaagacatctgatcttggcggtgtggattctttgtattctatcgtgcagatgccaagcggtatcccggttgcgaccgtcgctatcaatggtggggcaaatgcgggcattttggcagccaagatcttagcgaccagcgatgatgagatcttagagaggttaaagaaatacagcgaggatctgaaagatcaggtcgtagagaaagacgcgcgcttacaggaagtgggctacaaggcttatatggaaaaataataagatgcatgggactaggatatattaggatgactaatatatcctagtagtttttattactagaatttctaagacacaggttttataatgggaacagagatactcataacagcacaaaaggagtagtgaaaagcatggattacaaaaaagcaggtgtagatattgaggcaggttatgaatctgtcaaattgatgaaaaaatatgtgcaggagaccatgagaccggaagttttgggcggtcttggcggattttccggcgcatttgatctttcatccatcaaggatatggaggaaccggttcttctttccggtacagatggatgtggtaccaaggtaaaactggcatttcttatggacaagcatgataccatcggtattgatgcggttgccatgtgtgtcaatgatgtggcatgtgcaggtggcgagccacttttcttcttagattacattgcttgtggcaagaattatccggaaaagatcgcaaccatcgtcagcggtgtagccgaaggctgtaagcagtccggctgtgctctggtcggcggcgagacggcagagcatccgggacttatgccggaagatgagtatgatctggcaggttttgccgttggtgtcgtagacaagaaggacatcattaccggtgagaatttaaaggatggcgatgtactgatcggtatggcatctaccggggtacattccaacggattttctctggtgcgcaagatctttgacatgacaaaagagtctttggatacctattatgacgaacttggcacaacactgggggaggtattgcttgcgcctaccagaatctatgtcaaggcattaaaggcggttaaggatgcaggtgtgacagtcaaggcatgcagccatatcacaggcggcggcttctatgagaatatcccgcgtatgctgccggaaggcaagcgtgccgttgtagagaagaattcctatgaagtgccggcaatctttaagttgatggcagaaaaaggaaatgtggatgaacacatgatgtataatacatacaatatgggacttggcatgatcgttgccgtggatccggcagatgtcgataagaccatggaagcaatgcgttctgctggggatagaccatatgttgttggtaagatcattgatggtgaaaagggtgtagatctatgttaaaattagcagtttgtgtgtccggtggcggtaccaatcttcaggcgatcattgatgcgatagaagcagggcggatccatgataccgagatctccctggtcatcagcaacaatccaaatgcctatgccttggaacgtgcgaaaaaggctggtattgagggtatctgtatttcgccgaaatcttatgagaacagggatgcctttaatgcggcatttttggaaaaactggatgcagccaaggtggatctggtcgtactcgccggatttttggtcgtgatcccggagatcatgataaagaaatatcgcaatcgtatcatcaatatccatccgtcgctcattccgtccttttgcggaaccggctactatggcttgaaagtgcacgagggtgtgcttgccagaggtgtcaaggtgacaggtgcgaccgtgcattttgtggacgaggggacagatacgggaccgatcattttacaaaaggcagtagttgtgcagcaggatgatacaccggaagttttacagcgtcgtgtgatggaagaggcagaatggcagatcatgccgcaggcgatcgatctgatcgcaagaggcaaggttagcgtggtagatggaaaagttagaattgcggagtaaggagaatggcatgaaagtattagttgtaggcagtggcggtcgtgagcacgcgatctgtatgagcgtggcaaaaagtaaaagggtagacaagatctactgtgcaccgggcaatgccggaatcggtcagatcgctgaatgtgtaccgatcggtgccatggattttgataaattagttgcatttgctaaggaaaatgccattgattttacaatcattggtatggatgaccctttggtcggtggtattgtggatgcttttgaagcagagggcttaaaggtctttggaccgagaaaaaatgcggcaattctggaaggaagcaaggcattttccaaggatcttatgaaaaaatacaatattcctacggcagcctatgagcgttttgacgatgcagaggcagcgatcgcttatttaaagaccgccaagatgccgatcgtattaaaggcagatggtcttgcactgggcaagggtgtattgatctgcaataccctggaagaagccatcgaaggggtacataccatcatgatggacaagaagttcggagatgccggcaataccatggtcatcgaggagtttatgaccggacgcgaggtctctgtgctttcttttgtggacggcaagaccatccagatcatgagcagcgcgcaggatcacaagcgtgccggggatggagatacaggtttaaataccggaggcatgggaaccttttctccaagtcctttctacaccaaggaagtggatgaattttgcaagaaatatgtatatcaggcgacagtggatgctatggcagccgagggcagagagtttaagggtgttatcttctttggcttgatgctcacggaggacggaccaaaggttttggaatacaatgccagatttggagatccggaggcacaggttgtactgccgcgtatgaagaatgatattatagatgttatggaagcatgtgtggatggcactttagatcagttgacgctggaatttgaggataatgcagccgtctgcgtggtacttgcatcagatggttatccggtttcctaccagaagggatttccaatcacaggctttgataagttcgacaatgaggagtatttctgcttccatgcaggtacagccttaaatgatgcaggacagatcgtgacaaatggcggacgtgtacttggtgttacagccaagggaaaggatttaaaggacgccagagccaaggcttatgcggcaacagactggatctcttttgaaaacaaatatatgcgccacgacatcggcaaggcgattgacgaggcgtaaaaagaaccaaaagtaaaaaggtttgtgaaacctgggaaggcttcacaaaccttttttcatgtctggacagtaagcgaacatcagcggaactggttgctgtctgcttcataataataatcaatggctgccagtcgttttttaagatctgcctgatcgacattctctgctgcacaaaactctgcaagggatggatatcggtctcttaaattcatgttgacgacactgagcagcatcatgggatctagtggtaaattcattttcatactcctttataaacgaatgtgctttcttagacatatatattatatgtaagaatgtcaaatttgcaaatgaaaatgaatttactacaaaattatttagaatactgcgcaagcggtttctttaagagtggatacaggatggtggaaaggatcacaccaaagagtccctgcacgatgttgaacggaacaccgctggctgaggatgccagacctgcggcaaggcttgtgcttgagaaaccatcgcctgctgcgagtgccatcaaaaagatctcaaatacaaagtatccaaataccatgaaggcttcgccaacgacaccactgatcgcggtaaaggctgcctgcttgccaccggaaacttcggaaagtttcttggtaaaagcacggtaaactaggctggcaaatacagcggtaagcatcttgatgacaaaggttgccggtgcataggagaagtatccgccaaataagtcagagaacatagaaccaataccggctgcaagtccaccataaagtggtccaagtaaaaatcctgacaaaagtacaatagaatcacctggatggatataacccatggtaggtgtcggtaccttgatgatcatggtagcaacacaggtcagtgctgcaaataaagctgcaaaaatcaattttttcgttttcatatttttccctcttctttctcttatcttgtcaaaagtcttgcttttgtgcgagtaactgagtatcattatatgcataattggttatgtgaaaataaccattttaaacaaattcgaccataccagattaaaaaatactgaaaaacctagagaaatactaggaaaagccgatttttacgaaaaaagaaaaatagaggaatgtatatgcttacctatacttttgaggagaggggcgaaaaaccctactaccaatatttatatgaagtattaaaagaagatattgaggaaggaagattaaaagagggggaacacctgccgtccaagcgggcttttgccaagcagttgggactttccgtgatgaccattgccagtgcctatgagcagttgttggtagagggatatatctatgccgtggagaaaaagggttattatgtggcggcggtgcagccctatctgacagaacctttacaagaggatcctgcggtgaaaatttttattgagggggacgatgccagccacgaggaaacaaaggcaaactggcggatggattttgcatccaaccatgtagaccgggaacgcttccctatgagtacgtggtcccacctgatgcgtgctgtattaagtggccaatcgaaggatgtgcttttgccgtcgccaccgcaaggtgtctatgaactgcggcaggcgatcgcggaccatctgtatcattttcgcggtatgcgtattttgccgaaacagatcgtgatcggtgcgggaaccgagtatttgtatcatctgctcatccaacttttggggagagaccatgtctatggcatcgaaaatccgggctatcaaaaactggcgaagatctatgcgcataatggcgtggactaccgctatgtggatctggatgcgcatggactttccatggagtcgctgagaaagcaaaaggtagagatcatccatacatcgccgacccaccatttcccgaccggtattgctatgcctatcagcaggcggcagaagttgcttgcctgggcagccgaaaaagagggacgttatatcattgaggatgactatgactgtgagttccgttttggcggtctgcccattccgaccttgcagagcattgatggagcggggcgggtgatctatctgaataccttttccaagagcctgaccccctctatccgtatcagttatatggttctaccccggacgctggtcggaaaattccaagagaatttaggcttttatgcctgcacggtgtcaaattttgagcagtacaccctggctgcttttttgcagcagggctactttgaaaagcatatcaaccgtatgcgcaatttttacaagaaccaccgaaatcaggtcattgccaaattaaaggaaagccgtctgtggcagatggcatccatctatgaggaggatgccggcttgcattttcttttacatattgatacacaaaaagaggacagcgttatcaaggatcagttgcaacaaaggggcatccgcctgcggggtatgagcgattatacctatgacggcagtcaggtgatcccgcatacatttatcatcaattatacggcgatcgatccgcaagacctgccagaagttctggaagaaatctatcaggtttgtataaactaactattgtcttgtagaaaaaacatgattttgcgcgaaagcgattgaaaaataatccaagcgtgttagaatgatggatggaaaataagaaataaatttgtatgaaaggaaacagttatgtttggatttggacagttaattgacattttaaaagaaaacccaaagaagatcgttttcacagaaggaaccgatcctcgtattcttgaggcatcctcaagacttcttgcatctaatttcttagcaccgatcttgatcggaaagccggaggaagtagaagcagcagcagaaaagagtggatttaatatccgtggcgcagagatcattgatccagcaaattacgacagaatggacgagatgatcgagatgttctgcgaactgagaaagaaaaagggcgttaccccggagcaggcaagaggcattctttcacaggcaaactactttggtaccatgcttgtaaagatgggcgttgctgattctttacttggtggtgcaacttattctaccgcagataccgtaagacctgctttgcagttgatcaagacaaagccgggcaactctatcgtatcttcttgctttatcatggttcgtccagctgctacaggtgagaacgaagtacttgctatggcagactgcgcaatcaatattcatcctacagaggacgaattggtggaaatcgctggagagacagcagaatgtgctagaatcttcggtattgacccacaggttgcatttcttagctattcaacacttggttctggaaagggcgaagatgtagataagatgcgtaatgcagcagctaagacaaaggcaaaattcccgaaccttccaatcgagggagagattcagtttgatgcagccgtttcaccacgtgttgctcgtacaaagtgtaaggattcagaagtagcaggtcatgcaaatacctttatcttccctgatatcaatgcaggtaacatcggttacaagattgcacagagacttggtaacttcgaggcatatggtccaatcttattaggattaaatgctcctgttaatgacttgtcccgtggatgtaatgccgcagaagtttactctatggctatcattacagcagcacttgcataaatcatattgtaagtaatacaaaaggcgttctgcttatgcagagcgccttttttgggagtttcattatgctgttataaaacaacttcgaaaagaagtgcttttataattcacatgctacgtcgtaagcagatttgattgcatgatcaatgttgcttggacgttcgccggcacagtcaccaacatagtggattggcaatgtgcaattgtttaattctgcgacattcttctttgcaccaacagccataacaacgaaatcagaagcaacttctgctttttctgtcttttcgtcaactgtcttttcaacgataaccgcattttctgtgatttccatcaatttagcagaagtgagaacttctacttcatggctgtttaattctttcatcaatgtaggaagaacggtgttgctttcttcttttgcaatctgatccatcatttcaacgatggtaaccttgcatccgcgagaagccagatattcagctgtttcgacaccgacaagtccgccaccgatgacagataccttgccaaatacgatttctttctttgcaagaacatcccatgcactgacaaccgttggaaggtcttttccaggaactgggatgatggcattcgttgcacctgttgcaacgatgacttcatcgaaggaagcgtaatctttttcactaaattcctgaccaagacggaaggtgacatctaattctggtaatacgttgcagtagtagttgatactacgcatcatttcttcttttcttggtggaacacttgcaatcaataactgtccaccaatctgtaatgacttttcaaaaatagtaacctggtgaccacgcaaagcagcaacacgggcagcttctaagcctgcaattccggcaccaacgatagcaacacgttttgcagtagcagcaggagtaatctgacggcttgcttcataaccattttctgcatttaaaacgcagcttaagaatgcacggttttgaatgttgtcggtacaacccttgttacacatcatacatgttctgacacaaccagcgtggttatctgcacacttattagcaaaatcaggatctgcaagcaaagaacgaccaagtgcgataatatcagcagaaccgctggtaagtacagcttcagcagcttccggagtcacaatacgtcctacaacggatactggaatcgaaacgatttccttgatcttcttagagtaagaaaccataaagccgtatggctgtgttcccatagcaggaatggtatcacccatatttcctgtgtggtttgcctgcgctacgtgaagggtgtctacgccagcagcttccaattcttttgcaaaaatgcaagcttcatcaaatggaagaccacctttaccacggaatgcattttcgccgagtggagttacaataggaagtttataatcaatcaccatatccggaacaacggtctttaaacgttttacgagtgttaatgcaaaacgtgtacggttggcaagatctccaccatattcatctgttctgtgatttaagattggagagcagagagaaccaaccagacggtctccatgtacttcgatacagtcaacgccggcttcttgtgctaaaatggcgcagttttccatgtgcttgatgatctcttcgagttcttctgcagttacttcgtttacaaaatgctgcatatcatgatgcaattttgctcttgcttcctgcatttttccctgatggaataaatcatttaatgcggcaacgttgtaatccggatggaataactggattccaagttttgcaccattttcgtgacaagcatctgcgagtcttttgaatccttctgcctgtgcaggagaaaaaagctttggtgtaggagagaaggttgcaagaggtgcaacgtctccgattacaatataaccaacaccaccttttgcgaggcgttcgtaaaagcggaaactctgttccccgatagaaccgtctttttcctcatatccggttgtaagcggagggaacatcaagcggttcttaaaggttgtttttccaactgcgataggttctaatagtttcataagtcatacttcctttcaagtctgtttcatttattctaatgcctgcaagaaggtaagaatagattcatttaattcttttcttgcagaagcactggcaaagttatggtttgcaccttcgatggtctgataggtgcattttccagaataaagtgtttcatatttgtggcaggtagcatcgtctactaaatcatcagcggtaccacgaacgataaggacaggaccttcgtaaccaacagcggaagaaaacggctcgtactggtataaatcatgattaaaagatgttgcaaagcaaagtccttcaatatcagcacttgtgatgccttttgcctccatagcttcggcgcgttccttacatccaaaccacataccggcgcccggacacatgagaatcaatgcgtaagggtttactcttggagcagcagtagcggctgcatagccgcccatgctctgaccggaaagaattactttttccggatcagcaaaatcctgctgttttgtccaatttataatatcttcaatatcttcaagaatgccggtaaatgtcatatcttcaaattctccatcactctccccgtttccgaataaatcgaaacgtacgctggcaaaaccatgctttgcaagaaatcttgccgtttgcgtataactgtttttgtagccactcttatttccagtaaagccatgtacatttacaatggcaggaaaacgtgaaccctcatctgggatatctacaattccgcgtaaaacgtgaccggaacgattggtaagttcgacttgtttgatcaatgtgatttacctcttttctaaaaattattcagcgtttgcagcgtttctcttatctgctaactgctgtaacatttcttctgttttttctttggttaatggatatacaaactttaatacaagtacagctaataagtaaccaacaacatataagccggtataggttttccagagatgtccagcgaaagcgtcactctgtacttccagatgtacgttaaatccagcaatcgcaagtgcgaaactactcatacttccagatactgcatttgcaagcttacggaagaaagtgtaagcagagtaaacgataccttcgttacgctttccagtctggagttcctgataatcaatggcatcatttacaagtgcccagatcaatacctggaaaccgctgacaccgagatagcagataccgttgatgatgataaagagcaaaggattcttcattgggaagaagaataaaatggcaaatacaacgacagagaaagtagcactgtacataatccattcttttttaccaaatttctttgcaacaaacttgataccaacgaaagcgatgagtgaccaaaggacacttaacataccagaaattgccatgatagcaacgtttccaaagtagtcacggaataaataagtattcaatccgtttaccatacctgctccaacgataccgataaagcttgataacataacaccgagtaaagctttgtttttggtgatatcttttaatacttgtaagtaattgagtttttctttttcttcttttataggttctgtaatgacacgttctttacaccagtttgctgtaatcatcaagcagatgaaaccgatgatggcacagacagcagccatcatcaggaaatgactaggtactggctggttatccttgtaaaggaataatggaccagcgataacgataaccgtcatgaaaatggttccaccaagacttctatagcgggaaaggtctgtacgctggtttacatcgtctgtcataacactggaaagacttccgaatggaacgttgacgcaagtgtacataatttcatatacaacataagtaatgaacatatatgcaagacgggcaccatatgcgaagttgcttacattaacaaatcctaacacgcaaagaacagcagttgggaaagcgaaaaatttaatccaaggaataaatttaccttttccggtgtttttgtggctatcaaccaatgcaccgatgagtggatcgttgatggcatcccacaatttggtcaccaacattaagataccgacgtgtactggatttacttttaataccaatgtgtaaaaaattgctagatacatagcacggaattgttccgtacagcaacaccctaaat

SEQ ID NO: 12469 - DNA, 37570 bp, Unknown
  gut microbiota DNA sequence
aattccctcatgtattccattacagtattgcccataccaattatcagattctcttgcaaaaatatctgtttctaacttctcttgttgctcccttaactgctccacaaccttatctacatcataggctgttggctgttcatcaatcttttgtgccaacgcatagaacatatcctcgctgtttctttgcgtaagaagaatatccataaaccattgttgatataattcttttttcaattcatctgcatcaatcattctcattgtttgtcctcactttctataacggacgcatatttaattctttcagttttgcttctgctgcggatcttgtgaagaatactgtctttccaatttcacctacttctgcatcgattgcatttgtacaccaatctgtagggtctaaatcgtattcaggaacaggtcttctgtacgggaaaatatcttcatctgttacaagcgaaatatatgcttttccgtcaacaggatttatacctaagccgcaatgggtgcactcaaccacttcatcatcataaataagatatactatgtctcctgattgcgtgtacacttctttgcaaggcaacttgacaagcctgccctgttcttctaagtcctcatattcttttagttttcgatatactgcgtctatttcctcacagtctggctcgcaagcatttccccataattcatcatcaatccatgctggattgctttctgttaatctctccattactgctcctttctaccacacagggtaataatttcctttatcatccacaacccaataacctgtactccaagcatcagttaatgggttgtagacttttctgcctttaatcatcctttttgcctttcatattcttccatagttggtctttttccatctaaatcattccagttgtaaagtttgtgattttcatcctgccattgacttttttagcaatttctacaactgcacctgccacttagccaacgcatttctccgtaatactctggctttccacaatgcttgcaaattacaattttatccacattcttctcctttctaaaacggacacgcatttttactttgcatttcattaagcatatcttccatttctttaataaatccatcaaagcaatgctttataaatttttcttcttccgaagtgtacgattttcttaaaccacaatacccaaaatcttcatactggcatttatagcagtaatcaacgtgaagtatctttgttgcctgcgaatacaattcccacatttcctcgaaattatttctacactttgatttcttggctttagagatgtaatgccttaatgcgttttgttctgtcatatatttttcgcctgtaatcaagtttgtatatctactcaaaacggacattcatctcctttccttaaaatccaactcttgccctgttctgcaacatctacattcgcctcattcacggcatttttcattttctcaataaaactatccttatcagcattttcgcttgataaatggcacattatgacattttgtaggctgtctgaatcgttagccttaacaaaatcgcaggcggtatcaatgcttaagtgacctctgaaaacgtgattggatttcggattgccgttatcaactaaatccttgtcataattcacacctaagagaatgtggtttatatccttaaatttccacttaatcagctccgtgtcggttatgtaaagcaatttacccatttcttggtgcgtgattaaaaatccataacacggacattcagtaccatctgcgtctgtatgcgtccatctgccatctactgttgttaggtcaaacgattgtattctgaaagccccgctaccgattgccattggtttttgacttatgtatggtgcataaatcggtattcccatagccttaaattcgtttaatgacttgctatggtcttggtggctgtgagtacatatcgcacccacaacacctcttatatcccagttcaagcctttcttaatctccttaatgctgattccgcaatcaaggataagtgtttctccgttgtcggaagttaaggtgtaacagttccctgtgcttcctgttgcgatacatttaagtttcatatgcgttctccgtttttagcctgtcttttacaccaacaatcaatatacctattttcatcttcggctttaggaactaaatatttcctgtagcgattaattaaaggtttcatctgtttgttgtaaacatcctcgttaatatagttccatatatccatataaatcgtgttatacttaatcagtggcttatattcaaacacatcatcattcacaatgtttactttgaaattaagtggtaactgctttccaacaagttcaatgacttcacgattcttctcaacaactgttatctgcttaacatcttctttatcctgtattgcaagaataataagacctatcccaataccaccaataagaacatttccgtgtgcattgcgaacaaaatcttcatttgttttcttttccataggtgtatcagacattacacattcacatccgtttacaagcctcacgtattctccaggaggtattccgcatcggacagttgcataaaagttattatctgaaatttcgtaatgttggagtttgaagtctccaacatgtccgtctttcagtatcgaagacatatctttatacatgctcatactcacacctcgatttcatcatcctgtgggaactgaaaaacagcattgttgataaaatctactcttgacggctgattttccgtttgcaccataatgccacttttctttaatctttcaaattcccttaccacatcttccgaaatatcaacattctgcattacaataggcataccggcatatgcttctctaagcatttccatagcctttaaagccttttctttacttgaatactctgctaacttcgtgccgtgcggtgcggataagttgtggcaatagatacaagcgtattccacatctttgtattttccacttgctacgctcaaagaaaagaaattgtacggcacatccattgttccatcttgattaattattctcatagaactcctttctaatattcaagatctataatgatatgtggtttcccaaatccgcccctacttctcaaatcctcataatcacgaatattgtcataatctaaatcatcatcaaaatcagcggtaactgtcacttcctgcgtatcatttgcactatctctatcaaattccgcttcaacatccgtgtcaaaacttcctttaaaatgaaatctaacctctgtatccgcactataacttgataatttctgtattaactcatatactgtcataattcattctcctattctgcctgcatgaatggtggcaatgtgctatcttctgcctgttcttcagttacttctccctgtacaacctctgtatctgctacaacatccgcatcctcaaattcaaccgaattggcattgtttgcaatatcgtattcaaaatctgcctgcatacgctcgtcatatgttggaatatcctcgtcactgtcatagtttccgtcatagaacgaaccataggtattgttaatctgttttaacagcctgttcttaacagttttcatagccatctgatctgtgaatttctgatgtgtaccgcttccgttctctttatagccaaatccttgtttccaagcctgcttaatctgcttgatattcataacctctgtgagaatgtttccgtcatccatagtggctattgcgtatgcacccttgactttatcgttgtcgatattctcaaaatcctgcttgtgagcgacaatgtgcttcttgccattaacaatctcatattcaaatgtgtcgccctcatagataacttctgctgttatatctttaagtccgtatctcctagcaatacaagtatttccgtacactgatttctgacactgtaacttgccaccataagcaaccggatagcactgtttcttctgcattgataaaccgcttgtaaccatttccacaagtgcattttcaatacttgcccttgtacaactctgtaataccggcttcttgttgctgtctactgtgtcctgtaaaatcagcattgccgacataaattcatttgtataattgtaatctttaggaaatgtaagtccgaatttctctttttctctgactttcattaccattccctctataaaatccttagcgacaagttctctcttttcgttttctgctgctgttgtttctacttttgccatctctattcctcactttcaaataattctttcacatacaaatccattgaatgacacaactttatgcaatttccgtgagataaatgatttttacaagcatcatatctttcatagaatttttgttccgtcattctgccggtttttaccaaaccaacccacattttcaattttttgtaggtctttcgtttcttttctccacttaccttgcggatatactttccatcctttgtgatgtaatggtggaatcctgtgaacaaaattccatttttaaaatgtacaatttgtgttttcccattaagagacaatccgagagttttcacaaatccccttatacactccaaacaccacttcaaatattccttatcgtggtgtatcaaatagaaatcgtccatatatcttccatacagacaaattcctaattctcctgttatcagcctgtctagtccattcagcataagcaaagcatatacttgtgccacttggttccctagtggcaacccaagaccatctgtgctatctataaacaagtgatttagccattttgtataatcatcacaaaaataatagtcaactatatctttcagaatttcgtggtctatctgatagaaaaattttgttatatcacatttcaaaatccatccgtcaagtccgttcctactataaaaatcaagcatctggtctttcagacaatccattccaaaatgtgtgccttttcctatctgccctgcataattcgtcaaaataaattcatcttttaatcttggatgcaaaatgttatcgcataagcaatgttggactaccttatctttaaaagaacaagatttaatcactctctctttaggctcatatatattaaattcattgtacggattcatccgatatgtctgattttcaagttgttcttttaacaaatgcaatccttcaaggctcattgcttgaaacttagcacaacttccattaaatcccttgccagattttgctttgcgatacgctttatataagttctcaaaatcgcagataacatttttatcatccatagaatcaatacctttgtatttacccatttagggaaggtaacacacttttttgtatctttttctgatttcggcttattgcctactcttactgtctgtttgatacagaatgggcgaacaccgttgttgttgttgtaattgttgttgttgatgtaaccggacggagaaacaaccgctttaacagtatgcaacctttataattttacctttccttatctttggttctccaagcaatagccatatgttttacatccgaaaccatcttcgaccaatactccatactttttacattgattatgttcagtttcatagaaagttctatgtaaaaaagcaattcatcgcattttgttattgcttttgtttgaagttctgaacgctccaggagataattcttaatatcagtcctattcgcttcatacaaattttcatagatttcaagagatttattttgcatcttatcaaccaacgaaaatctatacttctttgggtatctgttacaattcgatgtgattcgcaatgtatgttccgctaagtcttttgcttttaagattactctcaattcattatcagccatttttattcctctgattcaaagattgcagaagaaaagatgcaaaatgggcgaacaccgaagctgctgcagtaattgccgctgcagatgcaaccggacggagaaacaaccgctaatgaatacttccatccgcggttttctgtactccacggtgtcatagtccaccaccaatcgtccaaatctccattcacaagaaaatcattgtattctcttgcttcatcaaaagtaagcaaccgaacacatccttgccaaggttcaaattcatcctgcatatctacagaggttaaatgaactttgtgagcaacaaggttttcctctccaacttttttttcaatccaaggctgtatttcagtttcaataatatttttgatactcgatttgttgtattctcttgtattttcatcaaatacgacagattctttaaacaatcctttggaaataacctttgtcccattgtctgtgtgttccaaaacaatgaaatcgctttccccaattttgaatgtttcgcccgggaataatgccgacaaaggcactttcttattcttattctcattttctttttcttctgcttctaactttctgacaagttctcttgccatttctaacgcttcactcatttttatgcctccacaatttctaatttttcgctgtcatttacaagtagcataatcaactgactatcaaccatatctgatactttcttctgattctcggaatcaaggctttctgaatcgtctaaccagataggacaatttatgccggaaatcttctggattgaattgcaaatatcaactcttcccaaaatcctgttccccttgttgctcatagtcgataagatgctctttccgtcaactgtaggtatgcaaacagacttgtaatttccgttctttgcatactcaaacaactgccacttaacaagtgagaagtggctgttaatgctgtcagataatgtttcattcttcgccttatccagttcatcgagcaaatcaaggattttttcggcattagtcttattctgttcgctgtcaatttttgacttcctcaactcctcaagcctctgttcatcctgatctgtatttgcactggcaattttgctttcacactctgccaactgctgccttaaagccgtttcctgtgcctttaattcagcctttacggatgaagtatctgaagcctgtagaagttctttttccttttcagaaattcttttttgaatctccttatattcatcggtgcccgaaatatcaatctctgttggcatttctgctaactgttttttcagttctgtcaacttttcatgaatagcagccttatcatgtagcagtttttctttgttctgctctaattccgcaagaatatctttctcattttcgatctttgactttgcatccattccagcatcctcaatcttgcccagacgctctttcttggacttcttaaaatcgttgcgcatactttcgatttcatcttgcggtaattctcggtggcaagtagggcaaactgtcgtactctcgtcaaatacttctcgttcagtgttagcccaaacgaccgacagtctatttttttcttcaatctcccttgagatcgttgcttgacagtcagaaattttgatttcaagggcatccaaatcgtatttcacggacgataactgcgatctttcctgcataatttcatctgaaatgtcgctccttttcgcatacagatcttcattggcttttttctgcaagtcacttgccttggtctgtaactcaaataactccgagttcgcctggtcataactttcaagcaacttgtcctgatctgtctgtttttctaaattctctgcaatccgttctttgaagtcattcctctgtaattcaatggcagaaatatcaacatcctgttttaactgtatgtctctttccttttccttaatctgaccatctaaaacaggcaaatcctttgtgatttttgccttggtagccttattcatagccgataattcttccgctgagtatttcttcaataacggcactaattcggctaattcggctttctgtgatgcaatatcaatatctgacacatttccaacaagcccaaatagatactctcgcatttctgccggtttctgattgaggaaagcgttcacattgctgcacattttaaacacattcatatcaacatcaaggtatgcgttgaaatccttaaggttcttctttacatcattgacataatatgaattatcatctttatagcctgtcttatccttgttatatgtacgaacctgcactttcttcatagttatttcttttccgtcaacatcaagtgtaagttcaacactcgtatccatatcatcaatggattttccatcgacttctctcctaacctgcggattgtctcgtaactcgtaatcgcagttgaaaagacaccacagataagccgttgcaatggtggattttccgacaccattcttagccataatctttgtaatatcaaagaactcaaatactgcctgcgcgtagcacatgaagttctctaaaactacttttttcaacttgattttcattctctaacctcctcaatattgttcaatgaaatctcataggtaatctttgttacccagatgccatctacattcttgtcgtagtatctgctctggaaacgtcctgtccctcgaacctcggaaccgatagaccagtcctttaccatatttgcgtatcgcccccatgccaaacatgggatataggaacttttgttgtatcttgcctcgttgacagccacaatcagatcactgatgcttcgccaatttttctttgtttttcggaaagtaggttcctttgcgataaatcctttttccagttcaacacggtttacatcgcttgcgctatccggtgcattatctaatgaattacaccagacatacacttccaagtgttttttatagttcctggttcggatttctccgaaaacatgaactttatctccttcgtttaaccccggatggctatccaagaagccagaaacaatctggcatgggatctcgtccacaactccgctattcctcgcggagcctactgtaaacttataaacggcttccccatttctcaaattatgggaaaatgaaataccatcttccatgatgtctcctacaatttcgatcttcatggcgctattcctctgtaaatccaacgactacaccatcattgataatcgttgcctttccctttctttcgtaattctccaaacaatcttctaatgtaatgttttccatgttcatttcttctcctctctgttcttcttacttctttttttctcgctaacgatcacataaatgcaatatgtgataaatgcagccagttcagatgctactgttgcaataactccacaccaaaacggatcaatatacatcttcatactcctttcatttgccgtgcagttcttccaattcctcggcacgttctaagaccttggttgcataactagaaataattccattttcatagttatacattgcccggctgttgccgttatatatgtcaagcacaagtgccgggtcttgatacttatcgaaaagttccgaaaggtaatctgccgcggtcaaaatattgtcatattccgcatacaaatcactcactcctaatttttgcatccggctactatgatatttgctagatacctgcatcaatccaatgcagttaccatttctagccgtagcctgtccgctactttctgtctcaataacagccataagaatttccgggcagatattgtatgcattcccgatttcctcacaatagccatatgcattgtcggaaatccaagtttccctcgtgtcagccgttgcaatgtttccatatgcaaacagacatataaataaggaaacgataggtataattaccatgatttttcttctcatctttttaccccctgtctagccatttccaaaaagccatatcaaagataaccacaactgcgctcataattgcacacatccgcctgtctatgttcgtgcaaagaaaaagtattgctggtaaccaaaggaaagccattgtgactaccacgatcacgacatttaacaactttttcattctgcgcctgctttctcgacaacatccagtgcctttttcaatgctctggaaacataatcactgtctcctgttgtgtcaatctgcactcgatatgatccgttttggcttatccagattgcgagactgctttctgcccctgttctggttttttctgactctttcaatagccttttcgagttcttcatagttgacctccaacctatcaatcctgtctttagttcctcaatggcaatttcttgatgaatgcaaaaaatatcaaaaaaagttctgccacaaccattgctacaatgtagaacttctcaatatccgtcattcgctacctcctacaaaaatgattgttgcgcatttgcatcactaatgagattatccagatacaacggaaccgaatacgcatcaataaactcgtgaacatcgtcaatgtactttctcttgatgctcttgtatgtagccacacatccgtattctctctttaactgcgtccatatatcggagaaagtcttatttctaatacttccatcccgatatgcttcactctgcttaccaccgaggattttcacaactctgcgcttaacgtgctgttgtatctcgtcaatgtcgcatccgtataaaggcatatcattttctaagtttccgattttatcttccactcgatcaacacgctcgctaagttcttcatttccctgcgcaagcaactgtatcttttctgccgttgtcataggcttattgtaagagcctgtttttctgatggatggaagaacctcatccattacccaactttcaaatctctctgctgacggcaactttgatttcataatgaggcgatacaaatctccctcatttatgtatgacatctgttgtactccactagatgtaggggtgtcacgtttcgttactcccttgcaatgatcattcactgcctttcgtgggtttacatatccgagtgctgttgccacatcggtagccacgaagtacggcttgccatcaatgtcaatcattcggatttctccaaactcttcattattaaaaatctgtaacttgttcatatatctcctttctgtggtataatgataaaaatacaatttggaggataattagatgcaaaatgtaaatagttcttactggtcaaccattatttctgcaataacgcttattgttgcaatagtatcacctgtccttgtaacaatattaaataatcgccacaacactaaattaaaaaatttagagttaaaatatgagaaatatatttcctattatcaaaaacaagaaactgtttttaacaaattcattaactacgcttcaaagcaattagaagccaattaccaaagcgaacgcgttgaatatattcattgctacaacgaattgtttttatatactcccgaaaaatattggaaagattttgaagaacttaataatctaataatttcaagagaaaaagatgatgcaaccgaaaaactatcctccgtttctaaaacgctgggagaaatcctacgagaatctgaccaattattcccaaaactatagtaaatattaacccagcaatcttgaatccatctttagaactactatgccaataagacatgcaacatgttgaaatcgtaaaagcaaatatcaaaattactttccatattttgaagcaaagcatttatattactcctttccaaagttaaatattttgaacttctaaagcaaaaaaataatcctgtatatcatcttctgataaatctaataatttaattgcttttaaaatttcaacctgtttccaaggtcgcttacctgtcattttaagcgataaagttctatccgaacaaccgaatgccttagcaaagtctgtctgacttccatacttttcaattatgcgacctcttaacttactgtaattaaaagccattccaattcttctcctttctctgtttttgttcaatgttttgaactgtttgtataatagcattattgaattaacatgtcaataaaaagttcaatattttttactttcttagttttatgtcttgaacttttgttcaaataatgatatattatcagcagaaaggaggataactaatatgaaagagaatacatcagataggcttaaacagttaatgaatgaacggaagttaaaacaagttgatattttgaatttatcattaccatattgcaagaaatacaatattaaaatgaataaatctgatattagtcagtatgtatcgggaaaagttgaacctagtcaagaaaaactagttgtcttaggaatggctttgaatgtgtcagaagcatggctaatgggatttgatgtttcaccaatccgtaaggacaattcaaaagaagctgaaaaagatgttgatttactttggaagttttctatgttagagcaaagagataaagaaacgatcttagatatgatagatgttatgttatctcgaaaagaaaagaagtagggtttacccccacctctttaaaaaattttctatgaatgaatacaggtactctaatgtgcctgtattttctattttatttataagttctattaacttatctttgtaattttcctcattactattatccataaacctgcacttccctctcttgcccttgcacgtttgatagcgataccgttattatagaacacacgttctataaagttaatgaaacattttaagggacggcgaaatgccaatcacaccgcccctcgccaaaacttgaagcgcaaacttgattcgtttgcaactttatcataattctttctcttgtaaattcttgtcgtttcctgtcgattatcctcatgttttgccttatctattcttaaaaaaagtatgggtgagaactttattcactaaacttaaagatggaattagtcagatcccatgttggcatgatcgtacaatctactacgcttgacacggaaggtaaggtgaaagccatatatggcggaacgtcatggtctaggattgaaggaagattcctacttggtgcatcttccgcttatgctgtcaattctatcggaggtgaaactgcgcacactttaacaacggctgaaatgccatcacataatcacgcatcatcaacaagaagaggagcaataccctgttgggataacaaagccagttcaaccggtaaatattatggactttacgacggttcactggcgtatcaatcatcatatgcttacgatataagtgcaataagtacaagtcttgcaggtggaaatgcagctcataacaatatgcctccatataaagtagtttatatctgggagagaactgcataattaaaatgttccgccataaattttcgctgggatcatcacatttgcattgccatttgcgttgtctgcgctagtgtcgacgataccatttccaaaattgatcgcaccgcttgaaccaacgcttactatacgacgtaagttgattgcattatatgatgatccggtaatggtattcttggcaacatatccaggaatacaacacaccgcagtgtatgctttgacacaccgaattagtcggctcccagtgtaagttgtcgtcgctttaaacagaatatccacatagtcatagtcgctaagatcaagtgtgatggtctgcgtagcgaaacttttagtggtatcgctatttgaccatagaagtttctcgcgagcagagtccatctttaagtttagtgcttctatgtccgccgtatttttgttgatcgacttgtttgttgcattgatgtcatttgcaccgaaactcgttcctgtttccgtatagtcggtcacatcaacaaatgatactgtgccatcatcattttttatctgttgatactttcgcaactgatttgttgaagcatttaatttgtcatcaacgtagtttgtctttaaatctgccataatttacaccttaaatcctttctgaccgccaagcgtaaatgcaagtcgtctttgcgcttttctttgcgctaccaagttttcgtacaattttaattgcattctctcaattctattgtagtcatctgccgttggaacatttctgttctcataccatgtcttttgcttatattcaaatccgtatgtttcctcatctaaagtgaataacgcttgttctatcgcatttatttcgtctgcatagacaagatccgcttcatatttctcggctcctaagtctacacttgtgacttgatacatttgcgatgcgtacccaattatgaacagcgtgttattttttatcctgttgtaatcaatgtatgagaagtaatctccgacataggtttctccatcccacgcaccagaccaatcaacttttggttctgaccactccatatctaagcctcctcgacatttccaaataattcaatgtatttgtcggtatcatacaatcctagtagttcctttacttcgtcttccgtctttggtacaacttccccattcgcatacattaaaaagtaatttcccttttttgttttaaaaatacgtctgttattattctcatttaggtaaatctcttctgatgtgtcggtgtcgtacatcttaccattgataattttcttcaatgtaatactcctttctacgtcctcattgctcgtcttaacgcaagtctaccagttaatgaaccgtcaaaatcaattctgtgtgtctcaacctctacttgaagattgctcaaaacatcactctccatacggattatgtctccggcatctattcttggttctcctcgatactccacatcataagaaatattgtttgcgtagtaatttccaagccattcagcaatcattctagcgtgtgattccgtggaaattagttgattctcgcaatacttcacttctcctgcattattgatgttcctctttaggtaaaccgcatcttcaacctcttttggttctcccttttcgtcattctcaaaagtaaatatcttaacaagaatgtcctttgtcttcttctctgcatatcctaaagggctttccaacatagaatccttagtcaatgtataatcagacaaatcgccaaaggaaatattatcaatcaggaccctattgactgggtatgcttttgtgatttccaactccatcctgtcaaaattctcaaattcatcattcagcaatgacttttcttttaagttcctatactcaaaggtattcaccaacttgtcattgttgtatgtccgaattttcatctctttcggcggatttccttggaatgtaacatacacaccataatatgtgtacgccgcaggaagtttgattgacaataccgggttttcttcaaatagtccgtctacatctgaaacaaggcttgtgacatatcctgttttctcgattatggtactttcattccttggaagaaatagttgtgaaccatctaccctcataaagtgccttgtcaaatccgcatatacgttattgccaccataaagaacatttgtggcattgctccaccaagattgtgcattagatgtggctgtcatatcctctgggtcaattacattcgcaaaattcgccttaatgacgactcttccatcttcatcttggtaaaatacacacctagttgcattacaaagcaactgtaggcactctctgtgtggttgctttggcataggattatgtagggtaatatctcttaaacaatcatctatgacatattcgtcgggttctaacccgaagtcttgcaaaatatttaatgcctctgtatatgctgtcctgtcatatatcttgttgcccttgtcgtattcatcttccattgttgcgaatatatctgtagcagaaaacgacatcttgtttctttgctgcttccaatcagacaatagcattgatgatttttgcatccattccacttgtccgtcatccaatgtaattccatacgacaatgttatcttttgcccagtctccaaaaaattgataaacgaattactatcatccacattgtagacgttgttattatccaagatagaaagattaaatttttgatatgggatttcattcgatacaccattcaaaaactcttcaaatgaggaactaaccacatcattattcgtgtatgtgagtccgacacccatcactactttttcaagccgaaatctttgctgaccgccaaccattaccaaaggtatgatttcaatgtaagtggtgtctcccaatacatcagatgtggtaaattcttctaattcgttatcgtaacttaattccttttgttcagtaacgattttgaattttgttgggtaatatctcccaaatttcaatgtcaatccttttatagaaaactctctcgggaaatcaatccttatcctaccaagcaaatcctttgtcgttattggagaactttttaactgatacaaaccagcatttacctttggcaaaaaatacattgaaccatcaaccctcatataattttgttctagggttgcgtattcgacgtaattagcatcatttctgaatggtagtgacttattgctccaatacgcataatcaccgccaaattgagccgtattttgtgcatcagagttgactactcccaatgtgacagaaatataagaacggtctcttattttcttttccatagcctctttataggcatcagaaacctttttcatcggctaatcatcctcccagagacaatcaatcaaattgaatttgcaagtctcataattcttataaaaaataccattaagaaataatggttgaccggaagtatcgcctgggtacatcgtaatggtatgacgtttgttgtcatccccggtaaatgttacaggaacatagaaaggttctagggcttgtttcatttcagcccaagtctgtgcatctaatccattccattgtaggttattgattttccatactttacgtcctaccttttgacctatgaccgccatatttgcatttcttccagcatctacattttgtgaatgtactatttccatccccggtgcaggacaagggaacctaacaccattcacaataagaaaatctgttgctcttgctatcatattgcactcctttacctatttttgagtacaaaaaagacacccacacaacgtagatgcctttctgactaatcaaatattcttccacaactgttacatattatcctcttttgtgtaacttggctttcctctctaatgaccttttcttttttattgtacagtgttaatggcttaaatggattgatgtttgctttatatgttgtctttgttttgccaggtattgtcttttcagtaacataccatgaacaattatcgctatggcaagacggacaatatatttccgtctttcttccactccaatcgcatctatatatgcctttgaaattctcattcttatgtggctttgctttttccttttgtttttcttggatatacttttcgtcacttgtttttctataaatggcatcaaacctgtttctctcgctgaaaaatccattgttttccatgatttctttaaacaacataaggttttccgcatcttgtttgctctttggatatacatcataaacacctgttgtaaatcctttaaaagcattattgatcttcaatccatagcaattgaagatttgtttggcaaaatattccaacgaaaaataccatatgtaatcttctatggtttgtcgtgaagataattggacttttagtctgccatcttggatagatataattccctcttttgtttcacaaaatacgttcctcttatctttcaatccgtcatatcttcgcttgtctatctcgtcttgttggtctttctttgctttctgctccaactgtttcgtcaacttgcgtctttgctccgtttgttcttttaggtattcctctattggaaaaccgcaattgatacatacatttgctttgtcagacacttctttgccacaatcgggacactttatcaaacccataataacacccccataagtttttgctaattgtaacctacttatggggatatttcaagtttaatagatgatttgcaatcccatctgcttttctccacgtctgttcgcccttgcaatgtctcgatctcctatgtgggtcgagaaatctttctgcaataactgacgacctatggaaaccaactcacgcattaccgctagttcttcctgtgatgtcgagtagaccgcattggaaatacctgtgatttcctgtccgctacctaccgctggctttccgttcatggttccgactaactctgggatgccatgctcgttcgcaaagaacaaatctccgacttctggataaccaccattttcaaatctcggtagacttacttttggaattaggtctacaccattccacttattgcctgtaatctttgcggcaaccgatacaatgttgttaaatcctttcagaaacgtgttcactgcatcaatcggactgtttatgcccttttcaaaaagccagataatggagttcaaaattactttgaacaatgaagtgataccgccacctatgattgatgcccaagtcgatataaagtttcctaacccttgcaaggtttcctttgccgcatttacaaatctctgtacgatacttccatcgtatgcattgtgaatagccatcttgatagcatcaaagatttgtctagtggcttctttgaaaccattaaacctatctatagccggttggataaatgtcttatatacggcgatgctaactgcattccatacacccttgattactttgtcaatggcttggaatatgatcgaaattccatctttaaactggttaaatcttctcgtagtcggttcaattacgttattattcacaaaatcaaccaatggggagaagaaattcttaatattctcaatcaaacttgatgtgaaatcttggattttatcccagttatcatgcacgacaaccgctatggttgccactcctgctgtcactcctgccactagcaatgctactggtgctgtcacaccaagaataactaagcctattgctccgatgcctgctcctgccaccaaaagggcttcttttagccaactaaagccgtctctccacatggaaaagaagttcgcgacaaccaagataactccacctataataccgccatatccagcaatattctttgcaaggtctccaaccatgacaagtgcggactctgccgccttattcccaagtatcatctgaaatcctgccgtaaatgcacttcctacagatttcccgagttctacaaccgccttagaaagattaccctctgtcgccgcgcctgttccgagattagaaaaaatagccgtactaattttatccgaaatctgtttgcctacctcgttgcctatagagttcaaagcacttgacactagtttcacggatgcaattttcttgagtgttaccgcaccaattactattgcgattgtcttaatgtcgatattttccagaaattctatgattttgtcatacaccgacaaccaatctatattagttatcgcgttggtaacaaggtcaaatactccttgaacccacttattgatcgcctgtgccgtgcttgccgcatcccaattttcaaaggctgctgtaattccacctgctatgtttctaccaatttcatcccattccagtgttccagcaaaattcaaagccgaataaaccactgtattcaaggttgatgacaaggtaatacctaaatccttaaataaggtcattccctgtgctcctgcaaacattccattcaagaaacttgcaagacctgtgccgaaattagatgccttttcataaacactgttccagttgatgctttccattgcatcggaaagtgccttactgatagccacacctaatttttctaaagtattgatagaactctggtattttttctcaacctcaacccattttccaaggttatttccatctgcacttgcagacgctccaccagtaccgccagaaccacttccaccagatgatgatgaagtatcttccgttctgacattcaactcgtcaattcccataaggtaacttttgagtttcttcgcattatttgcagccgttcctgtgttactcgcaattccgcttgacgcatcttccgcactctcaaagtcggtagtaataccgccttgacccatttcgtatttccaaccgaaaatagttcctaatgcttctgataccacctgtgcaaatgcatttacacgctcaatcataatgttgattgcagaaacaacaggctttaccgcattgataatcggtgttccgattgttgctccaaggttcttaaagttttcagccaaaattcttgtctggttagcccaggtatcttgcgtccggatgaagtcattttgtactgtctttgtatttgccataacatactgataacgtagcatagtcttttcagcctgcgtcatgctatcaatatttgcatcaagcccatttttcaaagcccactcttttagtgtagcctgcgtaaggtcaagaccataggtacgcaacggaactaccattcctgtgtagattgatctcaaatcttctgcaacttctgcttggtctttgttgtagaatgatgccatatctcctgctaacttcgtcaagttcaatgacacatccgctaggctgtctgatgccttcacatatccgtctgttgtctgcgccaagaaatcgtttgcctttgcaatctgtgaatttccaatacccatcgcatttcccatggattggtactgcgatgcataggtcttaaaggcaagttctgacataccaaggcttgttatactctcttttgcgtagtcattgacctttccggtcatttctccgaaagagttgtctacaacgttctgaacttcggtcaagtccgcagcataatttaccgcatccttaaccttgctcatgccacggaaaacaagccaatatccggcatacagttttcctaatgctcctgcaaggctaaaacttttctttgtagcgttgccagatgacctagaaaagacatcaaatgatgtagacagactatttgccgcctttccactagaagcccctgtacgcgccaattttgcaagcgcatttgtcatctgaataagattgttgctaaccaaaggtgcctttgacaattcatccatgagttttctcatggctgttgcaagttgagggatgttgtcaatagcctttgtagccgacttataaccaaggcgcgctatgccttgcgacaattcagcgatctgcttagaagtttgactaacatcggtgcctttgaacttcgtaagagaatttccaacttcccttatagcctttgctgcattcccaacacttgcactatcaagtgctcctatttttcctattccgtctgctatacgcgtataattcgacatattcacaccggaaagaccttgcatggcactattcagatttttcagactgatagaggttcttgtcagatttgcaccattcacagacccgatactgtttgccagtttctgcatcttgtcggctaatttgtcaatgccatctgatgcaattttggaatccgcatccagattgatagacaatacatctatcgccgtacttcccataagcaccaccttccaaaattaaaaggcgataggttttgccctaccgcctttgtcttatgcctgtactacttggatcgcatcaatagcctttccataccatcctgcgtagtcggtgtcgttgataacccatgctaaccaaccgccacctttgacgtgtactctggttttgatgttgcagtttacaccgttaggattaacctgtaagccgtcaatttccttgccatttccagcatatccatttttggcatcaaaccagttatagccagatacccaaggcaaccaaccgccacctttgatatgtactctgtaaaggatattgccattagtcgctctaattgcaatctgcgtgatagccttgccaaaaacacctgcgtaatcggcaaggtctgtaacctcatcatatgcttttccaccggatattacgcaatacttcatgcttccttttgtggtagtcggtgtaattgtactggtcacagtttcaacaccctgcgaacaaatctctgtgtgtccttgcgtctttgtgcaaacaatgtctcccttatgcaactgatctaacggtgctcctgtgatttcttggaacccaagcgacaacagtacactaggctcgcttgccgtgttaaaattcggaatatcacgctccaaggcgcaagcaatagcagtacgaaccattgacgaacaatccaactcgcacggtgttgttacctttgccggttcccatcctgccgcctttgcctggttatatcctgtaagtctctcccactgatcgtagccaaagttattattgtcagccataactctggcatttgttccgatccagtacgctacattgctatttggatgacggaaaattctccatccacccttgtaattgtatgcttttgtggttcttacctctgttcctgtctgatctcctgcctgtccgccgtgataacaatttccatgttcatcatggcaagcacctgaaaataaaactgccatatttacctctaatctggactttccggaagtccgctttgtctcaacaaatttattctttgcttcatctcaaaaacggctacttcctcatgcgattccttgtagccgttttcctctttctctgtttctgaacttaaaacaggtttctttgggtactttgcatttttctcccaaagccccttttttatccctagcgatattgcgtctcgcatatatgagccaatccacatccaagcctcttgatctcttatttttctctgcatttcatagcctttttcaattagagataacttgtatggatttagatgcttaaactcgctataagaaactcccatggcgatagcctttggaaagaatttctcccaaatgatctcgtgccagtttatttcttcgtagttttcttcttgtgatcctgtggtgtcttgatttcctcggtctgttccgtcatcttctgtaacatcttgtccagacctgtccgatggaaaaaaccgtctttctccatgcactccttgatttcttcaaaaagatctggataagacaagtcgttttctttcatgtatgctctcataacattctttgcttcaacttctgtcattggatttttctctaaaaatcctgcatagaaagcaatgttacatacgtctggaatgtttgagaacatagcggacgtgccgttaatcatgtcagccgcgctagggttctcaatgtcctttgcatcttttaccaaatatgctccggtcatcatgtcgaacatcttctgaacaagcgtcttatgttctgctgcttcaaatgtaaattcaagtacaaactctgtaccgttgattgaaatagttttcatatttatgcctttccctttctccctatacgcttatatagggaaaggggcagccctaagaccgcccttcctgttaaaagttactcatcggctgtttccttgtcctcgccagccaaaacagccttgtttgttttcgctgactggctatttatttttttgcgagtataatctcagttggataaccattctcatcctctgttactgttaccgtgtaattgtcctcaatccacttaggaactgtctgaaccgaaactgtagcagtacctgtcaagtgatcttccgtggcttcatccggtgcaaaagactcttgcccgataaatccacagataccctctgatccttttccgtcactaccatacaagatgatgaagtcaagtttcttgccctcattgtcagccatttcatctttgtatttcttttcaaatgcgccctgcacttccattgaccctgccgaacgtctgcccatttcctgcgtctctaccagatcctcaagagttgacgtatcaaccatgttctgtgatccaaatggtgaaggaatggacttcgctcttataagcaatttataagtaccagcccaatattctccatcagccgcacttggatttggtgtcttataagcaattctcgattttaaacctactgccatttttacctcctgtatttgcgtaaaaaatagagcctaaacggctctgtgattaaagtaacctatcttttctgtctatttcgcgcctaaagcgtgcaactccgcgaattgtttctcctgtgtcgtcaatatctaatataggtgcggcttcaaaccccatccttttaaatacgtcagccgctgttgccatgacttttcgtacttctgcattgtcattgttcgtggtaacatctacctgcatcgtaactaaaactccgtttatagatgtaccctctaaatctcgccctttctctgttcccggaagttcatgtatataaactgtcgggaacttaggggttccaatgctttttgacttatccgtaatataaacattcggatatatcttctgtagtttaggcaataacaaaccttttgccacggaatatatctgtgttccaaggtcgtaagcccacgagttgtctactgccattacccaaacacttcctttgcaatgctgaatagattttgttccatttccagaaatgccttgtagactggcattgttggcgttacaccatatgaatgttgcaaattcccatccatatcaacccaataccatccactcggatcatttgcatgagtttgaccagggaaagtaccttgccccactcccggaacattcttcggattttgtgccttgtgtcctgctccaaattcagtcataagaagtggagaaacatcagccgttttcactccgccatcacttgtctgccacttgcttacaatctttcctgtctctgtcgcaaggaatactcccttacatcctgtcgttgtaggctcaaattcgcttgaaaacgtgatgtacctaccatagttgcctacgttgcttttagcggtctgtatgcctacgtctgcaagcagtgagacgtatttctgtgtcttagatagtagttctgctttttccgcttgcaattctctgattgcatttctaacagactgctccgttagattaaaagtaatcgtccttgacatttctacctcacgttcttttgcaaaaggaacagatcaaccgtaagtccctcgtcagcaactcccttgacaatgtaatctgccgtattcttatctaccagtccatccttgtctctgccgactgatgatttcttccatatcagatctccgacatccaaaggcaaataccctttatttgttacgatctgacagaaattagaactatcatcaacaccaaattcctttataagcgtttcgctcaatttgttattgatgcttgccttaaaatcaaccggctcactataaccatccacttctcttacgatttttgggattttctctccatcatcatccagataaggaataaacttcccatccgtgtctgtataaccctcgtatacaatttctccgtaagtatctctttcgtaaattactacgcttttcccatgcaaagcatatttcatcttttgtttatttgcttcaagcatcgttctttttcgtctgcttgtagacctgatctgcgccagtgcttgccatgccggaaatgatgcccactgcaatagcatttagaatgtcattagccggataatctggaattacatacatggctacaatcccaagtacaccacctacagcccctacaatgattggaatgtaattatcctttaccttttcgttggcttttactgccaatccgaccaaataacagataacaacaatcgccaagcacgtccctaactgcgaaaaatcaatcgtcactgttctctttacctccattttttaatcgaatactctgtatctcatcatacattttggtcgccataccgtttccgcctaaagcgtgatatgcgttatacatttcaacgaaattgtcatacgcatatgatggtatttcgcccaacttcatgtatttgtcgtgatactcaatgagttgcactcgcaagagcaacattgtacccttgctgttggcatccctatcttttttctgctgttttaacatccacacgatatatcccaagataataggtaatgctatcgtgtatgtctgtaataaaagatctttcatattaactccaagttttgtttatggcgcaccgcccaccacccttaaagtgcgccgcctacaactatgcacttggtatcagccacatagccatgcacaatctacttatgttcttacagaattttggcaaatggaaatatacctgcaaataggtcatcccggcttttccagttacggctgacaccattttctgaaaacgatgccataaattcctcgccagcctgcgaatgatcgtaaacaacaagatttacaatgtttgactcatagtttttcaaatctgtttcaatctgatctgccgtatatgagtctggataattccttttgccgataacttctgctgttgcctgtcgtatcaactgttcgatcaacggattttcttcgtcatcgtcaaaggcgatagcactttgtccgtcttccgtttcttccatatgatattgtttcaaacgaatttttacttgctccaaaatgctatatcccgccattttcctactcctaaaatccgaaatgctcaatcaatactttcttcagatcagcaccactcatatcttctgctccatcaatcccctgctcaatggcaagagatttgagatttgccgttgacattctactgatgtctgatttctttaatttttcactttcaacggtttcctgtgattccggcaacaaagaagagacggcttcgcttgccgtctctggaatgttctctccgggtttataccacactccgttatgtttaaccgaatgtgtcgcgatcataaagcacctctactctgtaacctttaataccattgtactatccataccctcaaaggtcggaagtccgatcattgatacaatacagtgtgtattgattggatgatttgtagcataggtatatactgcaataccagtttctacgatagaaagatttccgtccgtaatgcttccgcttctttcttctggtgtcttgccgaatacatactcgccaaggtaaactccaccagactggcaagagacaactcctgtaggtacaaagtattttgtagttccgctctcgtcgatataaagtttgtcgtaaacttcaatctcaattccgtaacctctcaaatactcagtaacctgtgcctgctgtaaacgaataccaccattgtaagcagtaattccaagtacctgtttctttgtgtcctctgctttcagaaccatttcccatgtctcggtgttcatggtaaatcttgtcagagaatagccggtagcctttgcaaaatctctacgaactgtaataagatcatccaaaggtgctgccgtatctgccttattccatgcacttgtaccagaaaacgtcttgtagtgctgtgccttatgttctgcgccattgtccgttgtgtaatcaatcgtgtactttttgccatcaatgacaacatcaacctttggcacaccatcttccggtgccagcaaactccaaatctgacgttctggaacaactctcgcaccctcgatcaaattcataggtttcttgctgatttccctaagtacatcatttgcaaggcttgaattttcagcagatctgtaattgtcgtactcctgttcttccttttctgttaccatgtatgactcacggtaaaaaggcatttcattctggatgtcagaaaatccaccaacatctctcaactctgcctgtgcatcaaagttagatgcctttaatgatactggaagtccactctttcccttgataaatctaagatcaaggctatcctgctttcttgtgccaaacttctgtctgccaagataaggggcagatcccagtgttttcttgtaattatcccacattaccccgagacttctcgcggtaaatgcttctgctaatggtaatgccataatttacacctctttccttaatcaaaaaaagtaactcttggggttttggcttttgccgtttcctcaacagttactccgttctttgtaagtttcgcattgtcgatatcgccctcgtaaacgtaagttccaggtgcatcacccatcgttacgtcaacatcattgagcagatatccgacacagttttcatcattggatggaaatggcgttccaccctttacgatctttcttccatttccgtcagccgcagatgccattgactgcggaacgatacaagccgctcccaaataagggaaatgctttaaaataccaagttcttgagtaaaatctctttcaataggcttacccatgatttttacctcctaaattacataatgattttttgtttctgcatctgctgactcgttgccgaatgtaatcttttcagcattttcaacatctgctgttttctctttgccttttccaccgccgactccaccgccgttcggtgcatatgtccctgccgcgatttccttttccttggcttctgcagcagccttttccttttcagacgtaatctgaccgagaacatcgtagtcaaggcttccatcatcctttacgatggtttttgcctgttctgcggtaatgttcatcttttccattaccttttccctctggtcgcgaattgcattatttctttgcatttctgcaatctgattattggctttctccaaggcttgatttgctttttcaatctctgtaagatttcctgcttcaagatcatcaagtttcttttgcagttcatctgccgtttcagccttttgcctgtacttttcagcctttgcatttgcttcctgaactgcacttccgtggtctgccataatcttctcaacgttttcttcgctgatacccatagcaatcaattcttctcgtttcataaattacctccgttatgtcctacgtttttttacggtgcaacgacaccgattgacattgttgtttttaacgctcacaactttgcgaatttataaataaaagcgactaccaaatttaattggtagtcgctttatctaactgattattttctttttcattgattatcttttgtgcttctttttcttgcttttttacatcatcaatagtcttgtacaaattatccagataaggttttgacaggcacagtgttttctctgcgtctccccaaagccctactgttctaattgctacaagtgggttgataccggatgtaagcaacaagttcaaggtttgtgcctttgtgtacatattgtcctgtggactatgatttatctgtacatcaaaatcccttgttgttaatcccaagtcatttccagaaactcgcaatatgttaagaacaacttttgcaagcctcttttcacaattcttaacaatcgggtcttttaatttcgctcttgtcttagaaaaatcccagccatttctaagttgaacggctccttgtgtatccccaccagagttattgttatttttgtttggtatagccaaaatagacagtgcattatcccatagatcatctttagccgtctggcattgtgtctgatctaattcatctgtcattgtttcgacatcggatttgttttctctgttgatagatttgactacgagtgctcgagccatcttcatcttcttaaactcttcctcgtcaatctcacagttgacaaatttgatccatgcctgtacgaactgctctatgccgtccatacgatttgattgcatattgttcaatgcatccaacatacttataacaagttcaatgtctgacaatctctcgtgattgtttggatattccacaataggtatgtcactgtatgaatgtaggttatattcttcaaccttgctatctctgataacaaattggtgtgtctttgaaaaacataacttataccatcttccgtccgcatcttttaactcttgcaccgcaagcaaaggttcttccgtacctctgttgtaaataacaaatgtatttaacggatttggagatacaatcctaaaaggcgattcatcgtctttcacgatttgaatagccttaaatgatgtacctgttgctgattgccattcgccggacttaatatctttttcctgcttgttcgcatcagccatataatcgtttagcaagtcaaccgccttatttatgcggtcgtcattcttacggcttacaaactgcacaggctcgccatatgtttgtcctactttgaattgaacaatttcatatgcatgattttctacaattttattggttatgtcctcattagatgttttctttctatacaaaattggttgatcgcctttgtaataattccaaaggtactttatgattggcttattgtaataaaacgttccaatacaattcccaatgacatcaatgatattatctcgcgtaatctgttcaacgtctgtatatgcaatttttcttccgtaattgccttttacaaggtcgtgaaaatacacattatttctttccattacttcacctaataaaatctcaatccgctagatgtctttctctctggtattcttttcgcttctattttccaattcacagggttaaaaacgacacgcttattacagtgattacatctatactccaatgtagtttttgcttttccgtcatattctccggctttccatccacagaccggacacaaaatcgtctctttcatatgttgtttcctttaaatcaaaaagacaccgctcatgcggtgtctcatattgggggtatgtaagagaaatgatttatcatcgtttcctcaattataacgatatcatattctgtatatgacattctatgacatctttacaaatattccgctccaaattttgtttcaaactgctttagtgccttaccatgaagtctaataatctgtctccatgagtattccatttcaatagcaatcaattcaaacgactttttctctatatacctagaaaacaaaacattatatacattctcatcttccatgctatcaatctgacttataatcttattcttcaagtcaacatactgatcgatcgtttgatctaacgcatgttccaactcgtctatttttgccattttcgaccctatcttgtcgaaatccggtgaactttgcaccctatccccagaatttatagaagaaataccgcaagccaagtcctttaattgcttgatttccaccaatttgttatttatcatacgattcagacggctaatctggtttaaatattcctttgtcgtcatatcaatacctcctaaacggatttatggctgcttctacttttgaaactctgtttccctgtgtgattcttaacgagaatgtcgccaggacatccggtacatcatctaattgttttttcccagataccgagtattgctttaatagtgacatcatcactccgtatggctcattgggtttgtataatgacggatctttaaagataacgtgttgtaaaatccagttggaacattgaaatatctttgcttccttgttcgattcggatggtttatccgtgatgttacatacccatccttttaattcgacacgcttatttacttccatggctacacggtcgccaccagcatttcgttcaaactcgcattcttgtacttcattattgacaagtacgtttgcagcattttcatattgtctttcataatcagccgtgttatcgcatacacaatcaatgcaataataatcatcgccgtacttttgaaatacaggcaagacaaaatagtccgtgccttttccctttgtatcgcattgtccggtaatgatttctggctctccatgtgggagattgaggtatcttctgattttgtcatctggaaaaagtaatccctctcgctcaatcggttcctgcttatataggcacttataagagatctcgtccatcaatagttgctgatcctcaaaaaactctttcgtaaatccaccatattcatagtcgaaattactttctcctgttactgggtcaacatctggaactgcgatcaccttaacccttttatttccaacatacatattttgaatacgccctataacgtcgtgtacgctccatctggtcgctatatgtatctccttgcaattatgtccgtccgtgtcttgtatctttctctgtcgagcgtctactgcatatttgtcccataatttatctagtaccataggatttaacgcctcttcgattccgccgatcatatcatctactagcaaaaacttactggcacgaactttaccagcatttttacttcctacagacgtacattgcatagacggaaacggcttatacttcgatacattgaattgctccatctttgcatctgtctttgtgacagaaagtttcggaaaaatgtcatgccatgtatattcgtctggatttgtgacaatatcaagcattccatcgtaaaacattcttgtaatatctccactatgcgaatagaacagattaaagtctttcgggaaccatccaatcacggcactggcgaaaaacttctcgatcgtcgtctttccagcaccaggtattagactgatgcacagtatgtcgtacttgtcatcaatcatgccttgtagcgcatctacaagcccaattttcatgaattgctttcgtcttggcatataaaaacgttcttttggttctctatttttctccaaataacgaaagtaactgtcaactaccttgctttgtgcttcaagtaacaacggctcataaaactttccaatcagatcataatttgtattatgctcaaaggcatatttctccaaatcccatatagtgccgccagtattagccacgcaaaactgctctatgatgtcttttgtgcgttttgtgatatgcaagccataatctatatccttgtcccttttaatagccgtttttgacgcttctatgtacgcatcaatgacttgttcatctattccgtttttctctatgtaattttcatatccttggattgtttgaattagatatttagatgccaatagaaaaagcacctccacttttcagcaaaggtgcttatagacctctgcctataatttttctaggttagcgactaactccgtttgttagccggtaatgtttttatgcagttatgtttttaacatccgttttgccactctgtttattcttcacttaaatatttatgtcttacactatatctttcgattttatcttcgtcatactcaataatactatttgcaagtctcacataaacctcataataaaaaccgcctgttgctctctcccaagtctttacaactactcctatcgaagatttatccacaacaacaatatctccaaaaagaaactttgctttcatgatttcactcctcaactaatttttctgcataccttgtcatttcaattcgtgttccgttttcgtcctttgtatatacatttacacatcttgtagatttgcttatcgcatctccaatcagtatttctgttttatcgtcatcaaacttgtaacactcccgcattttctcaatacagttattcatttctgatattttcattttgccacctccgcaatattgtaatacactttaaacccattgcctgaatattcagtcacagcctttttaagttcttttttattgttgtatttttctttgagcaatattgcaagttgtcctttgctaattgcatatatgccgaaaggtattgcatcactggcgatattaagcacttctttaaattccttaaagttcattccgtatacgcttccgttaatttcaactatcattcctcataaacctctcaaactcttccccacacccgtcgcactcataccattctttttcgtgtttcattcctaaacacacctctcctttaaattaacagtctccgtttcttgttttactatttcgtgagaataatcatctccaaatatataaaacgtattttctttatgagttccgcattccaatacaggaatttgtttatcattttccacaaatatcacctctcattagaccaaccccaacatatacagaatatcaattcctgatattctctctgctccttgtcttgtgtgcataagaatttctttaagtttttcattttctgtatcgctgtatttatttctatcatacgcttctgaaaaacaataatatttgcaatatccgtagcctaccccaagtctgtttccgtaaatactctttccaacaatatcgtaatattttggtacttttaaaatatcgtgtttttcatctagggtacattccttttgctctgcttctaactttgattgaagatatttcagaaaacttcgtatatcctgttctgatttggaaatatataaaatagtttcaatcattctaccaccaactttctgccgcagatagggcaataattaattttataatcaaaatccataaaactatctccggttgtaaaatgaataaaaaatccatcttcactcttatatatataatctttgtaatcggggtttttataatctgatgtataaatgttttcgcaaaattcacacatattgcacctcaaatcctcgtaaaaatgtctaaatcatagttatctatgatatagtcaataacttcacacaacttctctttcacaaattcatcttgtgcaatatctgggtgacaatgcattgtacaactatctttcttgccttgtgctttatatttgcgataatcaaatgtcattgtaaaaagtggtatttctgtcaaattctttgttttcttgcgtatgtatagattgcatagctttttaaacaattctttcatatcccagcctcacatatttctttcagcatcgttaaaaattgctttttattgattacttttgcactcggtctaatattccgtttcatattttccaccttttcaatggcttttcgctcacgttctccgtacagattgacaaaatcattatccagtaccaggtaatcacagcgtttcaacggcagacagttatttgccgcaaacgaaatgcattccactcggactttatcactattcactatacttgtaattgaccgctcgccagaccatctgcgaatattttcaatggcgatcacataaaattcttcgcatttcttctgatccagacctgcataaagaaactgtatcattttttcttcctctgcttgtactcttttctattctgctttacgttctgtcggctttgaaacaaagtgtccggcaattcttctccaagcaaaaccatgtttgcatacttgctaaacgtgggaccgctcatgcctgccagtggtgctgcctgcgtaagtgaaatcctaccttcaataactaattccaacgccttataaaaatctgccttaacgacaggatgtactccttgtgccataattcaaacctctttctaaatactgcaaaagtgcgtatcgacatatgttcagaacacaagatacacactttcgcaaatttcttttgcacgtttgtaggaaatcattcccacattttttacttcaagtgatcgtgctatcactctattaagtgcggacttaataggattcaatgccacgtcgggcaaattggaacacatggaatcgaaccatggacattcggtgtataagaccgacgttctaccactgaactatgttcctatgttggcacatgccatgaacgaaaacatatgccaaactccaacaaccttaccgaaaggagaagtccgactataacggctgctttgcctagcagtatgattttcacaattatttcaaatcaagcaaagtgggataatcgctcgatcttaaattcgcgccaccggattttttcgttgtggttaagtattttcatacagaggaggtatccgatggctagtcacaagtattaagaaaaaagttatgttgcgaatattccaaaccttttattttccgcatccccactcttcaagggtttaagggcattactttcactctctgccaagtgcatatatcgcaagtacggattcccttggtatcatcatatactcgctactatccgctcgaggtattctgaacatttcgagatcctccatatactcaaacggtgcatctgcatcctcgctacaaatgatgctatcctctttcccagttatgtatttcacatgaacaatcccattcatcatctgctacctctcaccttaaaatacttgcagccatgtgttaccaattccacgctctttctgaaatttgatgcgtcctcattatcgcaaacaaatccacatgattcgatgtctatgtactgacacgcaccgcactgcttttgatttttcatgtcctcgcaacgcttatgtctatgacctatctgacaatcaaccatctgtggaattctattccgctcccgatggatgccgtgtccgtctttaaacaattcacattgcaacacgtctccgcaatactggcactcgtcagttatctgctttccataaaccaacatggctacactttctccatacttttctgttgtaattatcttatttgggatttttccatccatgtatgaactacatgaatcttatcgtttgatttctctgtatgactgtattatatatcctacttccacgttttgacaatacccctttttaacattcaggggataattgctctttttggtggaattttttgtaggtataaaatcgcatcttaaagccctttttatttttgaattatttttcagaaatcgacaagggctttttgtttttcgcgctagtattggggactaagtggagggcattttcaaatccctatagagggggagaggggggctgtctgcgtccctcttttcgttcgtctcgttcgctccatccctgcgcttttctgcatcgcttcaaactgttctatttgtcgtatcgtgcggataaataagagtttacctgtgtgatactcatgtgtggcataaagtgccgctagcccttgctatatctacgtttgcccctcgtcagcaacgattttatccgtttgcttgtccgtctgtaactgccctaattgcttaatctgtccgcctgtggtggacggcagcgcccctaattgtggcaactctgatactcctaaaacttgcggtctgctcctgtttgcatcgcttgtataagggcttgcccatccgtgcctatggttcaacactgcaattactccaaccgggttggctttggagcttattagcttgtcgctcaaagactcctcggagaattgattaagttttttaaaaatttcgtacgccaacgaactaaatttattgctctgatacccccattccatcactgtatcgtagttaattcctgtcaatgtagtatacccaactatgcttatctctttatcgtaaatcatacacatgccatatatatatatatttaatacatccatacataaattataatcatatctaccacaatgagttgatactgcactgccattgttaaacagcgttttatcttttaatgcatcaggattatttttaaatacgtgtttataaataaaataaagtgctgcgttccatctctgctgactgatggtacataggtcttcaatcttctgttcttctttccactgatcaagccacaacaatatatcattttcaaatacatcagcagtcacattttcattagcatctttaacacgctccatagtttttccactccctatagtatcgtttatgatttttaactcaaaagggacacataggagcgctattgtgaaataaatcaataacggtcaactatgcatccctcgtgggtccttatcttctgtgcactgtaaacaattttgagaaaggaatagccaataaaaataattgactacaggacatatatacaccctgtttggtggtttcgtcaataagtggattggaaaaccataaaacgaacagattttcggtattgacaaaaaatagaaatggtgttatatcgcacacatgcgttttatatatcttatctaatcttatcta

SEQ ID NO: 12470 - DNA, 2016 bp, Unknown
  gut microbiota DNA sequence
acaagtcatcaatccacttgtgtgtcaaatacatttatagattgttttatgccggatgccagcggcgagttcgtaaagatctatctttacctgcttcgggtactttcctccggtgacagacaatttaatccttctgccatggcggacaagttccactacacggaaaatgacatccgccgcggactttcctattgggaacagatgcatttattgcaattagaatacaacgatgccaatcaactgacaggcatctgtcttttagaaccgggacaggatgagcataaggatcctgcgcctacagagtcctctgccaccatcaagatgatgctgcttccttctgacagacaggacaagtctgcggcagacctaaatgtgcatcagcctaagacagaggaaaaggctttgcagatcccaccggacgagccacgccactattcgccacgtcagatcgccgctttcaaaaagcaggatgatgttgccgaactcctctatatctcagagcgttatgtcggacatccgctcaacctgaccgaagtagaaaaaatcctcttttgggcagaagaattgcattttccggttgatatgatcgagtatcttgtggaatgctgtgtagagaagggacacccaaacttccattatatgaacaaggttgccctgaattggaaggaaagtgggatctcctctttgcaggaagccaaggattccaccaatatccattcacagtcttactatgcgatcatgaaagcttttggtatttccggtcgtaatctgaccgagcgcgagactgcttttatcaacaaatggacaagttcttacggcttttcgctggatatcatccgcgaagcctgtgagcgcacgatccgcaacaccggcaaagtcaattttgaatacgccgactccattctgggcagttggagcaaaaagggcatccgccagttggatgacatcgcccgcttagacgaggcattcgcttccaccaagcaggcaaaggtggcttccgctccggtcgcacgcaccaagaccaaccgcttccacaattttgaacagcgtcaatatgatgacgactattacgaagcattagaacaacaattactgcgaaagtagaaggatgatccatggcactgaccaatgcacaatacgactcgctcatgcgggaatacaacaataaacaaatgcgcaatcaccagatcgtgatacagcgtgaagaagaactctaccgggcagttccggaattgtcccgattggatgatgatgtcagccgcttatcggttgagagcatagacaggcttttaaatggcgatgctgccggctctgccgccctcaaggagaagttaggcgatatccgcaagcagcgtgaaactcttatccaagagcatggatatcctctggattatctgacaccgccatatgattgtccgctttgtcaggataccggctttgtggatggcaaacgctgtcgctgttttgtgcaagcatccattgatctggtctattcccagtctcatttagacgacattttagaccaggagaacttcgacgttttctctttcgactactactccaaagacatcgtagatgccaagtccgggcggtcttctttggattttgctaaggatgcctatgaaacagcacaaaattttgtgcagaatttttctacagaaggtggtagtctacttctgtatggcgatacggggacaggcaagacctttctttccaactgtatcgctaaatctctgttagatcagggacattctgtgatttattttacagccttccagtttttcgatatctttgaaaaagatgtcttccagaaagatgaagacgcaatggaggctcatgagcaaatattccaatgtgacttgctgatcattgacgatctgggtacggaattttccaattcctttacgacatcccagttattcctatgtttaaatgaaagactattgcgtggcaaatccactgtgatctccaccaatctttccatgaaacaactgcgtgagatctactcagaacgta

SEQ ID NO: 12471 - DNA, 24862 bp, Unknown
  gut microbiota DNA sequence
ctccgatttcagatgcagaagtcagttatatccagttctatagtcaatatattgaaaagtaccagaatttaaaggtttacacaaagcgtggcttggacaaggattcctatctgtgttccgtatatttgcagatcaagtttgcaaatatagatacaccggttgcagggcttgatttcttctatgtccagaccaaggatgatggaagcctttacatcaacaatgtatatggttcattcaaccagtccaacggcgaatttgacatggatacggatatcgcatccttgatcgctacctttgaacaacagagtgatgtccttgctttgcaggcagaagtacagcaggaatgcaacgaggcaatgcttgcagacgaaaatctgaacacctttgtcaatacgaccttacaggatgctatcaagcagtgggcggcagattataaggcatccgtagcccaggcagcggaagaggcagcagcagccaaggcagcagaggaagaagcagcagccaaggcggcagaagaagccaaggcagcagaggaagcagcggcagccgaagcagcagaggcagcaaacgctaagacaaaggtcacaaccgacaagatcaatgtgcgtgatgccgcatccgaggatggaaacttgttaggacagttggcatccggtacgcaggttacctggtatgcagatgaaaatggctgggcaaagatcgactacaatggcaccaaggcatatgtaaaggcagattatctggcagatgtatctggtgacagtacacaagatacaagccagtcaacaaatagcagtgcaaacctgagccagggacaggagatcacacttgccaatacggtcaatgttcgcgagagcatgagtgagactgcttccaaggtagcagttgcatacgcaggcgaacaggtcactgtgatcgagtcttatgcggatggatggaccaaggtcaattacaacggcaagcagggatactgcaagacagaatacttacagtaaaagcagttttataatgtatctttaggggcagtccatatggtctgtccctttcgtagccttataggaatcggacagaaaggagacccatggcagaagaagagatccgcctaaataaatatttgagcgaagcaggtatttgttccagaagagaagcggaccggtgtatcgaggcaggcaaagtcttagtcaacggcaaagtggctggcatgggacaaaaggttaaaatgtccgattgtgtggaatactgtggacgagaggtcataggaaagcccaaggatgtcctacttttattcaacaagcctgttgggattgtctgtacggcagaaaagcgggagaaacacaatgtggtcgattatattgattattcgacccggctttatccggtaggacgtctggataaaaattccagaggactccttttgatgaccaatcagggagatctggtcaatcagatcatgcgcagtcgttaccatcatgaaaaagagtatatcgtacgcgtagatcgtccgattgatgcagtttttgtagagcgtatggcagcaggagtctatctgtcagaactgaaagttacgaccagaccctgtaaagtagaaaagttatccaaatttacttttcgcattattttgacccagggactcaaccgccagatccgccgcatgtgtatggaatgcggttatcatgtacgggatctggaacgtgtgcgcatcatgaacctgacgctggacggtatcgcggaagggcagtatcgcccgatcactgcggcagaatttgctgagttacagaaattacttagaggttgatatggatattaaggaagaagtaaaaacattacgggaacaaatcgaatatcacagcaatcgttactataatatggatgcaccggagattacagactatgagtatgatatgctcatgcagcgtctaaagcagatcgaaaaagagcatccggaactggtggacgcgtcttctccgacacaaaaagtcggtggcaatgccaagagagaggcaggagtactggtgcgtcacaatgtgccaatgctgagtttgcaggatgtcttctctaaggaagaggtcatgaactttgtggcagaaatgcaggaaaaactggaagatcctgagtttgtcgttgagtacaagatcgatgggctttccatgtccttgcgctacgagcagggcaaacttgcgctggcagagaccagaggtgatggcatcaactttggcgaggatgttacagcaaatgccaaggtgatcgaagatgtaaagacgaccttaaaggacgcaccggattatctggagatccgtggagaagtctacatgacggaagccgccttttcccatgtgaatgagacgcaggaactgctgggcaaaaagacttttgccaacccaagaaactgtgcggcgggcacgcttcggcagttggacagcaaggtggtaaaggaacgccatctttccatgtttatttttaatttacagcaatcggtgggacgggaatttttgacccacaccgaggcatacgaatatatgaaatcccagcacatcccggtcatcgaggattaccgggtctgccacagtggcgaggaagtctgggatgccatctgtgccataggggagaaccgtggcaatctggcgtatgatattgacggagcggtggtcaagatcaaccgtttttccgaccgcgaacttttgggaaatacatctaaagtgccacgctgggcgatcgcctacaagtatccgccggaggaaaaagagaccaaattgctggatatcgaattatcggtagggcgtacggggcgtatcacaccgactgccatttttgaaccgatccgtctgtgtgggacttcggtcagccgggcaaccctgcacaatcaggattttatcaatgatctggatatcgggatcggcgataccatccttgtctacaaatcgggagagatcattccaaaggtcaaagaggtattacatgacaaacgtccggcaggggtaaagacctttgtgatcccggataagtgcccggtgtgtggagcgccgacctatcgggaagaaaacacggcagatatcaagtgttcttctgcgacctgtccggcacaactggaacgccatatcatcaattttgtggggcgcgatgccatggatatcaagggatttggcacagcctatattgaggaactcatccatcaggactatctgcacgacattgcggatatttatggactctatgaataccgggacgaattgatcgaaaagggtatcctgggcaaagaaaaaaatacagataaacttctcggagtgatcgaggcatccaaggagaatgatgcctaccgccttctgacaggactgggcataccggggattggcaaagcagcggcaaaatcgcttttggactattttggttcgatcgatgcggtagcaaaggcagagccggaaaaactggtcgaggtcaatgatattggcgagatcagtgcaaaagccatctatgcttattttcgtgatccggtcagtctggggatcttggagcgaatgcaaaagcacggtgtcaatatggcacgccttcaggcagcagatagtgacgatgtgctggcaaatcttacatttgtgatcacaggaacactccccggcatgggaagaaaggaagcagcagaattgatcgaacgccacggcggcaaggtcagcagttctgtttccaaaaagacaaactacttactggcgggtgaaaatgcaggaagcaaattggataaggcgaacgctttaggagtcaccgtgcttacagaggaagaattattagaaatgcttcaggccaaagcctagagaatagagatagaaagagggggcaattatgccgatcaaaacacagagcgatctgcctgcaaaggcgatcttagagcatgaaaatatatttgttatggatgaggaaagggcattgcatcaggatatccgcccgatcgagatcgggatcctgaaccttatgcctttaaaagaggatacggaactgcagatgctgcgttccctgtcaaattccccgcttcaggtagacattacttttatcgcagtggagagccatatttcaaaaaatacgtccatgagccatttgaacaagttttaccagacctttggtgacatcaaaaaccgtaatctggacggtctgatcatcacgggagcaccggtggaactgcatgattttgaagaagtggattactgggatgaactggtcgagatcatggagtggtcaaagacccatgtgacctgtactttttaccagtgctggggcgcacaggcggggctatattatcactacggtatcaaaaaggagatcttagatcaaaagatctttggtgtctacaagcacagggtgcaaaaccgcaagatcccattggtacgcggttttgatgattatttcatggcaccacattccagacacaccagaatggacgaggatgccatccgaaacaacccggatctgatcgtgctggcagagtcggaagaagcaggcatctttttgatcctgtccaaggataacagccagatcttttgcatgggacatccggaatacgatcgtttgaccctggataaagagtacaagcgggatctggaaaaaggcatggatatccagatgccggtcaattattatcctaatgatgatgtgaacgaaagaccgtttttacaatggcgttcccatgcaaattgcttatataccaattatctggattattatgtctaccagatgacaccgtacgatttgcactggctgccaaaagacaaaagataaaaaacttcccaatttacgggaggtctgatataataatgctaagaatatgtttaggaggctaccgatatggcagaagatagaaagagttttgttatcaaagagagcgaaaatggtggggtcaatatcacagatgaagtagttgcaatcatcgcaggacttgctgctacagaggtggaaggtgtatcttctctggctggaaatctgaccaatgaagtgatcagcaaggctgggatgaacaagttatccaagggtgtaaagatcatcacagaagaagaaaacaaagttgcagtacgtctgggagtgaatatctcttatggctatgagattccaaagatctgccagcaggtgcaggacaaggtcaagaatgcgatcgagaacatggtcggacttgaggtcatcagcgtagatatcaagattgcatctgtagcggttgcaggggaataattcttttgttttatcaaggattgcgctataatcaagggtgtctgaaaagacatccttttttaccatattatcaatacattgagggagcgaaaaaggtctatgacaatgacaagaagacaaatacgagaagagatatttaagatcatctttcaggcggattttcatgcgcaggaagatctaccggaacaggtagacctattcttgcaggatgagagcgagccggagaaagagacagaagaattcccggtcaagagcgataaggaattagaacaggaaaaatacattgctgacaagagcagtgacatctttgcacacgttgaggagatcgatgcaatcatcgatgaggcagtggagggctggaagaccagccgtatggcaaaggtcgacctgtctttgatccgtctggcagtctatgagattcgctatgagaaattgccaaagggcattgccatcaatgaagccgtagaactggcaaagacctatggcacagatcagtcagcaggatttgtcaacggagtattagcaaggatccatgaataaaaatatctatggtgtagggcaggtcaatgcctatatccaacgtatgtttgcagaggatttcttactccgtgatatccgtatcaagggagaggtctccaactgcaaatatcattccagcggtcatatctacttcaccttaaaggacgcaggcggagcgatctctgccatcctctttcgcgggaaccgtgtcaagggtctgcgttttcctatgaaggatggagataaggtcgtggtcacaggttccgtttccgtctatgaaaagggcggtacctatcagatctacgcaaaagagatcacgctggatggggcaggagatctgtatgtacgttttgaacagttaaaaaaagaactggaagaaatgggcatgtttgccgcagagtacaaaaagcctattccccgttttgcacaacggatcggcattgtgacggcaccgaccggcgcagccgtgcgggatatcatccagatctccaaaagacgcaatcctcatgtatccattgccttatatccggctttggtacagggcgagggcgccgtggagagtatcatttccggtatcatggcgctggatgccatgggtttagacgttttgatcgtcggcagaggcggtggctcgatcgaagacctatgggcatttaatgaggaagccgtagccagagccgtgttcaactgcaatacaccggtcatttcagcggtggggcatgagaccgatacgacgatctgtgattttgtggctgatctacgcgcaccgacaccgtcggcggcagccgaactggcagtcttttcctatgaggaggtcgctggtgctttgacatccgtccaggtccgtatgcagcagtccatgcagatgcatctgcaaaaggacagacagaccttggaagggctaaaaaggcagatgctgcttttgagtccaatggggcggctcaatgagaaaagacagtatgccatgcatttggaagaccgtttgcagcagacgatgcgaaggaggctggacggctttgatgggcggatgcggcttttggcagagcgtttggagggcatgtcgcctttgaaaaaactggcacaaggctatgcctatgtagcagatgagagcggacattgcctgtcttcgataaaaggcgtagccataggagatcctgtgcaggtttatgtgcgtgacggcaggatgcaggctgtcataaaagaaatcgatgaggatgtagcatggaagaaaaagaattgaccatagaacagagttttgcagaaattgaagaaatcttgaacaagttagagtccaatgaagtgactttggaggattcttttttgttatatcaatcaggtatgcagcagatcaagcattgcaatgacctgatgaatgccgtagagcaaaaggtacagatgttgaacagtaatggtgagttagaaacatttgaagaggtgtagttatggatatcaataaggaaatcgcctataaggcaagcgacgcagaccgtatgatctaccgtgtgttaccggcggaaaaaggttatcagaagacagtatttcaggcaatgaattatagtgttttggcagggggcaagcggatccgtcctatcctcatgctggagacttacaaattattcggtggttccaacaaggcaatcgaatcttttgtggcagcgatcgaactgatccacacatattctttggtgcatgatgatctgccagccatggatgatgatgaattgcgccgtggcaaattgacgacacatgccaaattcggcgaggctatgggcgttttagcaggtgatggcttgctcaattatgcctttgagattgcgctggatactttggatgagaccaagggggcagacaacagggctgtcatccgttcactcaaggttctggcaaaaaaagccggtatttatggcatgatcggcggtcaggtcgtagatgtggaagccgagaaacaatacggtatctccaagaatcgtttggactttatctatgagttgaagaccggagccctgatcgaggcaactatgatgatcggtgctattttaggtggcgcgacggatgaagaagtcgaacagatcgaagatgtggcaaaaaagatcggacttgctttccagattcaggatgatgtcttggatgtgatcggtgagacagagacaatcggtaaatctgttggcagtgatgagaagaaccagaaggcaacttatgttgtatttgaaggtttagaaaaagcaaagcaggaagtggcagatctgacagacgatgcgatcgctattttacaagaacttccatacgaaaatccatttttgacagaacttttacgatggatggtgcttcgcgataagtagaggatgagacttatggtgttagataagatacaaaaagaaaatgatattaagaatttgacaccggcagagatagatgtcttacgacaggagatccgtacttttttgatcgaaaagatctcagaactcggcggacatttggcgtccaacttaggaaccgtggaactgacgatggcattgcatctttttttggattttccaaaggataagatcgtgtgggacgtgggacaccagtcttatacccacaagatcctgactggccgcaaggacgactttgatcatctgcgccagtatggtggtatgagtggcttcccaaagcggacagagagtccgtgcgattcctttgataccggacacagttctacttccatctccgcaggacttggactggcatgggcgagagagttacagaatgaggactacaaggtggtttctgtgatcggtgacggagccctgacaggcggtatggcatatgaggcgatgaataatgccgccgccctcaagaagaattttatcatcgtattaaatgataacaatatgtcgatctcagaaaatgtcggcgggatgtccagacatttgtcaaaactgcgtaccagcacgaactatgtggaattaaaagagggcgtgcagtcttctttggaaaagatcccggtttatggcgagcgcattgtatccggtattcgcaagaccaagagcagtatcaaacagatggtgatcccggggatgatctttgaagatatggggatcatgtatctaggacctgtggatgggcacgacatatccgctatgctcaaagtctttcaggaggcttcgcaggtacagggaccggtcttagtgcatgttcttaccaagaaaggatatggctaccgcccggcagaaagacatccgtcccgtttccacggtacggcaccttttgatattgagacagggatcccgctttcccatgggaaagcgacctataccgatgtattttcaaccgttatgcgcaagatgggagaccgggatgacaagttagttgccatcaccgcagccatggcagacggttgtggactcaagcgttttcacaatatgttcccggatcgtttctttgatgtggggattgcggaagaacacgccgtgacctttgccgctgcacttgcagcaggaggcatgcatccggtctttgcggtctattcctcctttttacagagaggctatgaccagatgctgcatgatgtctgtatgcaaaatcttccggttgtatttgctattgaccgggcgggacttgtcggcagtgatggagagacccatcagggcgtttttgatctgtcctatttgactgaaatgccgaatatgactgtcatggcaccgaaaaataaatgggaactttccgatatgttaaagtatgcgatcgcttatgatgcaccgatcgcccttcgttatccgagaggagaggcatatgacggcttgcaggaacaccgtcagccgatcgtctacggcaagtgtgaggagatcacagtggggcaggatatactcctgtttgctttgggcagtatggtaaagaccgccgaggctgtctgcgggcagttaaaggaaaaaggcatagaggcaacgcttgtcaatgccagatttgccaagccttttgatgcggcatatttaaaagaagccatgaccaagcactctatgatcgttattttggaggaaaatgtagccttgggcggctttggtgagcatgtggcatgtttccttcgtcgggagggctatgaaggacagatcctttccattgcgatcggagaccattttgtagagcatggcaatgtggcagtcttgcaaaaagaattagggatcgatgccgatggtatcacgcggcagatcttagaaaaattataggatagataagcatgaaagaacgtttggatgttttattggtgcaaaaaggacttgccccttccagagaaaaggcaaagaccatgatcatggagggtaatgtctttgtagacaaccagagagaagataaggcgggcactttttttgatccgtccgtgaatattgagatccatggcaataccctgcgttatgtcagccgtggcggactgaaactggaaaaggcaatggcacagtttggcattaccctagatgacaaggtctgcatggatatcggggcatcgaccggaggctttaccgattgtatgttacaaaacggagcaaagaaggtctatgccgtggatgtaggatatggacagtttgcctggaaactgcggcaggatccgcgggtggtctgcatggaaaagaccaacatccgctatgtgacaccggaggacatcggggacgctttgaattttgcgtccgtggatgtatcttttatttccctgaccaaggtcttgggaccggcaaaggaacttttaaaagacggcggacagatggtatgtctcatcaaaccccagtttgaagcaggtaaggacaaggtcggaaaaaaaggcgtggtaagggatccggcagtacataaagaggtgatcgagcgcgtgatcttatttgcaaagtccatcggatttggcatcctgcatctggattattcgccgatcaagggaccggaaggaaatatcgagtatctggtacatatcgtaaaggatgccgaggcggagagccaagaagtgattgatgtgggggcagttgtagcggcagcccatggagaactggataaataggcatgaaacatttttttgttgtagcaagagaagataaaaaagaaatcttagaatttgtgcagaaactgacggattatatcgaaaaaaagggcggaacctgctcctatgggatcaatccggatgatgcattagaagcagaactggatgtgccggaggacacacagggaatcttagttgccggcggtgacggtacggtgatccgggctgcacagaatatttttggaaaaaatatcccaatgatcgggatcaaccgcgggcatctgggctatctgtgtgatctggatgatgcatcggtctatgatgccatcgatgccatgatggcaggtgattacagtattgaagaacggatgatgttgtccgggcatatggtagatgcccagggcaatgcgggcaaagagatccaggcactcaatgatattgtgctttgttcgagtgcaggcctgcaggtcatgcgtgttgtcgtttatgtcaatgggcagtatctttatgcctataattgtgatggggtaatctttgcgacaccgaccggatcaacggcatacaatctttccgccaatggtccgatcgtcaatcctatgaccaatctcatccttctgacaccgatcaatccgcataccctaaatgccagaagtattgttctggatccctatgatgaattggtgatcgagatcgagtcgcgcagggaagatgggacagaggaagccgagatcagttttgacggcaatcacaagagattattgcatccgggagaaaaactcgttgtacatcgggcaaaggagaccacaaagatgattcatttgcgggatgtgagttttttggatcgcatccgtaccaagttacaggcggatgacgattgatggagtatagatagagttgtttgatacagtataagaggtaaggacatgaaagcagaacgtcaggcaaagatcttggatctgatcgtaaaaaaggagattggcacgcaggaagaattgaccatggaattggaacgtgccggatttgtggcaacacaagccacggtttcccgagatattcgagagatgaaactgacaaaggtagccatgagcgatggaaaactacgctatgtggcatatcgtaagaccgaagagaagatggcggaaaaatatatccgcattttccgggatggatatgtgtctatggacaacgcacagaacattcttgtcatcaagaccgtttccgggatggcgatggcagtggcagcagcactcgatcatatggaattgccggagatcgtgggaagtatcgccggggatgatacgatcatgtgcgcggtccgcagtatagacgataccattgtgatcatgagtagattaaggaaactagttgagaataaaaatgcttaagaagagtgaaaggagcaagtatgcttgaaaatttacacgtcaaaaaccttgcactcatcgaggaggaggacatcaccttcttggacggactgcatatcctgtccggagagactggtgccggaaagtccattattttaggggcgcttggtctggcacttggtggaaaggtgtcaaaagacatgttgcgggatcccggtaaggaagccttggtcgaggctgtctttcgcatcaccagggactcgcagagaaagcagttggcagaactggatatcgagccttatgatgatgaggtcatcctcagccgtaagatcacggagagccgcagtgtggcaaagatcaatggcgagatggtaccggcgatcaagatgaaagaggtgggggatatctttttggatatccatgggcagaatgaccatcaatccctgctccacaaaaaaaagcatctggaaatgttggatgagtatgccaaaaatgaagtaggaccgctcaaagagcgtatgcagacagcctacaagacctatgccgcaaagcagcaggaatggaaggaagccaaccagttggatggcgacagggagcgcgagatctcatttttagagtatgagatcaaagagatcacagaggcaaatttggagatcggagaagatgcgcgctttgaaaatcagtatcgcagattatccaacagcaaacggatcatggaggcactttccgaggcataccagcagaccagcggcagtgatggggcatcggaacaggtaggaagggctgtgcagcgtctgcatcagatcctgtcttatgatgaagccttagagcctatgtttgaaagtttaaatgacatcgacagcctgctttctgatttcaaccgtgatctgtcacagtatatggctgaggcagagtttgacgaggaaatgtttgcccagatcgacggcagactcaatgagatcaaccgcctcaaggacaaatatggcgcgaccattgaggatattctggcggcaaagcaggaaaaggaagaccgcttggaaaaactcatgcaccacgaagcctatcttgccaagttgacgcaggctttaaatgacgccaaaaaagaagcagaggatgcggcatttgccctgtccggtatgcgcaaacgctatgctaaggaactctccggcaaggtagaaaaagccctgatggatctgaattttctggatgtgcatttttccatggaatttttgcagacagatcatatcggcgcagacggttatgacgatgcacagtttatgatccgtaccaatccgggagagccgatccgtccgctcaaggatatagcatccggtggtgagatgtcgcgtatcatgttagcaattaagacggtactggcagagcatgatgatattgatactttgatctttgatgagatcgatgccggaatcagtggtcgtacagcacaggcagtatcggagaaactccatctggtcgcaaaggaacatcaggtcatttgtatcacgcatctgccacagatcgcagccatggcagatcatcattatctgatccagaaggatgtggtaggcaatgagaccatatcttcgattgaggcactttcttatcatgacagcatcaaggaactggcgcgtatgcttggcggaacgaccatcacgcagacggtcttagacaatgccaaggagatgaaagatctggcacaaggcaaaaaagatgtttaaaataaggcaaaactaacatactaaaggaaggacaaatgtccttccttttcttttttatggaggttttgcttatgtttgcatggtatcagaaaaatcgcaaaaaaacagccatagcctacggcattgtatatgtcatagcctgctattttatgcttttatcctatattcccaaagaggttgttttgcaaaaagccagtgataagatctcactggcggcacctattcgtgtgcaggaagcccatacagaagagaccgtgcagacggagcgtggaagcgatgccaagggcatacaaaagacctatacctgtaaactgtttggtctaatcccgatcgcgaccatgagcgggaccgttgtcggagatcagtccgtggatgctgtgggaagaccggtcggtatttatctgcagactcagggcatctatgttgccggtttaaaagagatccagactgtatccggagaaaaagtatctccctgtgcttatattttgcaggagggagactacattacggggcgggatggaaaagaactttcagacaaggaggacttgcaggaggcggtagaagcgtcaaaagggcaggccatggttctgtccgtcgtaagacatggggaagaaatggaagtcaaagtccagccgcaggaaacggaggatggctcatataagttaggcatttgggtcaaagatgatgtggcaggggtaggaaccctgacctatgtcaaggaggatggctcttttggggcgctgggacatggtatcagcgcgacatcgggaagtcaggcgcttagtatgaaagagggctatctgtatgagaccagcattaccgggatcacgcctagcagcatcggttcgccgggggagatctcaggtctgatccattatggcagtgcggcgcggctgggagagatcacgcgcaattccaatgtgggcatttatggcaagatgaatgggacggcaaagacggcatatgcgggaaactcctatgcggttgcttataaacaggagatcaagcgggagggggcgaccatcctgtttggcgaaggcgatgcggtggaggcttatcagatcatgatcgaccagatcgattatgaaccaaaggaaaagaataaatcttttgtctttcatgtgacggatgaaaaactcatcgaccagatgggcgggatcgttcagggcatgagtggatcgcccatcattcaggaaggcaggatcattggcgcagtaacgcacgtttttatcaatgatcctacaaaaggatacggcattttcattgaggaaatgctataggatttgtaaatatcatttttcgcgactactttcgacagcatacatacaaaatatgctgaataatgaggaacgtagattttgaagaaagtaggaggatggtatggacaaactcaatgtggcaatcgcagacgataatgatctgatgcgtcagttgctagacaccatcgtacagtcggatgaagaactttcagtagttggaacagcaaaagatggggaagaagcgtatcagatgatcaaggagaaagagccggatgtggtactgcttgatatcgtgatgccaaagatggacggactgggggtcctggataaagtacagcgggatacgagtattaaaaagacaccgaactttatcatggtaagtgccgtcaaccagccacaggtcacagaggatgcctttgctcttggggcagattattttatcatgaagccttttgataaagatacgatcattcagcggatcaaaaagacaagaagaacccgtgcctttgtagagcccggtttttatcagaaaaagacgaaggagcataccgaggctgccttagaggcagatgtgacaaatatcattcatgagatcggggtaccggcacatatcaaaggttaccagtacttaagggatgcgatcgtcatgtccgtacaggatattgagatgctcaattccattacgaaagtcttgtatccgacgatcgcaaagaaatatgatacgaccacgagtcgtgtggaacgtgccatccggcatgcgattgaagtggcatggagcaggggcaggatggatactattgatgcactgtttggatacactatcaatcatggcaagggcaagccgaccaattcggaatttatcgccctgatcacagataagatccgcttggactacaaattacgctaggcaggagggacgttccttttgccatgaggagcgttccttttggacttgggactggcacagaccagcatcctgtgccagtcccaagcccaaaggaacgcatcttcgatttgcaaaaagataaaaaaatcgttgccaaaacagaaaactttcgatataataatttcgttgctccgatagctcagttggtagagcacttcactcgtaatgaaggggtcgtcagttcgagtctgattcggagctttttccatttgcgcatgtctgaatcggagggtttatgacatacgaaatatttaaaaaggaattgatttccttacttgaggagcggattgacgcggatcaggagattgatgtgcgccctgttctcaagaacaacgatctatggttagacggactgagcatccttcagtcatctgtcaacatttccccaaccatttatttacatacgtgttatgagatttttcaagagggatcgtccctgacagaaatcgcagaccgcatacttgccagtttttctgagtatcgcctgaaagaggatgtggatctatcttttttcacggatttttccaaagtgcgggaaaatattatctacaaactggtcaatatggaaaagaacaaagaacttttggcagaagtgccgtttgttccctatttggatctagcagtggtattttgctattatattttggcggatgagaccttccctgagcaaatgacaaggagtaatgcgtctatcctgatccgaaatgatatgttagatatctggcacatcacgccgaaagaactcttatcttatgcccgccgcaacacgccaaaattgcttgcaccaaagatgcattccttttcgggactggtggattctatgctggaagcagcagggcagagtctgccggaaattgaagacatggaagatctggcagattttcagatgtatgtgctgaccaatgccaaccagtattttggggcggcagtcatgttgtatccgcagatcatgcaaaaatgtgcgaaagtgacagaaagcgattttgttatcttgccgagcagtgtgcatgagttgatcttgctgccttatcaaaatcgctttgatctggaggaaatgtctgccctggtacgtcaggtcaatgctacctgtgtgatgccggaagaagtcctttctgaccatgtgtattattatgaccatgtcaacaatcgcatcagttattcctgatgagaaaaggtggtagttgtttcttcttttaaaacttgctataatgggctaagtgaaaagaacaggagaggacacttaaaatgacaaaagcaatcaaagtatttaaaaataaaccaatcataccacttggattttttctggcggtgaccgtagtattgatcgtcgtgagttttgcggtattaaatattcccattgtggcaatctgttcgatcgccattttggaagtgctgctcagcgcacttttaaaccggatcccgctctgggtacatgggcttcttgtgatcgcacagatcgcggcaggatttatctttggcagagccgtttttatggtactcatggcaatcgtatatgtactggcagtggcatttttatatctttggacatctgaggaagcatagtacatgaagcagaattatcaacgtcttttggatcaaacgattcttcagttgcaggagcagggcagggtgccgagacttcttttgcacgcctgctgtgcgccctgcagttcttatgtcttggagtatctgtccgcttattttttgatcaccgtattctattacaatcccaatatttacccggatgaagaatataacaaacgtgtggcagaacaaaaggcttttatcgaacgttttccggcaaagcatccgatctcttttgtggagggagactttgacaaagagcgtttttatgaagtgaccaagggactggagaaggagccggagggtggaaagcggtgccagcagtgttttcgtcttcggttggaagagacggcgaaactggcaaaagaaatgcagatggactattttacgacgacactttccatcagtcccatgaaaaatgcccagatgctcaatgaaatcggcggagcactggcaaaagactatggcatttcgtatttgtattcggattttaagaaacgcgagggctataagcgcagcgtagaattatcaaaagagtatggcatgtatcggcaggattactgtggatgtgtgttttcatatcgtagcagacagcaggaaaaagaggaaaggaattaagtattatggcacagttatggggtggacgattcaccaaggcaaccgatcagttagtatatgatttcaacgcttccatcggattcgaccagcggtttttttcggaagacatcatgggcagcaaggcacacgtcaagatgcttgcaaaacagggcatccttacggaagaggaaagggatgagatcttagtcggactggaaggcatcgaaaaagatgtggcagacggcaaacttgccatcacatccgaatacgaggatattcatagttttgtggaggcaaatctgatcgaccgtatcggtgatccgggcaagaaactgcataccggacgcagcagaaacgatcaggtggcattggatatgcgcctttataccagaagtcaggtagaacataccaaggatctgctccatcatctgcttgagacaattctttccattatggaagataacacagagacgatcatgccgggctttacccatttgcaaaaggcacagccaatcacgcttgcgcatcatatgggggcctattttgaaatgtttaagcgtgatgttttgcgcttgtccgatatatacgagcgcatgaattattgtcctttgggctccggcgcattggcaggcacgacatatccattggatcgtgattatactgcagaactgctgggattttacggaccgaccgtcaacagtatggatggtgtcagcgacagggattatctgatcgaatacctgagtgccatgtctaccatcatgatgcatctgagccgtttttccgaagaagtcatcatctggaattccaatgaataccgttttattgagatcgacgatgcctatagtaccggaagcagtatcatgccgcagaaaaagaaccctgatatcgcggaactcgtgcgtggtaagaccgggcgtgtctatggggcactgatgggactgcttacgaccatgaagggcattccgcttgcctataataaggatatgcaggaagataaagaaatggcatttgatgcgatggatacggtcaatggctgcatccaactctttgatggcatgttagagaccatgactttccgcaaagacgtcatggaaaagagcgccagacatggctttaccaatgcgaccgatgccgcagattatctggtaggcaagggcgtaccgttccgggatgcgcatggcattatcggacgtgtggttctctattgcattgataagggtatcgcgatcgatgatatgtcattggaggaattgaaagagttctcagatgtctttgaagaggacatttatgatgccatttccatgtacacttgtgtcaacaagcgtctgacgacgggagcaccgggcaaggaagcaatggaaacagccattgcgtcttacaaggaatttttgaaaaaataaccaaaagaaataaggaaaaaggcaggcatttgtggaatttgtgtaaaattggaaaagtgcttgcttttttttatggaataacgtaacatattttcctagaaagacagttgtctgcgtagagcggacatgtgagaaggagagcatcatgagcgaaaaattaaaagttggtattttaggtggaacaggtatggttggacagagatttatctctctgctggaaaatcatccatggtttgaggtaactacgatcgcagccagcccaagaagtgcaggcaagcgatatgaggatgctgtgggtggacgttggaaaatggacacaccaatgccggaagccgtaaaagatatagtggtaaagaatgtcaatgaagtagaagatgtggcagcggaggtggattttgtattctctgcggttgacatgacaaaggatgagatcaaggcgatcgaggaagcatatgctaagactgagacaccggtcgtttccaataacagtgcacacagatggacaccggatgtacctatggttgtaccggagattaacccggaacatatgcatgtgatcgaatatcagaagaagagactgggaaccaagagaggatttgtggcagtaaagccaaactgctcgatccagtcttacgcaccggtacttaccgcatggaaagagtttgagccgtatgaagtggtagcgacaacttatcaggcaatttccggtgcaggaaagacctttaaggattggccggagatggaaggaaatatcattccatacatcggtggtgaagaagaaaagagtgaaaaagagccactccgtatctggggctatgtggatgaagaaaagggcgagatcgtaccggcaaccagcccggtcatcacttgtcagtgtatccgtgttccggtattaaatggtcataccgcagccgtatttgtgaagtttaagaaaaatcctaccaaagagcagttgatcgaggcgttggagaaattctccggactgccacaggagttaaaccttccgagtgcaccaaagcagtttatccgttacatggaagaggataaccgcccacaggtcacattggatgtcaactatgaaaatggtatgggtatcaatgtgggacgtttgcgtgaggacacggtatatgactggaagttcgttggactttctcataatacagtccgcggtgcagcaggcggcgcagttctttgtgcagaacttttaaaggcacagggatatatcacaaagaaatagatcatgtggatcgggacgaagttcttagggcttcgtcctttttttcttgtcaattttctcctgcaaagatataatagaaattgcgacttgttaaatgcagatttatgtatttgagataaaaagaaatggggaaacatagatgatcacacgagccacagagtataagaaattagaagaattatataaaaagagcggcaaccagttgtatattttgtatggcaggagcggttgcggtatggaactgctcttacaactctttgcaagggataaaaagtgcttttattatcatgccagaaatgcctctgccgaggaacaactgcaccagatgcaaagggaaattgaaaaacagtacgaggtcaatctgacccgcgattcctatgatgagtgctttaaccgcgttaagagtggggatgcgtccaaactggttcttatgatcgatgcttttgaccgcattgtaaaaaaagatccgcattttatggaaagcatcttaaaattaaaggcgcgcaggctttatccgggaccggtcatgatcctgctctgtcattcgtccttagcgtgggcgcataaggatatggcaacttgtctgggggatgccatggcaaaggtcgatgaggtcatgaagttggatgatatgagttttctggatgtcgtccgtgccttcccagagtattcggtggcacagtgtgttgagacttatggtatcatcggcggcgtgccggattatctcaaccgctggaatgggaaaaagagcatcaaggaaaatatctgcaataatatcctgcggccgcatggctatctgttttcggaggcagaggatttcattggaagcgaactgcgggagttgtctgtctatgacacgatcttggcatcgatcgcatccggacatgaaaaattaaatgatctttttatggataccggctattcgcgggcaaagatcagtgtgtatatgaaaaatctggcggcttttgatgttgttgaaaaagtggtttccttcgagaccggcggctgggataactccaagaaaggggtttatcacattcgcaatcattttgtgaatttctggttcacttttatctatccgcatttgtcagatctttatgtcatgagtgcggaagcattttatgaaacttatattgaaaaggaattggatacctatctgcagcagtattttgtcagtgtctgtacagaatacctgcaactgttaaaccatgtgggacaggtgccgatcaaacttgtaaaaatgggaacctgggtaggaaaagagggatccattgatattatcgggcaaaatgcgcagcgggaaaatgtagttggcatctgcagctggacagaggatgaattttcctatggaagatacgaaaaacttttggtgcagatgaaaaaggcaaagatttctgcaaatgtgatctatctcttctctgccaagaaatttgatgcagagatcgaaaaactggcagcagaacatgcagagatcgtgctggtagatatgacggagttataattttatgggtaaatccttatttatcgcagagaaaccgagcgttgcacagcagtttggtgcggctttgggtgaaaatctgagcagacgtgacggttatctggagggagagcatatggtcattacctggtgcgtcggacacctggtgactatgagttatcccgatgtttatgatgaaaaatacaaaaaatggcgtttggagacacttccttttttaccgacggagttcaaatacgaggtcatatcttcaagtgccaagcagtatggtattgttaccagcctgatgaagcgggacgatgtggataccatctatgtctgtacggactcgggacgtgagggagaatacatatatcgtctggtggaacagatgtctggcgtgaccggcaaggtcagaaagcgtgtctggatcgattcgcagacagaggaggaaatcctgcgtggggtcaaggaggcaaaagatctttcggaatatgacaatttgtccgatgcagcctatctgcgcgccaaagaagattatctgatggggatcaatttttcacgcttgctctcgatccgctatggcaattccatggcaaattttttgaatgaaaaatattgtgtggtgtcggtcggacgtgtcatgacctgtgttcttggcatgatcgtgcgccgggaaagagaaatccgcaattttgaaaagacaccattttaccgcgtgctggcgggggtcgatgtggcaggtgctaatctttccatggagtggaaagcggtcgtgggatcgcgctatgagaattcgcctttgctttacaaggaaaatggctttaaagagatggcgagtgccgtcaaactgatcgaggagaccttggagatggagcccggcagtgcggttttagatgaagaacggcgcatcatgggacaggcaaagggaagcatcgagaagatcgaaaagaagaaagaaaagaaaaagccgccgcttttatacaacttagcggaattgcagaatgactgttccaagttctttaagatcagcccggacgagacacttgcggtcgtgcaggaactctatgaaaagaaattggtcacctatccgcgaacggatgccagagtcttatcgacggctgtggcaaaggagatccacaagaatatccgtggacttttaggcattccgggtgtccgggactacgcgcagaccatcctggatcaggagatgtataaggggcttgccaagacacgttatgtcaatgacaagcagatcaccgaccactatgccatcattccgaccggacagggcttgtctgccttaaagggattaaacagcagggcggtttatatttatgagacgatcgtgcgtcgttttctggcgattttttatccgccggcagaatatgaaaagttaaatcttactataaaaagtggaagtgaatacttctttgcatccgagaaatatttaaaagagccgggctatcttagcctgatggaatattctttccgcaagaaaaaaactgccacggcggatgccaaggaggcagcagcggtggataatggctcggaggaaaacgagggcgaagaggacgagaatttaaacatcaatatggcggaagtccttgcccagatcaaaaagggcgatgaggttgggatcggcagcatgcagatcaaggaaggcgagacttcaccgccaaagcgctacaattccggtgctatgatccttgccatggaaaatgccgggcaactgatagaggatgaggaattgcgttcccagatcaagggaagcggtatcggaacctctgcaacgcgtgcagagatcctaaagaaactggtaaacaacaagtatattgccctaaataaaaagacccagatctacaccccgaccttacagggagaaatgatctttgacgtcgtgaatgcttcgatcccgtcacttttaaatccggagttgacggcaagttgggaaaaggggctgacctacgtggcagacggtgagatcacggcagatgaatatatggtaaaattagagaattttatcaaacaaaagacagcacgtgtgctggcaaataacaatcaatatgccatgcagggtatgtaccgtgcagcagcacaatattataaaaaatagaaaaggatggaaaagaaaatggaacattgcaaagtaaaaaacatgtatgacctgacacagacattggcagcaccattgcttgaaaccgtggattatccatgggaggcattgccaaaaataggagagtttattaaagaaatcggaccaaagcttgacccggaagtttttgaacggcgtggagaaaatatctggattgcaaaatcggtatccattgcagcaacagctacattaaatggtccgctcatcattgatgaagacaccgaagtacgtccgggcgcatttatccgtggcaatgttattgttggtaagaactgtgttgtagggaattcaacagaattgaaaaatgttattctgtttaatgttgttcaggtaccacattataattatgttggagattccgtacttggtttccattcacatatgggggctggttccattacctct

SEQ ID NO: 12472 - DNA, 23108 bp, Unknown
  gut microbiota DNA sequence
cctcctcatctatatggtataattataccataattatatcctttttcaatttcttttatacagtaaaacatgtaaaaaaacttagcctatataagaaaaacggtcttttgactgtgtcaaagaccgtttttcttacgattttatttagtttaaaagaaccgatattattcagaaaatccagcaaaatcaatgttttacgcttcctcgttcatttttgctaatttctttgcctggtcggctgcgatacaggcatcaatgatttcctgaatatcaccattcataatcttatccagcttgtacaatgtcagattaattctatggtcggtcacacgtccctgtgggaagttataggtacggatcttctcagaacgatctcccgtaccgatctggctacgtctttcctccgcttctgcatcctgctttttctgcatttccaaatcgtataacttggcacgtaagagggcaaatgcctttgccttattctgcagttgggatttttctgtctgggaataaataacaataccggtcggataatgagtcaaacgcaccgcagagtccgtcgtgttgacacactgtccaccgtttccggacgctctcataacatcaatacggatatccttttcatcgatctgtacgtctacttcctctgcctccggcataacagccacggaacaggttgaagtctggatacgtccctgggactcagtctccggtacacgctgtacacgatgtaccccggattcatacttgagcacggaataagcgccctcgccctttaccataaagttgactgacttcataccaccgatgcctgtctcgtctgcttccagaagttccactttccagccacggctttccacataatgtacataaagacgatacatctctgccgcaaaaagggctgcttcctctccacctgcgcctgcacggatttctacgataacgttcttatcatcattcggatcctttggcaaaagcaggatttttaactgtgtctctaattcttcaatgcgctttcttgctgtggaaagttcctcttttaacatatcacgcatttcttcatcggattcttcttccagcatggcaagagaatcgtcaaccgtctctttgcatgccttgtattctttataggcatctacgatcggtgccagatttgcctgttccttcatcagattgcggaaacggttggtgtcgttggcaacatccggttcgcttaataggttcatgacttcttcgtagcgaagaatcaggtcgtctaatttatcaaacatattggttcactccttatataatctttctaggcagatgttcaacttcatatcagtatccgctacaagtcgtgcaggcgggcgcggacaacgcggtcattaccggcataatcttttatgacggcgatgtcacaaaagcctgcctgcgccagcagatccgggacgctctcgccctgatcgtagccgatctcgaacaaaagccgaccgcccggtttgagataaagcggtgcctgttcaatgatcttgcgataaaaatacaagccatcctcgtgcccgtccaatgcccgctttggctcatggcagataacctccggcatgagttcttccagatcacgcgtcacaatataaggcggattggaaacaatgacatcaaactcgccattcacttctgtaaaaagatcactgaccagccactctgcctccacctgattgtgcacggcattttccctggcgagtgcaatagaagtcgctgccacatcaacgcccataccctgacaagtctttttttcatgtaaaagactgatcaaaatacagccgcttccggtacacatatcaagaataagatcgccgtctttaaggacagacagtgtctcttccaccaaggactcagtgtcttgtctcggaatcaaaacctccggcgaaactgcaaaggacagtcccataaattcctgttccccggtgatatactgcaaaggttcatgcgccgcacgcatttttataaactcgcgatagcgctctatcacatcttccggcgcctgctccatcatacacataagataagacgcccggttcattccggaaacatattccaagaggtactctgcatcgatctgtgcatctgtgatccctgcttttttcagttcttccatgccctcttttaagagttctctatacttcatcgaagcactccttattttcttcttggaactttttccagtcaaagaccgcttctaccgatgccatccctacttcgatcatggcatcgtccggctcactggtcgtcagattttgcagccacaagcctggcttactgagaatctgcaccagaggattttcactgcgtcccgccagacggataaactcataagaaacgccggcgatcaaaggaatcaagagcaaacgacataccagttgcaagaccggtgagtcaaagcggataaacataaatacgaccacactgatgatgagcacaaagagtaagaaactggttccgcagcgtttgtgctggcgcgaactcttacgcacattttccaccgtcagtggcagaccatgctcaatacagttgatgcacttgtgttccgccccatgatacataaagacccgcttgatgtcttccatgcaggagatcgccttcacatagaccacaaagatcagtatgcggaatatgccctcgatcaaagccatcagcgttgtcgaatctacaaatcttcccacaaaacgggaaaaataatatgggatcaaaaggaaaatgaccagcgccagaacaatggaaaacaaaagtgttcccgtcatttctgccttgtcctgtttttctttctttttcttttcttcctccgtcaagacctttggttcttcctcctcaaaataggatgccgaatccatcagtgttgacataccgatcacaagggaggaaacgaaactacagataccccggatgatcgggatcttataccagatgccgtcctgcccttttgtctttttcttatctacatggatcgagccgtcatttaagcggaccgcaatcgcataatcattgccattgcgcatcatcacaccttccatgaccgcctgaccgccaataccggaaaatttcatgtgcaaatcccctatattatttgccatttctcatgacataaaagaatagggtcagacccgaaagatctgacccctgtaagcgactgtgtcctactgctcaataccgtacttcttgttgaacttgtcaatacgtccacgagcctttgtagccttctgctgtcctgtgtagaaaggatgacacttagaacagatttctacgtggatatcttcctttgtagatcctgttacaaatgtgttaccacagttacatgttacagtagcctgataataatctggatgaataccttgtctcattacttacacctctctaaaaacataatctattgtattgcatgttttatgtccgaagacatacacgatactatttacatcccgataaacagctccattattgtagcatagggtctgtcagattgcaagatgtatgcgcattttttattagaaattttagaacatacggctgcggagtaccttggcgatatattctttattgtttctggtgtgggcaaacatatttaagatgctctccactgcttcatccttgcgcatgccgtttaagccacggcgcatgatctccattgcattctgctcttccttatccagaagcaaatcgtcacggcgtgtaccggattttgcaatatcaatagcagggaatacgcgcttctcagaaagtttacgatccaggatcacttccatgttaccggttcccttgaattcctcgaatacaacatcatccatcttgcttcctgtatctaccagtgccgttgcaagaatggtaaggcttccgccctcacgcatatttctggctgcaccaaagaacttctttggcatatgcagagctgccggatccagaccaccggataaagtacgtccacttggtggaaccgtcaggttgtaggcacgtgccagacgtgtgatgctatccatcaggatcatgacatcctgtttgtgctcaaccagtctcttggctctttccatgaccatctcagacacacgcttgtggtgttccggcaattcatcaaaggtagaatagatcacttctacatttttgccctgaatggcttcccggatatccgttacttcctccgggcgttcatcgatcagtaagatgatcagatgcatatccgggtaagaagttgtgacagactttgcgatctcctttaaaagggttgtctttccggcttttggctgggaaacgatcataccacgctgtcctttaccgatcggagaaaccaggtctacgatacgcatagcaacggaagatcccggctgttccagacggatacgctcgttcgggaagatcggtgtcagatcttcaaaattcttacgctttgcagcttcttccggtgcaaatccattgatggtctccaaatgtaccagtgctccaaacttgtctgtcggattgttacgtctagtcttgcctaccagaatgtcgcccgtctttaagttgagtttgcgaatctgcaatggtgccacataaacatcgttatcacccggcaggtaattgtcactgcggataaatccaaagccgtcctgcatgatctctaagataccggcgcagtctctcggttcttccagtacaggtgcttctgcgttttcctcaccatgttctgcgcgcacattttcatgatgctcgcttctatgctctcttctgccctctgcactgccacggctatgatgcacgctggtcgtacgctctgttttctctgttttctctgttttttctgactctgccttagcagcggtctttggctttgcggcttcttccgctttcttgctttctgcctcgctctcatcgagtgcaagcatggcttctacaagttgtgccttcttcatggtcgaagtccccttaatgcctcttgactttgcaagttcacgcaatacactggcagataaactttcgtatttttctctcatgccctgctccttgtcctacttcatttatgataaactctttgtctttatctctaatccaatgggtaacctgtctgaaatgacctagatcatcacgattgcatatagtatatcttatttgcgacaaaatgggaataccctattttagattgccctcctttatgctataataaggaaacaaatagattcatatttttacaggaaggataggataaaacatcatgagtattgacgaaaaagccgtttttttacacaaacaatggaatggaaagatcaagacctgtgcaaaggctccggtcaagagccgtgaggatcttgccattgcttataccccgggcgtagcagccccttgccgcatcattgcagaggataaagaagccgtatatacttacaccctcaaggcaaataccgttgccgttgtctctgacggcagtgctgtgctcggtctgggcaatatcggacctgaggctgccatgcctgttatggagggcaaatgtgtcctcttcaaagagtttggcgatatcaatgcttttcctatctgcctgtcaacgcaggatcccgacgagattgttgccgcagtcaaggcgatcgcaccgacctttggtggtattaacttagaggacatttccgctcccagatgttttgaaatcgaggaacgtctgaaaaaagaattaaacattccggtcttccatgatgaccagcacggcacggcgatcgtcgttcttgccggcatcatcaatggtcttaaggttgtcggcaaagacaaagaagactgtcaggtagttgtaaacggtgccggttctgccggaatcgccattaccaagttactgctccgctacggtttcaatcatgtgaccatgtgtgaccgcgagggcatcatcggcaaagattatccaaatctgaactggatgcaaaaggaaatgaccgaggtcaccaatttggaaaataaaaaaggatctcttgctgatgccttagtcggtgctgatatctttgtcggcgtttctgctccaaacattgtttccgccgagatggtcgcttccatgaaccgcgatgccatcatctttgctatggcaaaccctacaccggagatcatgccggatgtggcaaaggctgccggagccaaggtcgttggtaccggacgcagtgattttccaaatcaggtcaacaatgttgttgctttcccgggtatctttaagggtgcgctggaaggccgtgcgacacagatcacagaagacatgaaactggctgccgcaaatgcgctggcaaaccttgtggatcctgatcaattaaacgaagacttcattttaccggaggcttttgatccaagagtggctcaggtggtatcccaagccgtcaaagatcacattgtaagataaatgccgcatgccacagggacgttcctgtggctctgcaaaaagaaaggagaaatttatggccgagcctaatatgatctacaaaatttcagtgctgcttcttctctctaaagtagatattcctctgagcaacgctcagatcgttcagttttttttagataaagaatacacagactattttaccatccaacaggtcatcagtgacttggaggaagcccatcttgtgagtctttcccagtctcacaacaataccctgtactccctgacagatgagggaagtcagaccctgtctctcatgcgtgacaaggtcagttctgccattgaggcggatatggtcgagtatctgtccaaccacaaatttgaaataaaaaaagacaatgccctaaccgccaactatgaccttgcaaccggcggtggttacattgtccattgtaaattcacacaggacggacacactatgctggatctgtcactacacgcttctaccagcgagcaggcagagaccatctgcaataactggaaagtccgccatgaggatgtctatatgagtctcatggatactttgatccaataatttttgtaccaaaaatcaaaaagccgcaggatgccctatgatatgcaccctgcggtctttttactttttcttctttaccgaatagccaaatgtccctaacttttctcccagactatagtatgtgccatgggaataggcgatcggttccgcctgatccagacaaaatctgcctgtctcgtccatatatttttcatctgcatgaactgccaccacatctgcaagaaacatatgatgggagccaagttccttgatctcgcgcaccttgcactcgatattgaccgggctttctgcgatcagcggtgccgaaacctcgtcggcgacttcctttgtcagatgacacttggcaaatttatcgacatcccgtcccgatgtcacgccacaataatcggtcgcccatgccagatccctggtcgtcagattgatcacgaactcgcccgattcttttatcatatgataagaatagcgctccggccgcacagaaatatatgccatgggcggattggtacagatggttcctgtccacgccacggtgatgatattatcctgccctgcctgatcccgcaccgacaccataactgccggcagtggatagaccatatttccaggtttccatgactgttttgccatttttctccttctctttcccctatgactgcattgcctgcatcataggcgggatcaactgtttttttcgcgatacgacatttgcaagcataaatccgccattttcctctgacacgccaaaagcctgttcgatcacaccttttgccatgcctccggcatagatgagttcggtctcctcctgaaaaatatcggtcagcatgacaaagaccatcttgagccccttctctgccaataccttttccagatatgcctgcaattccggcttgatcgaattcaactgtctgcggctgaccgcgctgacctgtgccacgccaaaggtaatatcatctgaatcaaagatcttgaaatcctgataaaagatctcttcagtcgtcttggcgctgaaatcggatcctgcttcaaacatggcagtcgccaattcttccacattgacctctgcgatctgcgccaactgctctgctaccatcttgtctatagcggtgcaggtcggtgatcggaacatcagggtatctgaaaggatagcagagcacaaaagtcctgcgatctgcggattgatctccacgcccttttcctgatacatctgataaatgatggtcgccgtacagcccagcggctggtttctgaaaaagatcggcgaaatggtctccagactgcctaatctatggtggtcaatgatctccaggatgtccgcctgttcgatcccgtcgaccgcctgcgtcttttcattatgatccacaaggatcagttgtttctttttcatattgagcaagtttctgcgcgacatcataccaaccagatgacgctgctcatccaagattgggaagtcgcgatggcggatctttgacatagtctccttgacgtcatccacatagtcatccggctcaaaagtgatgagattttctttggtcataaaatagcgaatcggcatactctgatggatcagacgcgccgttgtaaaggaatcatacggtgttgtgatcagcacacattccttcttctgcgcccgctcaatcacgcccgggttgaccttggtctccccacagatgattacacaacttgcattttgctcgatggcgataagttggcgcgccgtgatatttcccacgatgactagatcatcatcctcgatctcatcacgcatggtctcccggttgccggatgctacgacgaccttgcccttggtaaaataggcatgatcgttgcctgtcaccatgcagccgttgatggtctcgatgacattgcgatactgggtcttggcacgtcccaaaatacggttatccaagacatccatataggaatatgcgatatctccattgacgatcagaccagtcagacgtttgctctcatccacgaccggcagggtaacaacatccagagaacgcatgagttcccatgcctttttcaacgaaaaatgaccactgacaccctcggtctgacgatagtcaatatccttgatctgggcgccgacatccgtgatcagccccggttcttttgccccaaaacgctccagcacataacgcgtctcattgttgatgctccccgctctctttgcgataaaatgaccgtcctcggtctgatttttcaaatatgcatatgaaatagccgcacatatggaatcggtatccgggttcttatgccctacgacccaaacacatctttcctgttttgccataataccctccttagaaaaagggctcctaaaaagaagccccatcctgtcaaaatactgatactatgtatgatattagataatgccaaaagttgctaagatcagtgtcacaactgcaacgacattgacgatagaaacaactgtcactaaagtaatgcgcttcttgacaacagagaactcctcctcgctcttcttggctgtttcctcgcgattatccaattcctttaaaagatcctgaatattgcgatattgcagtacattctcagagtgtaccttctcagacagttctcccttgatcgcatccaagccggatgtcatatcctccaaggtgtccttgactgcctgtgtctgaacggctgcattttcctgattgtccgccacttgctgctgaatgcgctgctctaaatcatctacgcttccgcgcagggtctgcatcatgcgatccacctgtgtctcgacatctgcggcaatcccgtcagcctctgcctgcttcttggcaagttcttcctgcaactggttgttgcgttcttccttggcgcgaaccatcgcctctaattccttgaccttgcgctccttggcactgatcagggtctgtaattgctttgccttatctcgaaatgcatcaatctgagcaaggagcatatcttcaccactcggctcctccaacatctcgtctacctgattttctaccttaatctcttccatgatacatgtcccttctttaatctaaagtttattttatcattgcatgtcccctttgtaaacacactaaatatggtagtcgctggatcaagcaggcacagggcaaaaaaatcccgccggagcaaatgccccgacgggatttatcagaagcgcatcagcacctctttattttagctgtaaagatcaactaacttctgtaagtgatcgtaacgttccttagcagcttcttcagacttagcaaagagtctttcagcacgctctgggaatggcttgatcagacgagtataacgagcctcgttgttcaagaagtcttggtaagaaccgtctccagcctttgatgtcaaagtgaatggattctttccttctgccttcttagcaggatcgaatgaaaacaggttccagtaaccagcggctactgccttcttcatttcatcctgacagtggttcataccacccttagcgataccgtgcaactcacatggagcatatccgatgatgagtgaaggtccgttgtaagcttcagcctctgcgatagccttaacagcctgtgcagggttagcaccaagtgcgatctgtgcaacgtatacataaccgtagctcatagcgatctctgcaagagacttcttgccgatttccttaccagctgcagcgaactgacatacttcaccgatgttagaagccttagaagcctgtccacctgtgttagagtacatctctgtatcgaataccataacgttaacattctcaccggaagcaagaacgtgatccaatccgccgaatccgatatcgtatgcccaaccgtcaccaccgaagatccatacagacttcttagcaaggtaatctttcttagcaagtgcttccttagcatctgggcatcctgcagctgctgctttttcaagttcaactacaagtgcttctgttgcaggagtatttgcctttgtatcatctactgtatccatgaatgcatcaaatgctgccttaagttctgcaggagccttatcgctagtagcgcaagcctttgctgactcgatagccatatcacggatatatttctgtccaacgtacataccaagaccatgctcagcgttgtcttcgaacaatgagttagaccatgctggtcccttcttagagtccttatttactgtgtatggtgatgttgctgccgggttaccccagatagaagaacatcctgttgcgttagagatgaacatctgctcaccgtagagctgtgtgatcaatctagcgtaagatgtctcagcacatcctgcacaagagccagagaactcaagaagtggctggttgaactgtgatcccttaggagtgatgtctgataatccaacatccttcttaccaacgtttgcaactaagtagtcaaataccggctgctcatctgcctgtgattcctgtggaaccatagcgattgctgctgtaggacatacagtaacacattcgccgcatcccatacagtcaagaggagatacgctcatggtgtacttgtaatctccacccttaggcttcatatcagcaagtttgatatttgaaggtgcagccttaacttcgtcgtcactcagtaagaatggacggatggttgcatgtgaacatacaaatgcacagttgttacactgaatacacttctctgcatcccactctggaaccataacggctgtaccacgcttctcgtatgcagaagcacctgttacgaactgaccatctacgcaatctgtaaatgcagataccggaaggctgtcaccatccatctttgcgatcggatcaagtaaatcattgacaagtttaacaacttccggacgacctgtacgctctgccttaggagcatctgcttctgggttagcccaagatgcaggaacttctaccttatgtacagcgtctacaccggcgtcgattgccttgtagttcatttctacgactgcgtcacccttcttgctgtaggacttcttagcagcctgcttcataaattcaacagcctcgtcgatcggcataacatcagctaacttgaagaatgctgactgtaagatcgtgttggttctcttacccattccgatttcgatagccttatcgatagcgttgatcgtgtataactgaatgttgttatcagcgatatacttctttgcttcagcgttcagatgatgtcctaattcttcatcagaccactggcagttgatcatgaatactccgcccggcttaacatcctgcaccatcttcataccctgtgtaacgtatgctgggttgtgacatgcaacgaagtcagcctggttgatgtagtatgggcttctgattgggttgtcaccaaatctcaagtgagaaattgtaacaccaccggtcttcttagagtcatactggaagtatgcctggatgtacttgtctgtatggtcaccgatgatctttgtagagttcttgttagcacctacagtaccatctccaccaagaccccagaacttgcattcctttgtaccaggagcagaagtgatcggagccggcttaacctctggaagtgaaagatgtgtaacatcatcttcgataccgattgtgaaacgatgcttaggagcatccttctctaattccttatatactgcaaatacagatgatggaggtgtatcctttgatccaagaccataacgtccgccaactaatacaacgtcattcatacctgcttcacgaagtgtggtagcaacatcaaggtataatggctcgccaagagatcctggctcttttgttctgtcaagtacagcgatcttctttgctgtcttagggataaccttaagtaatgcttctgaagaccatggacgatacagacgaaccttaacaagaccaaccttctcgcctgctgctgtcaagtaatcgataacttcttcagcaacgtcgttgatagatcccattgctacgataacgcgctctgcatccggagcaccatagtagttgaataagccatagtttgtaccaagtttttcgtttaccttgttcatgtacttctctacaactgcaggtaactcatcgtatgctgtgttacatgcttctctatgctggaagaatacatctccgttttcatgagaaccacgagctgctgggtggttaggattcaaagcgtgtgctctgaactcttctactgcatccattggacacatttctttcagatcttcataatcccatttctcgatcttctggatctcatgagatgtacggaaaccatcgaagaagttaaggaatggaaccttgccttccaatgctgccaaatgagcaaccgggcttaagtccataacttcctgtgggtttgtctcacataacattgcaaaacctgtctgacgacaagcgtaaacatcactgtggtcaccgaagatgttcagtgcgtgtgatgatactgtacgagcagatacatcaaatacacatggcaactgctcaccagcgatcttgtacatgttagggatcataagtaaaagtccctgagaagcggtaaatgtagtggtgagtgcaccagctgcaagtgaaccatgtacagtacctgctgcacctgcttctgattccatctctactactttaactgtgcttccaaaaatgttcttctgtcctgctgcagaccactggtctaccatatcagccattggactagaaggggtgatcggatagatacctgctacttctgtgtaggcgtatgctacatgagctgcggcggtattaccatccatagattgttttgatcttcccatgtcgtttcctcctaaaagactcttttcttaatatgtacataagcatttgccgggcaccaaaaagggcgcagtaaatgcgtaatgtctctaattcaataatataagattttgacaaaaaaaaatcaatacttcccactgtttaaaatcaagtacattccagcacattttatcccgaaaatccttgcaaaataaggaaagtacgatacaatagtagacggtgtttaaatttagcaaatttatgaggtgtaaaaaatgatacaggcaagtaatatcaccctgcgtctagggaaaaaggcactctttgaagatgtaaatatcaaatttacggaaggtaactgttatggactgatcggtgccaacggtgccggcaagtcaacattcttaaagatcttatccggacagttggagccgaccagcggcgatgtcatcatcacgccgggacagcgtctttctttcctggaacaggatcactttaaatatgatgagtttacggtcttagatactgtcatcatgggaaaccagcgtctttatgacattatgaaggaaaaagatgctatttatatgaaggaagatttcacggatgaagacggtatccgtgcaagcgaacttgaggctgaattcgctgacatggacggatggaatgcagaaagcgacgctgctactctcttaaacggtcttggcattgagccggatatccactactctctgatggcagatctgaccggtgcccagaaggtcaaggttcttcttgcaaaggcacttttcggaaatcctgacatcctgcttttggatgagcctacaaaccacttggatctcgatgccatcgcatggctggaagaatttttgatcaactttgacaataccgttatcgttgtatcccacgaccgttatttcttaaataaggtatgtaccaataccgcggatatcgattatggcaagattcagttgtatgccgggaactatgacttctggtatgaatccagtcagcttctgatgaagcagatgaaagaagcaaacaagaaaaaagaagaaaagatcaaggaattacaggactttatctcccgcttctctgccaacgcttccaagtcaaagcaggctacttccagaaaacgtgctttggaaaaaatcgaactggatgagatcaagccttccagccgcaaatatccttacattgatttccgcccacagcgtgagatcggtaacgaagtcttaagcgttgaaaatctgacaaagacgattgacggcgaagttgttttagatcatatttcctttaacctgcgccgtgaagacaaggttgctcttgttggtgcaaatgagcatgcaaagactatccttttcaagatccttgcaggcgagatggaaccggatgaaggttcttacaagtggggcgtgactacttcacagtcctacttcccgaaggataatacagagatctttgataccgatgatgtcatcgtagactggctgacacagttctccgagatcaaggatgcgacttatgtccgcggtttccttggcagaatgctttttgccggtgaagatggtgtcaagaagatgcgcgtcctctccggtggtgaaaaggtgcgtgttcttctctcccgcatgatgctcgaagcatccaacgtcctcatgctcgacgagccgacagaccacttggatatggagtccatcaccgctttaaataacggtctgatcaagttcccgggtgttgtaatcttttcttcccgcgatcatcagtttgtggagacaaccgcaaaccgtatcatcgagatcatgccaaatggtcagatcatcgataagatcacgacctacgacgaatatctcgaaagcgatgaaatggcacgtaaacgtcaggtctacgccatgagcgatgatgacgctgccgacaactaattgattttaacatgctttctagcccttgcatgccaaaagccatccagtgccacgatcataaaatcgacactggatggctttttccaataacttttttcaattgcgacacactttatgcgctatttttcttcctgtaagatcagccgcgcttttttgagtgctacggagatcacacctgttaaaatggttgcagagatcatctcacagatggcattgacacctacaaaagcacagataaatacgatgatgttacgtccaccgatcagattcttcacatagtctgtatttccgaacagaacaaccaatgccaccatgaaaaataccgtgtttaaaaaggcggataaaaatccggtgatatagccggccagtgtcgtattcttggttactttacgaagccaacggaacagatagcccaaaagccacccatctaaaaatcgtggtacaaaacgctggataaaagcaagtaccgggctgatactaaaaagtgttgcccccatggcactgacaccaccgatcccgatacactgtccaaaactggtcagtccaaatacggctccaagcacggctccgcccaatgggccacaggcaatggctgcgattgccaccggaatcatattaaatgtgatcgcaagtggtccgatattaagatatcctagcggcgtgtatgacataagtaccaaaactgcaatcatgagtcctaataccgtcaactgttttgttgataatttttttgttttcatttctctatcccttatgctgaatgttaatatttaccatagagatagtaccacagcgcaaggcacaccgcaaggaagaactttatttggtcatcagacgataagatacggaatccgccaactgctctaaagttcttgtagcacaggtcttgacatcctccatatccagatactgtcctctgttgtaaccgcggtaagtaaccgtcttacttccgtctgcattttctgtcaccgtagcgatcttttcctctacttttttctgcactttttcggaaagttccacaccaggagtaaccgtcgtttcaacccggtccggaccttgtgcatccggttcaaaggcattccagaactcaaccacgtttttaaaaaatccgccgtagaccttaaattcctgttcacgcacatagccattgtctgcaaactctgccggcgttccatgtacggccgcctttaaaaactggctgcgatagccacccataatcagatcatttcctgctgcaaggtcaagatgtttttgactctttgaaccccagtctgtcataaccagtcctcggaatccccactcaccgcgcagcacatttgtgatcagttcataacttgatgatgtgtgcgtgccatttaagcagttgtaactggtcatcacggtctttggatctgcttcgcgcacgcaaatttcaaaccctcggagataaatctctcgcagtgcacgctctgttaccgtgttgttttcccgcgttcgatcctcctcctgattgtttgttgcaaagtgtttgatggaaacacctgcacccggtgtcttctgcacaccgatcgtcatggcagccgccattttcccggaaagaagcggatcttcagaaaaatattcaaaagcacgaccgccgagtggatctctgtgaatgttcatacctggacctaggataatgctgtggctgtatgcttccaattcttttccaatgccgcttcccatcagatcagacaggtcgttatcccatgtctgtgctagaaccatacctaccggatatcctgtcacgcccataaacggcagatgacagcccgccggaccatccgtcactttccagtttggaataccaagagaatctacatacaatgctgtggtagagccggaagaagtcggaccacctaccggcttatactttctgttggttctctttggaacagaatgtggcacctcatcagctgcgcccgctaccagacgaaaaagcacttcctcgtccaaggaatccacaaaatcagccataggcacacgtttttccacaacatcgataaaagtagccttggcattgcctttgccggaaacacgtttttcaaccggcttggctgcgccgtcaacagtctgacaatctgccgctgatagttggatcattttcaagtttccgctctctgcccgtgttcttgcttctgccgtttccttttgtacacgttctatacatgcctgtggtgtcgtaaggacatccatctcatgatctgcctgcaattgattgcttacctgacgcagtcttgctgtcgcatctaggcaaagtaatgccgccactgccgtattcttagaatcacttcccaaacggatcagataatctccggcttccatgataaatgctgcggtttccatatcataacttgccatagattccgttggaattttaagggtaagttcctctgcttctcctgcatcaagagccttcgtcttgccataggcttttaattcctgatatggtttgcaaagtttaccgtttggtgcgctcacatagacctgtgccacaaaacgtgatcttatagggccaacattttttaccttaaccttcaatgtgacttctttccaatctgccgcaatatccaccagttcatactccggtttgccataagaaagtccatagccaaacggataaagtggttctacgccaaaactgtcaaaatagcggtaaccgacaaagatatcctccacgtaatcctcctgcagattgttgccgtcattggaaccaaaagtagcacttgccggattatcctggtatttttttgcccaggtatcggtcagatgaccggatggactgctttttcctgtcagaatatctgccagcgcatttccggcctccatacctgcctgtcccaaaagaagtgctgcgtcaatcccctcgatctcctcaataaaattagcgtccatcacacatgtattcagtatgataatggtatgttcaaaggatgctgcaactttttttatgttatccatttcccgatcagacagataataatcccctttttttgcacgtcgatcatgattctctccggcatttcttcggacaacataaagcgccgtctttgcactactactttctttgatatctgcatctgtcacttcaatatcatcaatcagaatgctaaggccagaccatgaccgatccagtttggacaaagtcttatcttccttatttgcttttttactggcctcctgataacgctttaaccagttttttgatgtaatttgaatgcctgcattttccaatccctgcatgacatttatcgtataaggtgccataacataaccagagccggatccgcacacaatggtatccactgcgcccgccccaaaaagtgccagttctttttcagccagcggcaatagatccccctcattcttcaacagcacaataccgtctgctgcgatctttcttgcatcctgcatatgctccggatatggatgttttgctgcttttccggtgataaagccaatcgcctgccgaatatccataataaaaacctcctgcctgtttttttattattttaacatcttaaagatacaaaaagaatattcattttatatgattgatttacttaataaacataatgtatacttaaagactctatccgggattatctgcatcggaaaatatcatcataagcactcatgcacgcccctatgtttatgattcactattgacccggtagtattcccatgcacattgtgctatcatagattactgaaccaaaacacattttaacagaaagaaaaacacatgaagataaaaaatacactcagcatacttctttgcatcatcaccatcgctcttactcttattttccatgagcgtttggaagaaaaaataccgcatctgcatgcacaaaatgtaaacgctgccgaggatttcttgccagattcactgtatgccggcattgtttcccagacctatcaatacaaccacaaaatcataaccggagagatttctctcgatgatattgctcctttttccgaagaccaggtctacacctttttacagggacaccgtgcctggagcgccggtgccacatggtctggccaatggtgtcagaaatacgccaagggacagtatttcagtggttttggctgtggtttctgctgtgttgccaatgtctatagcaccctttcgccttacacttgctctccccttgacgtctacgattatgcctataaggaaaccggctatgctcctaccaaggcatccgcagctttggattggggcaatatgaaagtcattcttcgagatatgggaatggactgcgatgtgtattataaggcgaacgactatgcagattttcaaaagcaggtaaagaccagcaagatgaccatcgccctcgtcagcagtgccaatgatgacaaactctggcaaagagttccgggtcactatgtgacgctctgcctctataaccccacggatgacacgattctcctaggtgacccgggatctccgaccaacaaccggtcgcgcgttcccctatcctacgtttatgacgcactaaaaacgaccagcaagtttcaatacctactggtcgatgattacgcagaggcagacaatacttggctgcatgacgggatcgatgacaactggatcgcaccggagaatttataaatctaccgatattccatgtcggcgtagacagaggctactgtagttctggcggattgctgctgaaggacgaatattcatattggcacctccttgaaatagctgcgatagtaatattctactcatctcatacaacaaatacagaaaaattgatcagattggttcttaatgaaaaaacctatccctccagatctaggcgcatatagatcagttcctgatatccactcattctggaacaaaagcccttgggattgcgtccatattccacaaaacccagtttctggtataagtggatggcagatacattatccgctaccacatctaattccacttgcgcatagcctgcatcttttgcacactgcacacaggctttggtcaatgccgtaccaagtcccagtccccagtattcctttacaaggcaaataccaaattctgcccgatggctgactttgtgacatgcgcccacagcatcgatccctgccattcctaccacctgatttcccaccaacgcaaggatttccacctcatttgcacttgctgtttttctttccaaaaactcgctttcctgttcagcatccatagaggactcatccggataagatagaaggaaatctgtttcttcatgcgtaaggttaaaaacttccagcgctgcctgcccatcagaagccactccacttcttaaaattgccgcctgtccatttttcatgatcaaattttttctgtattgcatacctgttcctttcgtgtcatgtactttttatccatcataacacaaagaataaaagcattggtgagttctctattttatcaagatcatcaatgctttttcctcgttttttctccgtgaaatcttacgattttcctacaaatattttaggtctgtggtaagtcagccaatgattttgccagttcttcatcggtcgggatgtaatcgcccatctcgccgtcattgtatttctggtatgccaccatatcaaagtaaccggttcccgtcaagccaaagacaatattcttttcttctccggtctccttgcagcgcagggcttcatcaatagcaaccttgatggcgtggctgctttccggtgccggtaaaataccctccactctggcaaactgctctgctgctttaaagacttcagtctgctctacggaacgggcctccaacaatccctgatcgtataattcggatacgatggaactcatgccatgataacgcaggccaccggcatggttggcagacggaataaattcacttcccaaggtgtacatctttgccagcggggtaacctttccggtatcgcagaagtcatatgcatatttacctcttgtcaggctcggacaacttgccggctccactgcgatgatctggtaatcattctcgccccttaacatttcgcccacaaatggggagatcagaccgcccagattggaaccgcctccggcgcatccgatgataacatctgctttgacgccatatttatccagagctgttttggtctctaaaccaatgacagactgatgtaacaaaacctgtgccaaaacggagcctaacacatatcggtaaccttcctgcttggtctcagcctcgactgcttcggaaatagcacatcccagacttccggtcgttcccggaaattctgcattgatctttcttccgatctccgttgtcatggaaggggaaggtgttaccgtcgcaccataggttctcattacctcccggcggaatggcttttgctcataagaacatttcaccatatagacctgacaatccagatcaaaataagagcatgccatggaaagtgctgttccccattgtccggctccggtctctgtcgtcacgcccttcagaccctgcttcttagcataatatgcctgggctatggcggagttcaacttgtgactgccggatgtattgttgccctcaaacttatagtaaatatgtgccggtgtgccaagtttttcctccaggcaataggctcttactaaaggcgatgggcggtacattttataaaaattccggatctcttccgggatatcaaaatacgctgtcgtatcatccagttcctgctttgccagttccgtgcagaataccgcttccagatcctcaacggtcataggctgcaaggttgcagggtttaagagtggtgcaggtttcttcttcatatctgctctaacgttataccattgctttggcatctcctgttcatccagataaatcttgtagggaattgttgtcttgttcatgtttcttcctttccttgctttgcgaaatttatttacatggaatgagagtgtgcgcttacctgatctgattagcggtcgtcaaatacaccatataaatgcgtgtattttcctcgttgccataacaaaaaaactcccgtcctaaatacataggacagaagttatactcctgcggtgccacctaatttcatcctgcttcggacagaataccctcatttatgtaccaacatacataatctgctgtaacgtgcatcccacgtctcccctactcgcctgtgctttcagttcgccctctgcagtccattctagcaccctttcaccactgttatcccaccaccaacagttctctgtgcacttccaaatgctatactcgtctgcatcatcggttttaatatagtgacaggataatacattagtacggtaaagtcaagaggtttctaaaaaaatatctccccaccatacggtagggagataaattacatatgaatccgcaattacttattagcaatagctgcctgtgctgctgccaaacgtgcgataggtacacggaatggtgagcaagatacatagtcaagaccgatcttgtggcagaactcaacagaagaaggatctccaccgtgctctccacagataccaacatgaagtgccgggttgactggcttaccaagtttgatagcagtctccat

SEQ ID NO: 12473 - DNA, 30492 bp, Unknown
  gut microbiota DNA sequence
ggtatttatgcaaatgggaggtgccgatggcatgataaagagcatgacaggtttcgggagaggcgaagccggtgatgaaacaagaaaaatagttgtggagatcaaatccgtaaatcatcgttacctggacttgaatgtgaaactccctagaaaattaaacgcttttgaagtggagatacgcaattttatcaaatcccgtattgtgcgcggcaaggttgatgtttatatcaccttggaagagaccaaagaagcatccgatatcctgcattacaacacacatatcgccgatatgtatatggaaaacatccgcaagatgtcgcaggattacggtattccttttgatgtcacagcgacttcgctggcgcgtttcccggatgtcttggagatgacggatgcagaggatgatgatgagatgcttcacttattccttatggatgcactgaccactgcaacagaccagttcgttgagaaccgttcccaggagggcatgcgcctgcgtcaggatatgcttgccaaaatggatgagatgtcgtcttatgtgacgaccttagaagaacgttccccgcagatcatcgaggaataccgggagcgtttacagaccaagatcacagatctcttaggagatcatgccatagatgagacccggatcgcatccgaagttgtcttgtatgcagataaggtttgtatcgacgaagaaatggtacgtttgcgcagccatgtggaagaaaccaagcacatgttagcagatggtggcgaagtcggtcgtaaactggactttatcgcccaggagatgaaccgcgaagccaatacgattctttccaagtctacagacgtagagatcgcaggcattgggatttctctcaagaccctaatcgaaaaagtaagagaacagatccagaatttagaataggacagacaagaatatggcatttatcaatatcggatttggcaatatcatcaatacagataaagtggtgtccatcgtgacaccggattccgcgcctgccaaacgcctggtgcaacgtgccaaggaggaaggcaatatcattgatgcgacgcagggacgccgcaccagaggaatcatcattacagaccaacacatcgtgctttccgcgcttttgccggacacgatcgcgacaagatccaaagaagcagcaacaaaaaagaaggaggctgatgttttatgacaaggaagggaatgatcattgttttatctggtttttcaggcgccggtaaaggcacgatcatgaagaacctgttaaaagcacatcccggtcagtatcacctgtctatttctgcaacgaccagacaaaagcgtcagggcgaagaagatggcagggaatatttctttaagaccagggaagaattcaatcagatgatcgcagataatcagttactggaatacgccaccttcaatggcaattcttatggaacaccgcgttcttatgtggagcagttggtaaacgagggcaaggatgtcatcttagagattgagattcagggagcgcttcaggtcaaaaaattatacccggaagccctgcttctctttgtgatgccgccatctgcagatgccttaaaggagcgtctggtcggcagaggaaccgagacaccggatgtgatcgcacagcgtttggcgatctcttccaaggagtcacaatacatgaatggctatgattatctggtcatcaacgatcagatcgaaaatagtgtagaacaagtgcatgctattatttcttgcgagcattttaagacagcgagaaatgaagatacaatagacatgatccaaaaagatttaaagaagtttgaagggagataggaaacatgttacatccatcatatgtagaattaatgaaagtagtaaacaagaacagcgacgagattggtgaagaaccggtagtaaacagccgttacagcatcgtttgcgctaccgcaaaaagagcaagacagatcatcgacggacaagagccgctgatccgcgtatctaagggagaaaagccactttctatcgcagtagatgaactctatcgcggagaattacagatcatctctgaggatgatgaggagcaggaagaggaagcataatgaaacttctttttatatcgcttggctgtgataagaacctggtcgataccgagcatatgctttctatgatcacaaaagatggcattaccatcaccaatgatgagaatgaggcagatgtcatcgttgtcaattcctgttgttttatcagtgatgccatggaagaaagtatccagaccctgatcgacatgggcagtctcaaagaaaccgcaaatctcaaagctttgatcgtgaccggctgtctggcagagcgttacgctaaagagatcgcagagcagatcccggaagtggatgccgtgatcggcactaatgcttatgatgagatcgtatctgtcatacatgaggtcatggaaggtcataagaccagtgtcaaaaagcctttgaacggcttgccaaaaaactatgccggcaggacacttacgaccggcggacattttgcccacctaaagatcgccgagggctgtgacaagcactgtacctattgcgtgatcccatctatccgtggcaattatcgttccgtaccgatggaagatattctggcggaggctgcatcacttgcggcagacggtgtcaaggaactgatcttagttgcccaggagacaacgctttatggcgtggatctttatggcaaaaaaacactgccgaccttattaaaaaagttaagcgagatcgaggggatccgctggatccgtttacaatattgctatccggaggagatcacagacgaattgatcaggatgatggcagacaacccaaaagtatgccactatattgatattcccatccagcatgccaatgatgaagtcttaaaacgcatgggacgaaagacttcgcaggctgacctgcgccggatcgttggcgcactgcgtcaggctatgccggacatctgtatccgcacgactttgatctgtggatttcctggtgagaccgaacaggcacatgaggaactcaaaacgtttgtcagtgatatgaagtttgaccgtctgggctgctttgcttattccagacaggaaggcacaccggcagatactttcccggatcaggtaccggaggagatcaagcaggtgcgtgtggcagagatcatggaattacagcaggatatctcggctgcctgcaatgagacctatatcggcatgaccttagatgcctttgtggaaggcaaggttgcagacgagaatgtctatgttgccagaacctaccgggatgcaccggatgtagacggttatgtttttattcagacgaccagagaactcatgacaggtgatatcgtatcggttcatgtgacaggttcgtatgaatatgatttgataggagaattagcatgaatttaccaaataaattaaccattttcagagtaattttaattccgttttttgttgtatttttgctcttggatccgtccaaccagacctatcgctatattgcagatgcgatctttatcattgcaagtctgacggatatgttggatggcaagatcgcaagaaaatacaatttagtgacaaatttcggcaaatttatggatccgcttgcagataaattattagtcagtgcggctatgatctgcctgatcgcaacaggacaactggctgcctggatcgtgatcgttattatcagccgtgagtttatcatcagtggcttccgtctgatcgcatccgataacggtatcgttattgccgcaagttattggggcaagttcaagaccgtattccagatgcttatgatcattgttttgattgccaatatccagatgcctttctttacggttttaggtacgatccttatctatgtagcacttgtgcttaccatcgtatctttgatcgattatatcgtaaagaataaagacgtattaaaagagcagaactaatgcaggatatcatagaaaaaatcgtaaaagaattagaaaaagcacaggcaacagttgcagttgcagagtcctgcaccggcggaatggtcagtgccagtctggtcgattatccgggcgtttccgcctgttttaaagaaggctatgtcacttattccaatgaggcaaaagagaataatctcggtgtcttacatacgactttagaagcctacggcgccgtcagcaggcagactgcagagcagatggcagagggcgtgcgaaaacgggctggagccacttacggacttgccaccacaggcatcgcaggaccggatggtgggacagaggacaagccggtcggactggtatatattgcgtgtgccggcagcaagaaaacacttgtcaaagaatgtcatttttccggtggcaggcaaagcgtgcgcaggcaggcgacagaaatggtcctgcaattattacttacatgtatcaaggagttaaattgctaagatgagagtgatttccggtacgagaaaacgtttgcagttacatacggtatcaggcatgcataccagaccaacccaggaccgcatcaaagagaccctttttaatatgatccagaatgacctgtgtgatgcacagtttctggacgtttttgcagggagcggtcagatggggatcgaggcgctcagccggggcgcgacatgtgcttattttattgagaacaacaaattagccttagactgcatccatcacaatatcacgcatacacgttttgatgatgaagcctttgtattgccgggggatgtgatttatgaactccgcaatttagaggggcggatgcagtttgatattatttttatagacccgccttatcatggtggatatgagcatgacgtattagagacgattgcacaatgtgatctcctggcagaggatggatatgtgatcgtagaagcagatctgcacacggattttacctttgtcacggatctgggctatcagatcttaaacgaaaaggattacaagacaaacaagcatgtctttttagcaaaggatgagtagagacaaatgaaaagagcaatttatccgggaagttttgatccggtcactttcggacatttagacatcattgagcggtctgcaaagatctttgacgaagtgatcatcggtgttctcaacaacagtgccaaaaatgcattgtttactgtcgaagaaagggttgccatgatcgaagatctggttaggcagtatccaaatgtgaccgtggattcttttgacggacttctggtcgactatgccaagaaaaaagaggctgcagtcatcatccgtggactgcgtgccgtgaccgactttgaatatgaaattcagattgcacagaccaacaaagtcgagtatcctgaacttgagacaatctttttgacgaccggattgcactattcttatctgagttcgaccattgtaagagaatttgcttcttatggtggagatattagtagatttgtacctgcggagatcattccgctgattcaggcaaagtataattcataaaaggagattctattatgtcaagtggtattgaagaaatcatcgaagaaattgaagaatatgtagacggatgcaagccatctgcattttctccatccaagatcatcgtcaacagagacgagttagagagtcttttggaagaactgcgtaccaagacgccggaagagatcaagcgttaccagaagatcatcagcaataaggaagccattttggcagatgcacagaacaaggcagatgccatcatcgcacaggcacagattcagaccaacgaactggtcagcgagcatcagatcatgcaacaggcatatgccaaagccaatgagatcattatgctggcgaccaagaatgcgcaggatatgctggacaaggcaacagaggatgccaacagcatccgtatgggagccattgcctataccgatgatatgttaaataccatcgagagcgtgatctccaattccatggagacaacacaggcaagaacagagaccttcatgcagactatgcagggctatctggatatcgttgttgccaaccgtcaggaactggcaccgcaggaagtaaaagagccggaagcaccggcagaccagccgcagacaccagaaccaaaggcagaggagacggcttctgaggacaatgtaccggcactcgacatcccggaatccttcttcaataaagaataaaaaaatacaagatggtgagcagaccacttatgagggcaaagagcaggcgttctttgatataatttctcatagaaaagggggcgcccatgcaaacggaccaggtctgcatagccgtacataagccgccaaaggaaagcaaggggatggcacacaggtatttgaccataccggatatttctagtatggatatctcatgtataccgattgtgatctccaaaaaagcaagtatgcatgcccgaagcccggtcggcagaaattggatttctttaacaaaggcacaaaagataccaaaaaggatcagataaccgccaagaatggttatggtttcaaatccattcatgatagcgacatttaagatttgaaagcagtttcgaagtcttggtgtcgcttttcttgtcgttttgccataggatgtgatatgtattttttgttctgtagttgcctcttttttagagaaaaaacatacaagacaaaggatatggggcaggtataagagcaaaaggctgatgccaaagaggtcgggaaggtccagttttttcgtcaggacataagagccgacgaaggacggtccgatcagattacagtggtttaaaaggatctgtccttccctggcgtcgatgagatttttttgatagaggtcttttgccatttttgcaccgatcggtagtccaaaggtcagtcccgctaagacagcaaaaaggatccggatttttttcgcacgcaggggtgacatccgggcaaagatatattcctgcacaggatccgacaagaggatattggataggatcataaagggaagtagggtcggcaacaactgaaaaaaccagatattgagaccgctaacggctccggaaaaggtgatctggggctgacacagggcgatcaggatggcaatgattacgaaaacaagtccaaacttcatatagttaatctatgaaagtgatacagaaaatatgatgcgattagataaatttttgagcaatgcagggattgcttcccggtctgagatcaagaaaatactaaaaaagggcgcggtccgcgtcaatggaaatgtcgtcagtgacggtaaattacagatcgatgaaactgcagatcaggtcttatatcagggaaagaaagtggaatatgagacttttgtctattatgccttccacaaaccggcaggctgtgtctgcgccgccagggatgccctgcatccgacggtttttgactatgtacccatgaatgcaaagcaagatctttttacggtaggacgactggatctggatacggaagggcttttactgatcactaatgacggtgccttatcccacgctttgctcagtcccaaaaaacacgtaaaaaagacttatcttgcctatttagatgcgccggcagatccagcagatatccggctttttgcggaggggatcgatatcggcgaaaaaagaccaaccaagccggcagaacttgtcatagaccaaaatgatccgacacacgtctatatcacgatctcggaggggatgtatcatcaagtgaaacgcatggtgcacgcatgcggcaaggaagtcctttatttgaaacgtttatctatgggcgagtttagtttagaagatactttggacaagggtgcttatcgcacattgacagaaaaggaaatgaattatgttagagaatataaaggcagtactctttgatctggacggcacactggtcgactccatgtgggtctggaggcagatcgatctggattatctgggaaagcggcatctgcaaatgcctaaaagcctacaaaaggatattgaggggatgagtatgcgggagaccgcctgcttttttcaaaaacagtttggcatcacagatgatattgataccatgatggcagagtggaatgccatggcaatggatgcctattccaatcatgtgacttggaagcctggggcagaggcatttttacaaagactgcgcagggacggcatcgccacaggcattgcgaccagcaattccaaggaattgttacaggcagtcgcagatgcactgggaatgcaggactatattgattattttttgaccggaaatgaagtagaacgcggcaaaccggcaccggatatctatttaaaagtggcagagcatttaggcgtgcagcccaatgactgtctggtatttgaagacatctgtccgggcatcatggcggcaaaaaatgccgggatgaaggtctgcgcggtctatgatgactattccaaggacatcacggcagagaagaagaccctggcagactattacattacagattacaggcagatcgactagaacaggacgttagtatggaagcaatacatgattttttaccgatttcaaaagaagatatgaaaagacgcggcatagaccggttggattttgtctatgtatgtggggatgcctatgtggatcatccttcctttgggcatgccattatcacacgtctcttggaatcctatggctatagcgtggggatcattgcccagccggactggaaagacgatgcgtctatttctgttctgggagaaccgcgtcttggctttttggtttccggtggcaatatggactctatggtcaaccattattcggtatccaaaaagagacgacagactgatgccttttctccgggcggtgtcatgggaaaacgtccggattatgcatccatcgtatattgcaacctgatccgccggacttacaagcacacaccgatcatcataggtgggatcgaaggcagtctgcgccgtctggcacattatgactactggtcaaataaggtcaaacggtccattctgatggattccggtgcagacttgatctcctatggtatgggcgagcgttcgatcattgagatcgcagaggcacttgccgccggcatcgacgttaaggatatcacctatgtccgcgggacagtctttcggacacaagacacttcctttatcgaagatgccatccttttgccgtcttatgaggagatttcgaccaataaagaggcatatgccaagagtttttatacccagtatcagaatacagatgcctttagtgccaaaaagatggcagaagcttatccgcacggtgtctatgtggtgcaaaatccaccgcaaaagccgctttccatgcaggaaatggatgatgtttatgccttgccttatatgcgcacctatcacccgatctatgaaaaagatggcgggatcccggctatttccgaggtcaagttcagcctgatcagtaaccgcggctgttttggcggctgtaatttctgtgccctgactttccatcagggacgcattgtgcaaacgcgcagtcatgcttccattcttgcagaggcagagtgtatgataaaggataaggatttcaagggctatattcatgatgttggaggcccgaccgccaatttccggcacccatcctgccaaaagcaactgaccaagggtgtctgcatgaaccgccagtgtctttttccaaagccttgcaaaaacctgacggtcgaccacaaggattatttaaaactgctccgcaaactgcgtgctttgccgggcgtaaaaaaggtctttgtgcgatccggtatccgttttgattatttgctggaagatccggatgagtcctttttccgggaattgtgccaatatcatgtcagcggccagttaaaagtggcaccggagcatatcagtgacaatgtcttaaaatatatgggaaagccgccggtagccgtctatgatcgctttaaggataaataccgcaagatcaatgaaaagatcggaaagaagcaatacctggtgccatatctgatgtcgtcgcatccgggatctaccttaaaggatgccattgctctggcagaatatctgcgggatcttggttatatgccggaacaggtacaggatttttacccgacaccgtcgaccatatcgacctgtatgtactatacggggctggatccggcgaccatggaaccggtctatgtggcgcacaatccgcatgaaaaagccatgcagcgtgccctcatccagtaccgaaatccaaagaattatgatctggtctatgaagcacttaagaaagaacatcgggaagatctgatcggttttgataagcactgtctgatccgcccgcgcaaattagcggaagaaaggcaagggcagagccgtaagaaaaagcaggatagtaaatatcaatccaaagatatgcggcagcatagtaaaaaagccacgcagcgaccacgcgcaaacaggaaaggaaaacgataggtcttatgacagaaattcagattacttccggtcaggaaaaacaacgttttgataagttcttaaagaaatactttaaggctgccagtggcggatttttatataagatgctgcgcaaaaagaacattaccctcaacaagaaaaaggcggacggatccgagatcttacaggcaggcgatatgatccaggtgtttttctccgatgagaccttttccaagatgcgggggcaggaggcggtttcttcagaatatcagaaactacttcaagtacctcatgagcttcaagtggtctatgaggatgaccttatgctgatcgtcaataagccgagtggaatgctgtcacagaaggcaagcgagtcggatatttctttaaacgagagcatcctttcttatctgatccatgaagggttcttatcagaggagacttatgccgtctttcacccgtcggttgccaaccggctggaccgcaacacctccgggatcgtgcttgccggaaagaccttagcagggcagcagttcttatcggatattctgcgggatcgcagtgccaaaaagatctaccattgtatcgttcgcggcaaagtagaagaagagatgcatttaaaaggctatctgctaaaagacgaacgatccaatcaggtgcagatattttccgatgaaacacaagatgccaaaccgatcgagacagcctatcgtccgcttgtcgtaggaccggatgccacgcttttggaagtgcatctgattacagggcgcagtcaccagatccgggcacacctggcatctatcggacacccgatcgccggagatccaaagtatggagatatggtctggaacaaaaaactccgtcaggacttttctgtcagatcccaactgctccatgcttattccatcaccttgccggatggacgtacctttattgcagacgaaccggaaattttttcacagatcatgagaggataattatggcaacatggcattccagaggattgcgtggatcgacctttgaggacttgatcaaccgcacaaatgatatttacgagaatggtaatctttgtctaattcaaaaagtaccgacacccatcacgccgatcaacattgataaggataccagacacattactttggcatattttgacaaaaaaagtaccgtcgattatatcggggtagtacaggggattcctgtctgctttgacgccaaggaatgtcacagcgacctttttcccttgcagaacatccatgaccaccagatcaactttatgcagacttttgaaaagcagcagggcatggcattttttctgctctactttacccagcgcgacgaattttattatctgcgcttagaagaagtcatgcgctattggaagcgcgggcaggagggtggacgcaagagtttccgctacgaagaactggatcccgatttcttctttcatgcaaagcccggtatctttgttccttatctggatcctttgcaaaaagatttatctatgcgagatgcttgacagttgttctgtcttttcctataatatggatagtttagttgtttaccactgcaccatgataaagtttaaaggagccataaactatgcaaaataagagattacataccccggaaggtgttcgcgatatttataatgatgaatgtgagaaaaagcattatatcttagaccggatgcgacaggtcatacaatcttacggctatcgtttcattgagacaccgacttttgagttctttgatatcttcggacaagaagtgggtactacgccgtcaaaagatctctataaattttttgatcgtgagggcaataccttggtcctgcgtccggatatgaccccgtccatcgcaagggcagcatccaagtattttccgattgagaccgagccggtgcgcctttgctatgagggcaatgtctttatcaataacaacagttatcagggcaggctcaaggaaagcacccagttgggtgtcgagttcatcggagaaaattcagtcgatgctgacggcgagatcatagcccttgtcgtcaataacttaaaagctgccggcttagaacagttccagatcagtatcggtcatgcagatcttttccgtcaactcatgaaagcagcagattttgatgcagaggcagaagaaaccttacgcgacctgatcttaaataaaaacttctttggcgtggatgaattcttggagcgtcatcaggtaacagatgatctgcgcagcctcttttccatgttggaaaagatgtatgccagtccaaaagaatgggcagggatgaatgaaatcgcccttcgtttcccgggtgtagcggatgccctttcttatcttcaggaactttatgaacttcttgaagtgtatgatgtgacaaagtatgtttcctttgaactgggattgatcagttcttacagttattataccggtatcctatttagcggctataccttcggaagcggcgaaccgatcgtaaagggtggacgctatgacgggcttttgtcctactttggaaaagaggctccggcgatcggctttgcccttatggtagaccaacttttactggcattggagcggcaaaagatcgccatttcggcaggacaggaagcagagatcatcctatacacaccgcagcagagaaagatcgctgccacgactgcagaggaactgcgaaatgcaggcaagattgtccgcctgcatctgatggatctggacagccacagcatagcggattaccgccagcggtatcagggacaaaagatcattgtattggaggacgaataagatggaagaacaaagatatctgacttttgccctgggaaagggacgtttggcaaagcagacgcttgccacttttgaaaagatcggcattacctgtgaggagatgaaagatccgggcaccagaaaactcatttttgtcaatgaagatttaaaactccgctttttcctggcaaaaggaccggatgtgccgacctatgtcgaatacggcgcggctgacatcggtattgttggagaggatacgatcttagaggaagcccgaaatatttatgaggttttagatcttggctttggtaaatgccgcatgtgcgtctgcggaccaaaggaatccaaggaactcctgcagcaccaggaattgatccgcgttgctaccaaatatccgaggatcgctaagaattatttttataacgaaaaacatcagacggttgagatcatcaagttaaacggttcgatcgaactggcaccgatcgtgggactgtccgaagtgatcgtagatatcgtagaaactggctcgaccctgcgggaaaacggactggaagtcttagaggaagtttgtcctttgtccgcgcggatggtcgtcaaccaggtcagcatgaaaatggaatatgaacgcatcaccaaattgatcggtgagttaaaacaggcattatcaatcgaagggtaggtatgggatatgaggatcttagacttaaataaagaaacaacaagcaatattttggaatctctcttaaagagaagtcccaacagttatggcgaatacgaatcacgcgtggctgccatcatcgaggaagtgcgaaagaatcgcgatgcggcggttttttcctacaccaagcagtttgaccgtgccgagatcaatgcagacaatatcgttgtgaccgatgaggagatcaatgaggcatatgcgacagttgcaccagaacttttggatgtgatccgcaaagctttggtcaatattcgcgcttttcacagcaagcagttgcagaactcctggttcaccagtggcgaaaacggcacgatcttaggacagaaagtcacacctttggataaggtgggcgtttatgttcctggcggaaaggctgtctatccgtcttccgttctgatgaatgtcgttccggcaaaagtagcgggcgttcctcatatttatatgacaacaccacctggggctgatggcaagattgctgcctctaccttagtggctgccaaagaagccggtgttgatactatttataaagttggtggcgcccaggcgatcgcagcccttgcttttggtacggaatccattccgaaagtagacaagatcgttggtcccggcaatatttatgtggcattggcaaaaaaggcagtgttcggtcatgtcagcatcgactctatcgccggtccgagtgaaatcctggttttagccgatgagactgcaaatccagaatatgtagcggcagaccttttgtcacaggcagaacatgatgaaatggcatctgctatcctgatcacgaccagccgtgctctggcagatcaggtttccaaggagatcgattattttgtggcaagattatcccgcaaggcgatcattgaaaaatctttggaaaactacggttatatcctgatcgcaccggatatggagactgccattgatacggtaaatgagatcgcatccgagcatttggagatcgtgaccaagaatccgtttgataccatgacaagggtaaaaaatgcaggtgctatcttccttggcgaatacagcagtgaaccgcttggcgactactttgcaggtccaaaccatgtacttcctaccaatggaaccgccaaattcttctctgccctcagtgttgatgattttatcaagaaatccagcatcatttcttattccagagaggcgctggaagatgtctaccgtgacattgtgcagtttgcagagtgtgagcagttgacggcgcatgcaaattcgattaaagtaagatttgaagatgtttaagattaagtagaaagtagggataaagggtgagtgatgtaagacgcgcccactgtgtgcgcacaacaaaggaaacagatatcgatctgacatttacgatcgacggcagtggcaaatcgacgatctccacggatatcggctttttcgaccatatgttggagggctttgccagacacggactttttgatctggatgtaaagatcaagggagacctgatcgtggactgccaccatacgatcgaagactgtggcattgttctgggtgaggctatcaagcaggcactgggcgataaaaagggaatctgtcgctatggctcctgtatcttacctatggatgagactttagtgctttgtgccatagacttgtccggcagaccttatctgtcttttgatgcagaatttaccaccgatcggatcggctatatggatacggagatgatccgcgaatttttctatgccatttcctatagtgcaggcatgaacctgcatatacaggtattaaaatccggcaacaatcatcatatggcggaagccatgttcaaggcttttgcaaaggctctggatgcggcaacgaccaaggatccgagaatcgcagacattctttccaccaagggaagtctggcttaaaatcaatagaaagtgaacatactaagatggaacacaaaaatatcgtagcaacaatctatttaaaagatgggatggcagtgcgtgatccaaagcataccaacgaaaagcaggatgtcttagaattggcacgcctctacaacgacagtggtattgacaagatcatttgttatgatctttcttcggaagatgaagaacatgagaaaaacattttagccatccgtgagatcaaccgtaatatcgagatcaagacctgtggcggcggcaacattaagcgactggaagatgttaagaaatttctttatgccggctgtgtggaagtcattttaaacggctccaagccatccgcgatcgagatcttaaaagaagccagtgcccgttttggagcggagaaaatgctggtatccctgacaaatgtggactttctctttaagaccaaggatgtcctggaagaccatgtccatgaacttgtgatctatgatcgcacacttttaaacagcattgagagcattaccaatgtaccttacattgttgatgtagattcttacaactttaaagatgtgatcgaccttttaaagtctgacaagatccgtggtatctgtggttcctttatcaacgatacccagaccgatatcatgcaggtcaaatgtgaactttccgatgccggcatcaagatggacaattttgagccaaaacttgcctggagcgatctgaaagtaaatgcagacggactggtgcctgtgattgcgcaggattatcagaccggcgaggttctcatgcttgcctatatgaatgaggaagcctttaacacgacgatccgtatcggcaagatgacctattacagcagaagcagacaggaactctggatcaagggtttgacaagcggacacacccaatatgtcaagtcgttaaccgctgactgcgattatgatactattttagccaaggtatcccaggtgggcggtattgcctgccacaccggcgcaccaagctgctttttcaatgagatcatcaaaaaagagtacacagagcgcaatccactcaaggtctttgagtccgtttaccaggtgattgctgaccgcagggagcatccaaaggaaggttcctataccaattatctgttcgataaaggtatcgacaagattttaaaaaaagtcggggaggaagcgacggagatcgtgatcgctgccaagaacccggacaacgaagaagtcaagtatgaaatgtctgatttcctctatcacatgatggtcttgatggtggaaaaaggactgacttgggaagacattacacgcgaactttcccagagataaaagcgagaggaattatacaatatatgaataaattagcactgtcagatgatatcttaatgcaactcgataagcctgcaagatacatcggcaatgaactgaacatggtaaagaaggatccctccaaggtcgatatccgttttgccatgtgtttcccggatgtctatgagatcggtatgtctcatcttggcatccagatcctttatgaaatgtttaacagaagagatgatgtttactgtgagagagtatattctccctggccggatctgcataagatcatgaaagaggaggatatccctctttttgcgttagaaacacaagatcccatcaaggattttgactttgttggcatcaccttgcagtacgagatgtgctataccaatatcctgcagatcttagaccttgcccagatccctttgtggcagaaagaccgttcggatcaggatccgatcattttatgcggaggaccttgtacctacaatccggagccgattgctgacttttgtgatctgtgctatatcggtgagggcgagatctcttatgatgcgctcttgagtctatataaagatatgaagcatgccggaaactacaccagagcggaatttcttcgcaaggctgcccagatcccgggcatctatgtgccatctttgtatgaagtgacttatcaggaagacggaacgatcgcaaccatgacaccgcgttttgcggatgtcccggaaaaggtaaagcgtcaggtactggttaatatggatgagggcgcctatccgaccaagcctttggttccgtttgtgcgtgccacacaggaccgcgtggtcttagagatccagcgtggctgcatccgtggttgtcgtttctgtcaggcaggtatggtctatcgtcccaaccgtgaaaagagtctggatcttttaaagacctatgccaaggaaatgttagactcgaccggacacgaggagatctctttgagttccttgagttccagtgattatacccagttgccggaactgatcaatttcctgatagaagactgctgtggagatggtgtcaatatctccctgccatccctgcgtatcgacgccttttctttggatgtcatgagcaaggtacaggatgtcagaaagagcagtctgacctttgccccggaagccggttcccaacggctccgcaatgtcatcaataagggactgaccaaggatgacattttaaacggtgccggtatggcatttgagggcggctggcagaaggtaaaactttactttatgcttggccttccgaccgagaccgaagaagatatgcgtgccatcccggaactcgccaatgaaattgcggttcgctattatgagatcccaaaggacaagcgcaacggcaagtgccagatcacgatgagcacttccttttttgtaccaaagccttttaccccatttcaatgggcacctatgtatgaaaaaggcgaatatctccgccgcgccaaaattgtcaacgatacgatgaaggagcagttaaaccacaaaagcctgcgttataactggcatgaagcggatgtgacggtattagagggactttttgccagaggcgaccgcagacttgccaaagccatttacgaagcctatgaagaaggctgtatgtttgatgcctggtcggattattttgatgtcgataaatggcatgagatcttggagcgaaacggtatctctcttgatttttatgtctatcgccagcgtcctttggatgaagttctgccatgggattttattgatgttggtgtgcgcaaggaattttttgtacgcgaatggaagcgtgcgaccatcgatcaggtggtaacaccaaactgtaaaatgcaatgctccggttgcggtgcagcatcatttggaggaggcatttgttttgaaggtaagaattaaatttagcaagagcggcagtatggtctatatcggtcatctggacatcatgcggtatttccagaaagccatccgcagaagcggactgccgatcaagtattccgaaggttttaacccgcatcagatcatgtctttcgcggctccgctgggtgttggtctgagcagttcgggcgaatatatggatattgaattaaaagagtttgtgccaagccaggaagccttgcagcgtttgcaggctactatggtagacggcatggaagtgacgtctttccgctatttgccggacaatgcgcaaaatgccatgtcctccgtgagcgccgcctcttatattttatcctataagcacccggagaagtttccttatacgattacagagttgcaggctgccaaaaaagccttttttgatgatgcagggaccattcccatcgtcaaaaagaccaaaaagggagagcgcgaattggatctgaaacctttgatctatgactttaccatctctgaggtctgcaattcctgcggagacagcggtattatcttttcgcttttagtctccaccggcagtacggataatatcaagccggaactggtgctggatcacttttttagaagcatgggaaagaccgacttaggcagatatgacttctttatccatagagaggatatgctgaccggtcaggctccggactttgtatctttgggagagatcggtcatgacaaagaataatcgttgctttattacagaatggacaagcgggcaaaagcagacggaacttttgctctatctggacgcgcacgatcatcccatcgagatccatccatatgatgcaagttcaccatccttgatcggcaatatttatgttgcaagggtcgatcgggtgatgccccagatacatgccgcctttttgaaggcagatgacctgaccttcttttatcctatggaagataccgctatggaaaatatcatctttaccggaaagaacggaaagaaggatgccttagtggagggggatgaattgctcgtacaggtcatccgtgatgcaatcaaatccaaggaaatctgcgtttcgaccaacctttccttttcttccgcgcatctcttgctcacgacaggcaaccgcttacatgggatctccaagaagatctctggggaaaggcgaaaacagatccagagtggttttctggaccgggttgcagacgaaaatttggggatcgttgtgcgaaccaatgcgatggaatgtgacgaggatctcttatatgccgaataccggatgctgcaggatagcgtgagtgacctgctttcaagagcgaagcaccttgtcgctggatcacttctttcggtgccgggacaaaggcatcctttttttgagcatatagatcgttttcaaagagaaggtctgacagagatcgtaaccgatgatcctgtctggtatgaccggttaaaagaaactgataccgagggcataccggtacgcctgtatgcagatcctgcctattccctcaaacagctttacggcatagagcagatgctgacccaggcgcttgcccaaaaggtctatctttcttccggtggctaccttgtcattgagccgacggaggcactgacggtcattgatgtcaacagtggcaacaataccaaaaagaaaaagaaggatgattattacctctccaacaatatggaagctgccaaggagatcgccagacaagtgcgtctgcgcaatatcagcggcatcattgtggtcgattttatcaatttgaaaaataaggagcaaaaagacgcactgactacttatatgaagtccctcttaaaagaggattatgtcaaggcgaatgttgtggattttacccgcttagatcttatggagatcacacgcgccaagaaatatcagtccttgcagcaagcactttcatattgtacgcaataaaatacaaaatatcgacataatttccgacaaacgattgacgaaagcagattcctatgctaatatatcaaggtatgccgcacaacgaggtttaagttgcattttgcacaccgtagttggcgagtaatgataataggaggtgccatatgtacgcaattatagcaacaggtggtaagcagtacaaagtatctgaaggcgatatcattaccattgaaaagcttggagtagaagctggtgaaaaggttacatttgatcaggttctggctatcagcgataacggattaaagattggtaatccgaccgttgaaggcgcaactgtagaagcttctgtcgttaaagaaggcagaggtaaaaaggtaatcgtttacaagtacaagagaaagactggctatcacaataagaacggtcatagacaggcgttcacacaagtacagatcaataagattaatggataatcgataggaattgttatgatttcgataacgattttcaaagatcaggagcagtatcggggcatccgttgcagtggacatgcaggatttgaacaagccggcaaagacattgtctgcgcggcagtatccatgctggtgatcaataccatcaatgggatcgatcaattcacagaggatgcatatgctttggatagcaaagaggacgataccaagacatcgaaaaagaaaagattttttctaggaaaagaggaatccgataatctgattgatttccgatttacggaggccgtttccaaggaatcgaacttacttatggatgttctggtcttaggcttaacagagatttataagcaatacggtgattcgtatcttacactaaaatttgaggaggtgtagacatgttaaagttgaatcttcaatttttcgcccacaaaaagggagttggttctactaagaacggacgtgattcagagtctaagagattaggcgcaaagagagcggacggacagttcgttaaggctggaaatattctttacagacagcgtggaacaaagattcatccgggtactaacgtaggtatcggtggtgatgatacattatttgcaacagcagatggtattcttcgtttcgaaagaaagggccgcgacaagaagcaggctagtgtttatccagtagcaagcgaaaactaagaacattttggtagactcgactattgtttagccgagtctactttgttatataatagtatttagaaagcggatactactatataacaaagtaatgtataccaagtattttttgaaaggtgtaatcatatgtttgcagatcgtgcacgaattataatcaaatcaggaaaaggcggcgacggacatgtcagtttccgtcgcgagaaatttgtaccaaatggcggtccggacggcggtgacggcggaaagggcggcgacatcatatttgaagttgacgagggcttaaataccttgacagactatcgccatcgcaggaaatttgccgcacaggcaggcgaagagggcggtaaaaagaactgccacggtaaaaatggagccgatcttatattaaaagtaccggaaggcaccgtgatcaaggatgcagagtccggcaaagtcattgcagacatgtccggcgacaacaaacgccagatcattttgaccggcggacgtggcggcctcggcaaccagcattatgcgacttccaccatgcaggcaccaaagtatgcccagccgggtggcgaatccattgagatcgaggtacagctggagttgaaggtcattgctgatgtcggactggtcggatttccaaatgtcggcaaatccaccttcctttcccgcgtgacaaatgccaagccaaagatcgcaaattaccactttactaccttaaatccaaaccttggtgtggtagatttagatggcaacggctttgtgatcgcggatattccgggattgatcgagggtgcctctgaaggcattggtctggggcatgaattcttacgtcacattgagcgtaccaaggtcatcatccatatggtagacggtgcttctgttgagggtagggatcctcttgaggacatcaaggcgatcaataaggaattagaggcctatgatccggcgatcttggaaaagccacaggtgatcgcagccaacaagatggatgtctgcatggaaggcagtgaggagatcatcgaaaaactccgcaaggaatttgaaccaaagggcatcgaagtcttttccatttccgccgtcagcgggcagggtgtaaaggaacttttgtatcacgtacaggaactcttaaagacctgtccggaggaagtgaccgtctatgagcctgaatttgatccggcgctgcgtttctttagcgaagaaccgtttaccgttgaagtcaacgaagaaggcgaatatgtggtagagggacctcgtatcgagaagatgctgggctataccaatattgattccgaaaagggcttccttttcttccagcgtttcttgaaagagcagggcattttaaagcaattagaggaacttggcattgaggaaggcgatactgttcgcatgtatggtctgatgttcgattattataagtaaggagcaaaagaatgatgaataacaaacaaagagcctatttatcaggtttggcaagcaaaatgacaccgatattacagattggaaaatcttctctgacacaggagatcattactgccgtagatgaagccttagaagcaagagaactgatcaagatatccgtgctcaagaattgttttgatgatccaagagccattgcagagaccatggcagagcgtacccacagccaggtagtccgtgtgatcggtagaaagatcgttctttaccgtgcggcgaaaaagccaaagatcgaacttccaaaataaaaaaaggttgcttgctgtgaaaaagatcggaattttaggtgggaccttcaatcccattcacgaaggacatttgaatattgcaagatgtgccagagattttctttccctggatgaagtttggtttttgccggcgggaacaccgccacacaaggatgttgcagaacatgtgtctgcctggcaccgtaagaatatggtaaatgctgcgatcgcgtctgaacgggcatttttgctctgcgatattgaattagaaaaaaagacaccatgttattcctgggagaccttggaagaattacatgcgcagtatggtcaaaatgcagctttttattttatcattggcgaagattcttttgccatgttcgatcaatgggtgcatccggagcgcatctgtgccgtctgtaaaattgtcgtcgccaaacgtccactggataaggctgctatcaaaaaagcccatccaatggcatttaacgagcgtatagaggcatatcggcagaaattctcgacggaatttattgagatgccggtagaggtgatggatatttcttcttcctatatccgcaaatgtctgcaagcaggggaaatggaaacgattttatccatgctaccggatgcggtgctttcttatattgctgagcatcaattatatcaggcagactatccgctttctttgatcgatactttacaaaaaaaggtcaaaagggagttaaaaccggaacgttttgaacataccttgggagtcatgtatacggcaggcaatctggcatccgtccatggctatccgcagataaaggccatggttgccggtttactgcatgattgtgctaaatgtctcagcgacgaaaagcgattagacatctgtcataagcaaaaaattacggttacagatatcgagaaccggcatccgcatttattacacggaaaagtcggtgcttaccttgcaaaaaagaaatatgatattacagatccacaggtcctgcatgcaattgctgtgcatacgaccggctgtccggatatgaatcttctggataagatcatttatattgcggattatatagagccgcaccgtgacaaagcgccacatttggaagagatacgccgtaaatcttttgcagatatcgatgccggactttttatgatcttggaggattctgtccaatatttaagtcagagtccatccgatatggatccgatgactttagaaacatatgaatactataaaaacttgcaaaaataaaaaaaggagcaaaatttatggaaatcaaggaaatggtgaaattggtatgtcatgctttggacgaaaagaaagcagaagacatcaaagtaattgatattaagggactttccgttatggctgactactttatcgttgccagtggcggaagtcagaaccagttgcttgctatgcaaaatgaagtagacaaggaaatgtatgagcatgggatccacgcaaagcaggttgaaggaaatcgttcttctacctggatcctgatggactacgaagatgtgatcgtgcatctgttttcacaggatgaccggcttttctataatttggaaaagatctggcaggatggacgtgttctctccgcagaagaactggataatttataaaatgataagtcgtaaggtataagaaaacgcaaggatccgatcatagatccttgcgtttataatttacggcatttgctgcctgacgcttgtgttcatcctccatggcagcataataatcaatggtggtattgatattttcatgtcctaaaacatcggctaccaggcggatatcgcctgtctcacggtaaagggctgtgccataggtactgcgcagtttgtgcggtgtgatctttttgttgggcaccgccatctgtgcataacgctttaccagacgttcgatggaatctacgctcatgcgccgtccttggatagaatagaagagggcaggagcatccgcctcatatggcgtgatcagggcgcgttccgaacagatatagtcatctaagacctgatggatttcatcactaaaatacaagacatcctgcccaccacctttgcggacaatggtcatagaattgacattaaaatccagatcgtttaaatccaggccgcgacattccgaaacacggatgccggtgccaagcataagggtcatgatagcaagatctcttttctgggtcttggcggcatattttctttgtctttcggtcataggcacgccggcattattttcaatgacatttaaaaatgcctgcacctcataattgttcatgcggacaatgtttttatccttttttaactttggcaatttgaccagtatcatcggattatctgaaatattcttgcgttcataatgatactggaacaaacctcgcagaggcgacattttccgtgcgatggctttcttgccgttttcatgcatttcaccatctaaatttaactccagataacgttggtattccacaatatcttctgattgtaagtgatccaggacggacaaaggaatttctgtcaaagaaagatcctttaaagttgaattatgcgtctgtaaaaagcgaaaaaacgtcagcagatcgtaacaataagatatcaaggtgctgggctgtgtggtaagttctttactgtagatataatctacagcaaaactcggcaactggtcgataagaccgcgcagtttgactttctgtgatcttgtttttgatttgtaataagcagaatcttttcccataataaatcctcatccatatataaaaacattaggaactcataagaaaacacatagcatgcataaaagcctttgggtgcgtttctatatataattatatcatcttctgtcttttgacacaatatctttcggaaaaacagatatttatccgcacgatacattttcaaacaaatactgctatgtcacctaatcatagataccatagcagtttcttacacatccgaagaaaacttgatagcccttcatcggatcataattgttgtattaccttataccgatcagattgatgcctgtcagccggcatccacagcaaagtctgccatgcgggcaatgatgcgctggcgaaccagtttggcaatttccggtgtcttcatatctttatactcgtcataatagatggctggtaaaaaaacaaccttggtcgtaactgttccaaattccaaactgttgaaaggcttgtaggaatcgatcaatgcaaccggtacgatcggtgttttggaacgaaccgcacatttaaaacttcccggcttaaattgctgtaccttgttgcgattcctatcataaccaccttctgaaaacaggatgtatttcttgccctgcttgacttcctctgtgatctcattgataacggtaagattttgtctgacattatccagttccagacgcttggcacccaacatatcgaccagttccttgaccaaaaaggaattggactttgccttgtccataacaaaggaacagggctgcttgtgagcatatataatccctaatgcatcatacttgccctggtggttgggatacatcacataaccaccctctaaaggtaaattctcggtgccatagacttccgtcttgatcttgccggaagatttcatgtaattgatcagtttctgtgcaaatgcataacgtacctgctcggaataacgctccggatgatggaacatctttcgcatcttgggaatcagatatggtccacgctttacattggcaagtactactaaaataaatcgtaacataaattcaatttctccctctatcctgtaggtaaatataatttaactacaatctatattatactggtaatagtgggaaaagacaagcaaactactgtacttgtgcggaataataaggtatcgtcagatactctcccgcatgaatgtcatccccagagatatggttgatctgcttcacctcatcaatataatcggtatatgatgcgtaagagtctacgtcagagtactccttggcgatagaccaaagggaatccccatcctctacctggacgctggtataatacttgtacatattgtggtcttgcttggcattggatgtcatagcaaaggcacagataacggtaaccataatagcgattgccatcaacaaataaaataaaatacactgcttttgctggattctctttgtcatatctctcatcctctttctcaaaatgtatcagaacgaacctttgttctggtattagaatacaacgcgaacagatgtttgtcaagaagtttttcgaacaaattttcggaatgtatgtttgctttttatactctcctatgctataatctgaataaatcatttatctatttgtttacgaagggagttttctatggaatacggacgcattacaccaaagcagcgtgaaatcttagaatacatcaagcaggagatcttaaatagaggctatccgcctaccgtcagagagttatgcgatgcagtacatttaaagtctacatcttctatccactctcatctggaatccctggagaaaaacggctatatccgcagagacccgtccaagccgcgtgcgatcgagatcgtggatgacagttttaatctgacccggcgtgagatggtcaacgttccgatcatcggttctattgccgcaggtcagccgctattagccattcagaatattgagaattatttcccgatccctgcagaatacatgccaaatcaggatacctttatgctccgtgtcaagggcgaaagcatgatcaatgccggtatctgtgatggtgatgtgatcattgtcaagcagcagaatacggcttccaacggtgatatggtcgctgccctggtggatgattctgctacggtaaagactttctataaagaagacggacacatacgcctgcagccggaaaacgacaacatggatccgatcatcgtcccggattgccagatcctcggcgttgtatttggtgtcttccgcttcttctgatttttgcatggcatatttatttacagggctttgcccgttttcctgtaccaggaattatataaaagcataaaacggacattgccttgtcatgtaggatttccatacagaccaagcagtgtccgttttcttctaaaacatctgtattcttttttagattagccttctattccggcaatatctccagtaaatatttgaaataatccggtaatggcgcctcgacctccagatattccccgctggtcggatgcacaaagccaatgaccgcggcatgcagtgtctgtccctgcaatttgtaaggacacttctttggaccatataggacgtctcccaataaaggatgtccaatggatgccatatgcacacggatctgatgtgtccgaccggtttctaacttaaattccatataggaataatctttaaaacgcttgagcaggcggtaatgtgtaatggcatctttaccattcttctcattgatcgccattttctttcgatcattaggattgcgcccgatcggtgcgtgtaccagtccctcatcctctgccggatgaccgatcacgattccccgataaatacggttgatcgaatgtaccttgatctgttccgcaatcttgatatgcgcctgatcattcttacatacgatcagagatccggtcgtatcctgatcgattcggtggacaatgcccggacggatctctccattgatgccggacagtgactccttacagtgatacataatggcattaaccagtgtaccatcgggatgccccggtgccggatgcacgaccatgccctttggcttattgacgatcagaaggtctttatcttcatataagatatccaaagggatatcctgtggctggatggatacttctaccggttccggtacaaataaagcgatcgtatctccctggttgatgcgataatttgccttgcaggctttcccttggacgaggacattgccgtctttgatccatttttgtatggcacttctggaaacatccggctgacacttacataaaaattgatcgatgcgcatgccctgatcctgctctgtcacatgatactctgccataactacttgcgctcctttttcctgccaagtactgccgcagagatctcatcaaactccttgtccgaatagacaaagaggagcaaaaagaagaggcagatcaccccacaggtcacatagatatccgctacattaaagaccggaaaattgatcagtgaaaaataaataaagtcaatcacatagtgataagagatccgatcaataaaattgccaatggctccggcaaataaaaagactaggatcagacgcagagagccatattcttttttatccggcaatttgataaaaagacagatcatcagagcacataagatcggcgtaatgatgcaaaagaagattgtcttattctccataatggaaaaggctgctcccgtattttccagataatgtagctgcaatacgccggggatcaatatgatattcccctgatccatcagatgactgactgccaactgcttggtccactgatcaagaaataccaaaattgcaaagccgatgagtgccaaaatatatttttttgcaagtgatcttttcatcctgttacctcattcatctgtaagcagaacctgaatgccctctaataattcctgatcactaaaggtcatgtcgatagcagcctgcccgattttttccaatacaataaatttgatcttatcgcccaccatctttttatcggacttggtgttggcaagaatctcccctgcatcatagtcggatacactgaccggcagatcaaagccttgaatcatcgccaaaatatcctcatactggtcttttgtgatatgtc

SEQ ID NO: 12474 - DNA, 1569 bp, Unknown
  gut microbiota DNA sequence
ataccgctgtaatcaaaaaagtagacgagccaaatccggactatcgtatgccggtaacaggtgacgtgctcaactggtttgagatcactgcaccggaaggatatttctctatcaacgataccatgggagacatcatggcaaatccggaaggacagaagttgatgggcggtctgatggcgaagatgcaggcaggaaaccagaatccatccgatgatgacccacagaagggtatgaaagaattagcaagccagatcgatccggcagcagcacagaagatgatgatgggcttcaccgtcaagagaatgcttggatttggtgccgttccaaaggagcaggtactgggtatcaatgctatgctgaataagattaagaaataacacgcttatatcaaattcctttcctaaatataggcgatcaacaggatcgttaccccaattatgagagaagacactccgcatgagaaaatcttgtgcggggtgttttcttgtatttttaagaagatagaatatatagatttatgaaaaatggataaaatgaaggcctgattttatggtaaaatgccagtagaaaagcaatgatagaaagataggtttaggaggcacaaatgaagatagtatttttggatcgaaaaaccataggagaggatattgaccttacaaagttccatgcatttggtgatctcgtggaatatgatttttctacaagtcaggaaattccggcgcgtatagaggatgcagacatcgttatcacaaataaatgtaacatgaatgaggaaacgctggcgggagccaaaaatctgaaattaatctgtgtgactgcaactggaaccaacaatctggataaggaatatctggaaaagagaaagatcgcatggcgcaatgtggcaggctattcgaccgagaccgtggcacagcacacttttgccctgctattctacctatatgagaatttggcatattatgatgcttatgtaaaagaggaaaaatatgtaaacgataagatgtttacgcatttttccaagacatttcaccagttggcaggaaagacctgggggattattggacttggcgcgatcggaaaacgtgtggctgagattgcgactgtctttggttgtaaggtgcagtatttctctacttccggacgaaaccacgatagtcaatatcaggaagtagacttacagactttattgaagacatccgatattgtctccattcatgcacctttgacggatgacaccctgcatctgatcggagaaaaggaactttcccagatgaaagagagtgctattctgatcaatgtgggacgcggaccgatcattgtggaaaaagatctggcagatgcactggatcgcggaattatcgcggcggcagggattgacgtgcttgatacagagccgatgagtgaggacaatccgctgcgccatatcaaagacagcacaaaactcctcatcacaccgcatatcgcatgggcatccgtggaggcacgtgtgcgcctgatggatattatttacgggcagatcaaggagtttttggaaaaatagtgaggacaaaattgatagaacgatgatct

SEQ ID NO: 12475 - DNA, 23545 bp, Unknown
  gut microbiota DNA sequence
tacatcttcccgcattttcagcaattatcaaccttgtaaactttttggtgacgatattcgcatcaagaaaaaattatccaataaatcataacaaacaaaggagtaaaagattcatgccaaacgaagaaatctgcttaaaagaaagcacacctgtaggtactttgggtatcatcccactggagagttgtaaggaactcggtgccaaagtcaacaattacctggtgaattggagacaggatcgcgatgctgagcattacgatcacatcacacttgccggatacaagagtgattcttacattgtaaaggctgctgttccgagattcggttccggcgaagccaagggttccatcttacagtctgtccgtggactggacatctttttgatcgttgatgtaaccaactacagcctgacctattctctctgtggtcagaccaatcacatgtcaccggatgatcactattctgacttaaagcgtatcatcgctgctatcgaaggaaaggcaaagagaattaccgttatcatgccattcctctatgagagtcgtcagcataagcgttcttcccgtgagtccctcgactgtgctatcgcattgcaggaactgatcaacatgggtgttgacaatatcattacctttgatgcacatgatcctcgtgtgcagaacgctatcccgcttcatggatttgagacagtacagcctgcataccagtttatcaagaacatcttaaagaacgtcaaggatatccagatcgacaacgaccacctaatgatcatcagcccggatgaaggtggtaccaaccgtgccgtttacatggctggcgtgcttggtgtagatatgggcatgttctacaagagacgtgattacagcatgatcgtagacggacgtaacccaatcgttgctcatgaattcctgggatcttccgtagaaggaaaggacgtcatcatcgttgatgatatgatctcttccggcgagagtatgatcgatgtagcaaccgaattaaagaagcgtaaagcaaagagaatcttcgttgtggcaacctttggtcttttcaccaatggtctggagaaattcgatgaagccgtagaaaaaggcatcatctatcgtgttgtaactacaaacctgacctatcagacaccggaacttttgagccgtccttactatatcaactgcgatatgagcaagtacatcgcttatatcattgatactttgaaccatgactgctctatctccggattgttagatccatacgagcgtatccacaaggtcgtaaacaaatacaacaatggcgaactgtaagattcgtccttataaggcaaataaagaaggcatcccggatatgggatgccttctttttgtctgcatttatattctttaattctgtgaagattcatcgtctgcttccagatcatcctcatccggctgctctgcgcttcccggcgtatcggatacataattcggatctacgaccgtgaactcattggattcacggaagattgtattgctggatcctacctggcataccgtgatggtatcgccattttgtactgcagatgccttgatcgtcaggcactgcccactctcgtaattggtcgtaaccttttctccattgacatagactttactccacttggtaaagttggaaccataaatgtgcaacttgccgtcaaagaagtatgcacggtcgatcacaacatcagatacacccatttccagatcggtggcaggatatttatcctcgccgttataagcgtagcgctttccgtataagatatcatactgcagggcttccagatctgtcatatattccggtgttccggctttgacacctgctgctatcttgctctgatgataattggtcatggtaccttcatggatacccagacgattgagatattcagaaaccaactgataagcagtcagatcctgatcctcttttgacatgccaaagttgttccaggtgaaatatttggtctggaaaagatctccggtagccacttcactctcagtcaatcccatggtcggcagatgatcgccaaacatgatgaccaatgtatcttcatcacgtttactcagttcctcgatataggactggataaattcatctacgttgtgaatctggttgatgtaatattcccaagcataggtctgttcctgggttttaccctcgcaggtaacaccgatggcaggattttcaatgaccttgtaggtcggataatcaccatgcgcctctacggtaatggtatagacgaaatccggtccctcggtagagtccattgcctctgtggtggcaggtgttaagatatcatcggtcggccaggagcccagcggtgtataatcggtaatatccaacatttccttactctggaaagtgtcaaagcccatcatggaaaaggcattggcacggctgtagaaattaccaccgttattgtgtacaacatggctgctgtaaccaaggttgcgcagatcgcctgcaaaactttcacagtctgtcttctttaagatcgtcttttgcggatattcaccaggtccaaagaagcggcaggacataccggtcagaacttcaaactcggaattgcaggtgccggcaccgacaactggcactgtcagatgcccggtcgagaaattctgttccagataatgcacatatgggatcgggtcctcggaagtctcgataaagtttgcctcactgacatcaaagaaagactccagaaggataacgacgatattcggtcggtcttcttccttgatcgtggatgcgccctgattggtctcgtctacgatcgcagaaatggactcctgatcataattcttaggctcggacataccacgattgaagatactggtagaaaatccatacagatatccataatccagatagccctgtgctaagttaccaaaataacaggaaagtacgccctgtccctgcaaagtagaagtcgtcaccggaacactggcaaaacatcccacgataaagagcaatttgacccaatacggaaaacgcggctttaactttttgcctttgataaagatgcggaccatccaaagtgtatataataaaagtgctactaccgaaatggctgcctgctgcgaggtaaaataattggtattctgcatggtaagcagatcaccgatcatggaaatatccgtaaatccaaatggtgttacacggttgagcaggataatgcagttggtgatacccagtgcaacaaatacggcactgatacacatacgcataaaggtctgtctgctgataaggtaacatagagaataacacacaaagatcagataggagttatacagataggctccggtatgattggtgacaaatccccacgcttctataaaagagtgacgagacaaccattccatgacaaaacacatgatcaaagataatgggatgtgctcgatcagagaatagcggttcaaccaatcgtttatcttttgcaaccgctcgttttcacggatcttttgtacgaatttcggtgtcggtatcctggacttgactgccgaccacttattgccaagagatttaaagaaacctccgatttttgaaaatactgctttcatattgcctccaaacaaaaatactcttttgcgtcacatcttttaagtatagttaaaaatgtgacaaaaatgtgaaagtccaaaatcgaacaagacacatttcgcaaagagtgataaaattatagcatgttggcttgtcatttgcaaggaagccagcgaaactagaacattggcccccgggtcatagagcataaaatagggataaggaattatgaaattaaattttagagaaaaaggtataccaaaatggattcgtcatagattgttggtattatttcttatatttacaggagcactggtcgttttccagatcctcctgaatttgggcgaggaagaaaaaaaggtcacgatggcagaagctacacttcctcttgttggtgtgcagacttacgatcacaccatgggggaactgcatggctaccgtacccagatggacgcctgctatatgcgtgatgccctgattccgcttgactccaagcgaaaaatggatctgaccatcaacacctatggctatgatgtggacagcgtctcctatgaagtgcgcagtctagatacccagcgcaagatcgcagacaccaaggtttccgattggaacaaggatggcaatacctggaccaaatctttacagattgaaaatctggtggatgaggggcaggaatacctctttatcctaaaattacactgtaagagtgatgatctttactattatacccgtatcacgctgcctgaggagacctacgccaagaagtgtctggaatttaccgatagtttccataacgtgtccatgagcgaccaatacgaactcctggcatcttatatagagccagcagattatacagacaaaaacgatctgggtaacgtcaatatcaattcttccatcgatcagatcggctggcgtggatttgcaggcaaacaggtgggcgatccgctggtatcctttaccgacatcaacgacacctacgcttcccttgtctatacctaccagatggctgaggaggctgacggcgcgaccaattattataatgtagaagaatattataaagtccgctataccgaccagcagatctacctgctggattatcagcgcagcatggagcagatcatcgatacggcatctgtgaacgtgagcggcaatatcttatcggtcggcgtgaccagtgatactaccgggtacctgtccaatgagaccggcacgatcgttagttttgtgcagtccggtcaactctttgaatacaaccagaacaagcagacctttaccaaagtctatggctttattgatgatccgacagatgccagacaaagttacggacagcacaatatccgcatcttaaatattgatgagaccggaaatatggactttgttgtttacggctatatgaaccgcggtcaacacgaaggcgaaagcggcattgatctctaccattatgacagcatcaagcaggaagccattgaacaggtatttattgcgaccacacattcttatcagatcttaaacgcagatttcagtgatctgctttacgaaaatgctgatggtgacttttatatcatgatgggcggcacccttgccaaagtcggtctggatgacctgtccaccaaggaactgatcacaaacctgaaatccgaccagtatgccgtgtcttcctccggccgttatgtagcatggatgacagaagatgatgtagcagaccagatctccatcatggatctggaaacagaaaaagtacgcacgattgatgctgccaagggaaccaagatcaagccactggcatttatgacagaagactttgtatacgggattgcaaacgaaagcgatatttcaacagatgcagccggaagtgccgtctatccaatggcaaaagtcgagatcatcgatacgtccagtgacaatttcacacagttaaaagaatatgccaaggacggtatctatgtgaccggtgcgaccaagtcctcctataccctttatctggatcgcgtaacaaaacaggatggcacatatgtgacaaccacccaggatactataaaagatactgcaggcgagcagaataagacggtatccctggtaaagactgccagcgatacgcaggggctggctacaacctatgtcatggcagatctggaagatggacagtctatccatagtctggcagccggggatgcaagcctggcgaccatcaacgacaccaagagcatttctatttctacgaccgaggaacaggaaacctactttgtgtatgtcggcaaccgtgttactctgacaacgcagaacctgaacaaagccattatggctgcagatgcggatatgggactggtcgttgacaaccagcagcgctatatctggaaccgtggcaagaaatcctacgtcaacgctttcaacgacattgaagccagcgcatccgaccgaaaggcaagcacatccgccggctgtatcagcgccatcctgcaaagcgaaggcatcagcggcgaagtacacgctcttttagaccgaggcgaaacaccaatgtccgtattgcagacttccctcaaggataaactggtcttagacctgaccggatgtaccttgagccaagcattgtattatgtcagtcagggaacgccggtctatgcgagaaccggggatgacaccgccctgctgatcattggctatgatgccgccaatatcatcgtttatcattccgataccgatcaatacaccaagatgtcgacagacaatgcatctcaggtctttgaaagcgcaggaaatgtatttattagttatgtagattaaaagagaaggtttggcaaataaaaactttgtcaaaccttctttgtattttatatatatttacgatcgatattgattgctataaagtactctttgccgatttgctccgagactctcttttgcagttgcactgtgatctcatgttctgtcatcttgacctgataaggcacgaccacatcaaagaccagattcgtatgcgtatgtccgaaaacaactcgaaaatcgtgaatagaagccttttcattccagtcctccacgatcttttttaccgactcgcgcaactgatccaaacggggatcatcggtcactaccggatccatatggataactgcctcacaatgcaattcttctttcaaaatgtgttctgtccgatcaatcacatcatgcgagatcataacatctacgcttgccggaacttctgcatgtagagagatcataaggcgtcccggtccataatcatgtaccacaaggtcatgcacacctatgattccatcttgcgccattacaatctcctctatgcgatcaacaaagcctgcttccggcgcctgccctaaaagtgggtctacggtctccttcccggcagataaacctgcccagataacgatcagggcaacaatcaagccgcaataaccatcaatatgtaaggaactgaattcacaaaagatcgtagataccaggacaataaaagttgccagagtatcactcatactgtcagttgccgttgctctcatggcagcagaatccaatttatctgccaaggatcgattataatacgccatatagagttttacagcaatggacacaagcaggataatgatcaccagcggtgaaaaatccatgtcttgtggatggataatcttctctacagaatccctcaaaagttcaaagcccatgatcacaataatggctgataccaataggcctgacagatattcgagtctgccatgtccaaaaggatgttcgggatccggatccgcagacgataatttaaagccaagcagggtgatcacggaagacccggcatcagataagttattaaaggcatctgctgtgatcgcaatcgaatggctcatcaatcctgcaaaaaatttaatcccaaagagcatggcattgagcaggatacctacacagccactcagtatgccataacgttcccgcacatttatatcttcgtagtttttataatctttgataaacatctttgccaatagtctgaccatatattttcctcttttctataggatatgcctgtttatccatcctgcatctcctattgcgtcggttgactttctaatgaactactgctatactaacaaacgacaaaaaacaaatcaatacaaaatctatgctaggggtgcctttggggctgagagatgtcttgacatcgacccttattacttgaaccgggtaataccggcgtaaggaagcttagttcctgactgatctcctagcatgtacaaatgaagggagatttttttatgagtttttttgtaacagcaaacgcagatggtgcttatgatctcaccactgccggctacaccgcgctgatcttagtattcattgcacttcttctcgcaggtgctgctgtctttggcaccaagaagaagatgagcaccaagcagttggtattttccgctatggcgatcgcacttgctgtagttacctctatgatcaaattatttgacctgcctatgggcggctctgtcacactcttttccatgctctttatcgtcctgatcggttactggtatggatttggcggcggtcttacagcagccctggcttacggcgtattacaacttctgatcgatccgtatattctgagtttcccacagatgctggttgattacatcttagcatttggtgctcttggtcttgcaggtcttttccacaattccaagcacgggctcatcaagggttatatcgtcgccgtattaggacgttacttcttcgctttcctgtccggctggatcttctttggcatgtatgcaccggataccttcccaaatgccgttgtttactcactggtttacaatggttcttatctgggagcagaggcaatcatcactttgatcgtgatcgctatcccaccggttgcaaaggcattggaaaccgtgaaaaaacaagccatttcttaatatgttttctataaagactctgaaaaaagaacttcccacaatatgggaagttcttttgcttgtgttctattctcttaaaaggctgcaaaatataaaatgctgatatcaaatgccaaaataccataataataagttgccagatttaaatagtggatcttgccacgattttccggcttacggaacttgtaaaagtacaaaaagatgatcgtaaaatcggagataaaaaaggcgatacctccaaagccgatccagccggaagcaagtcccgggcagagtgccatatattgtgtgctcttggatagcatgagcgacagaaagacgcaatatatcgctgccggaatcgccagtcttcccatgtgcagatgcatcagacgcttcacaaagaagaaggctgccagcgatacgaccggcaggaagatgttccaccatgtgagccttgcatctatacggaagaagcagatcaaaaatcccatatgtgccagaagaaagacaatcatgcctgccagcatatgcttgcgcctgctcctgatctggtatagccccataaagagatctccgaccgcacacagaaccaatggcaccagcatcatataaaaatactgcatatggtcgctgacaaaggcaaacatgactgcgatcacaacaaaggatacactacacaacatcttgaccggtacatagtatttctgcttgtagcgcggcaaagccgctaccaaaagcccggcaaattccagcgtatagattattgtcacaatcccttgtgccatcattcttgtaaacatgtttatgatctatccttatgattctggcttaaatatttcatcttgttgaaacggctgtatagaataaccccaataccaccggcaaagattgcaatgcaaaggaagtatctcggatcaataccatctgcggtcgttggtgtcgcatcttttgtatgggatgcagtgcccccgtttgtcgcgctcttgatcactctgccgtctgcggttgtcacagaaccgtctgcgtgggtaatggatccgtccgggttcacaacatcgccgtcggaagtaccattattgctgccgttgtctccattattggcaccattgttgttgccattattatcgccgttggtgttaccaccgttattattgttattattatcgtcattattgtcatcgttgttatcatcatcctggttatctcccaagacaacaaagacaatattgttatccttagcatacttttctgctgcggaaccggaaacaccataaatagtagatggtgtccacgaactctgcgccgcgatcgatgtcacggatgcagggatggtgatagtctcaacaccactgtcagtaaaagcattggcttcgatcgtggtcacactatttggaagggacacggtagaaataccggtgcagtcctgaagcgcgcctgcgccgatcgttgtcgtgcctgctgctattgccaaagaagtcttgccttccggaactaacaaaaggcgggtctttgacgcattgtataaacatccatccgaagatgcataagcaccattgccggatgccactgagatattggaaagattgccgcatccgctgaaagcatccgtagaaatactgctgacacttgccggaatgctgacagaactaagcgatgcacatccgtaaaaagcattgctgccgatcgaggttgcactatccgggatcgtaacagatccaagggataaacactcacggaaggtttcttccgggatcccattcaaagaagaactgagggatactgacgcaagagaagtacatccgctaaatacacctgttcccatactggtcaccgaactcggcataacaaccgatgtaatgttttttgatgcaaagactccggcattgattgtagtcacaccatccgggatcgtaacggctccgccatttcctgtgtaatcttccagaactgtgccatcatcactcagcaccaatccggattctgtcgcctggcttgcatctgaactctgactgacgatcacccaaacggataagatcacagacagtgcgatcagaaaccatccaatttttgtacctcttttcattctcttatctccgtataactctatttcgaaataaaaatctacaacatctagtatattatacacctattgtacttgtttggctactacaaataatcgtccatcctcggtataactgttacaggtcgacaaggtcaaaagtttatcctgtagtgtcagaccatccgcatttccatatacggcaagggaatctacattttggataaaatcttccagatcctgtgcggaagtcgaggtgatgaaatcataataacggtaagcatcttcatcctggtattggactttggacagccctaccgcaacgatctcataggttcttttctcgtagatggtattaaaattgatgtatttatgagcatccagataaccctcttgcagataatttttcagcccaccaaacatcatcccgcttttcatgttatgcccatagataatggtattgattgtcggttttaagatactgcaccgctcgtccatgaaaatactgccgttggagttggtcgcctggtcaaatccatgggtcagatagtaggtgttatccttctgtacgaccggataattgatctcggtatcgtcaatggagagccagcctaccatttccgggttctgctgtaagagttccgcatattctggcaaaacacttaaattctgcgtctgctcttcctgatcggatgacgtatctccattttctatagaagtatcttccttcttggcatcgtcatttttggaagcattatcctgactctttggtgtttccacctgatctgccagtttctgcatctgccttgtcgtcacaatgtcccggatctcagcaattccaaacacagcaaaagagacaagtgccaagataataaatgcaacaccaagtatcttctggtattttaccttgccctctgcctcttctacaacggctttgtcctccaacagatctacggacttatccgcaacgatatctgccagatgcgcaaaaaactgatcgccgatcggtgacttgaatacaatcttgccgcttcgaatgtcattgtaaagacgcactgccacctcgggatcctgtatatttaattctttgttgatacattcgatcttgcgaacatcttcctgaccatcacgatattcgtgaaaggtctggaaggtgtattcgccgatcttatattttccttgttcctgcatgaaatattcctactttatagtgatcgctattgtctttgagtaatctccataaacataagaaccatccaccggcttgtatgcacgtaccttgtaatagtaagtcctgttgctgcctaccttggtatcggtataggcacccttgccatttggtacaacggcgatcttcttgtaagtaccgtctgcacttgaactacgatagatctcataacctgctaccgtgttgctgcggttccatgtaagcgtcgcacttctctttgccgttgatgtgccgacaagatcattggtagacgccaccttggtataagccgttaccgactgcatttcgccataggtcgtatttccacctgcggtcacataagatctcacatggaaggtataggtcgttgagttcttcaagccatttgccacaaaggatgtagccgatgttgagccgtacttggtacggttgtcctcactgtagatctcataaccggtagcctttccgtttttcagccatgagatctgaatacctgtctcactggctgcctgagcctttaatcctaccatgaccggggcgatgatattgaatttcaatacgctggttcctgtgtagttgccaagtccctgtacggttgctgtagcaacgccaggatttacattgttgttgtaagtaacactgtattcttttccctgaatcaactctttaccatcatacaacaaggttgcttttggttcaatggcttttccggtgtaggtattcttgttcaactgaatgatattgcatgcgttgatattctttggaatgatctcataagttgcctgtaagacttctttattgccggcaagttctaccggaataaaggctgtgatcgttccgaccgcaatgcaatcatcatttgtaacatccgcaatatcggtcgtctccgcctcttctgcactcatacgtccatagacgatctggtctgcatcataagccacctggttgccgctcggatcctcgatgacaaagtccggtcggatcgcttttccggtgtaggtgtactggtttgcataacctttgacacgaagcagtgacatatctgcgctgatggtgtaagcacatcttgcactatcactatagtaagataccagcggtgtgataatgacataaccgcctgtcatgtaattgtcatcagaatagtagtctaccttgtaatctacatcctgctccaatacgttgccgccacattctacggtaaccggtggctctactgcctttccggtgtaaaactgcggttcaatggtgacaatggcatcttttaaggatgctacaatgtcaaattcctcggtcacctgacctgtgtaattgccctttgctacggctgttatcgtcgcatgaccagccttggtattatccgtcagtttcagatcataatcgacgcctgccaccaaggtccataccggatccacaccattgtcatagatcacggatacgtccggtgtgatagcacttccggtgtaggtaacgcgtttatcatttaataccagtttaaagtctgaaatatcttttgccccaatgatgaatgcctggctcttagtctcagatcccaatgcatagttgcctttcagagaaaccacaacaaatgccggactgttaatatttccgatattctcattgttgacataagtaatactatagttgaccggatcaatctctgtctttgtggagatcgcggtatcatatacctttacgcccggtgtgatggcactaccggtgtaagtcgtcacataattgccatcctcgtcctgtggcaggtctaataccacattgatctcggatgcctttgcaaccttttggttgatgcggtaataagtaaacggcttgccatagtaattgccaattcccttgaccgccaaggtctttgtaccggcattgacactatcctcaatgtcgatcatttcataatcggcaccttcctgtaataaagtgccgtctgaaagatagactgcataggtcggtacatgagacttaccgtcataggtaaattcctgctgatcctgtgcaatacgcacctgtgcatctgcgagtgatctaccgatattgaaagtcgccgttctgctgtctgtatagttgcccttaccggtgatcgttaccgtcggcgctgcgtctgtatcatccttagatgcggaattgatgttattcttgaaggtcaggtcatagtctgtacccttggtcaactccacgccccttgttgtatccgtcacaactactgccggttctaccgcagaaccactgtagtccatatccggtaccgtcacggtaatatcatcttctgtgatcggcttcggttctaccgtaaaggtaggatttaaagagccatagaagttatcttttccaacaattgaaatattgtactttcctgcatctctgatgccgttgccataattgattgtatagtcgatatctttctgcaggatataagtggtaccatcaccaattggacagctcacttctacttccggtgtgattacttcacctgtataaatgacagatgtcttatctaattttacggttccaccggcaagatttaccttggtaacttcaaactgtgcacttctggatcctgtgtaattgccaattcctgtaaatataacagatgctttgctgtcaacagaaacctgctcattgttggaaagtgtataagtgtaatccacgccttcctgcaaggtatgtccgttataagtcaggctcatctgcggaactaccggatgtcccccggcataaccggtgtctgaaaccttaacattaatgtcacttgcagaaagatctttctgtgtgatcgtaaagtattttgtcacggcaccataataacttcctgcaccactgatggtcacagatgcggttcctacattgaggttctctgcataacttacattatagtccttggtcagtgtcagtgtcttgccaccataggtcacaactacatttggctggatgtaatctccggtgtaagtcgtagtcagaccggacaactgaccgtctaaggtaatgttcatgcccggatctgccagattgatacccttgatctcgaagtttacaacctgattgccgatagatgcgccatctatgctattgataaccacggatgctgtacccgcgtcgatattattggtataggtaagactatagtcaacgcctttctgcaagacttttcctgcacatgttacctgtggtatcggcttgacctcgctgccggtataagaatagatatcattcaaaccggtaactgtcgccttggacagattataataaatattaaaacgtgctgtcttggcgccggtatagtaagtatctgtaccggaaacctggcggatcacaatactaccactattcgtaccgacatctacattgttgccgtactctatggtataatcttcgccctcttccaatacctgtgaaccaaactggacgatcggtgtcggcttgatctgctttccggtatagtcatactgatcattgacattgatcacttccacatttttcagatctccaacaaccctgatcgggatcgtctgacttccgatgcagtagttctttccgacaaagatcagttgtccctcacccggtctgtcacagttatactgctggatctcataattggaagaatccagatacatggtattcatatttcccgaactgtctacattagactggttctgataggtaatgctgataccggcatcggagaactgtaaggttccgtttgcctgtaaactataggtggtctgatatccgccaatggtaaactgactggtattgctcaaattaccaatgatattaaatcgcgccgtcagggttccgctgtaagcacctattccttcaatcgcaatggtcgctctacccggattgacattgttactataagtcaatgtataatctgtattttcttttaataccacatccccatacataagggaaaggcttggcatgatcttatctccggtatacatctgatccgggatcgcctctactgtcacattatcagaaatactcttggtaacaatagagaacttcaagttgatcgttccgctgtagttaccaatacccacaatcataacggtaggtgcatctgcatcgctcttatctgcaatgttgatattgttcttgtagccctgtaccttgtaatccacatcctgtttcaagacagttcctgcggtatttgtgattgtaatgccactgatatccggcttgatctcttttccggtgtatgtataatccggcagggtggttgcggacggtgtacatgcgctcaggtcacttgccacgatcgtataggtctggctcagggttccgctgtaatgtccgataccctttgcctgtacggtatatgtaccaacatttggtcctacctccgtcgccgtgaactgataatcggtcccctcaaccaactgaatggtcttgccggatgcattataggtcacctggatctgtggtgtgatcttatttccatcatagacatactcaaagcctgcctccggatggttcggatcaatgtttgtaacggttacggaagactcattatccaaaacaaccatggtcacatagtagcgcttggtaatggttccatagtagtcgccaatacctgtataagtaataacaacgcattcggtagatcccataccaccggcctcggtcgtataggtgacggtgtaatcggtatcttcttccagatctgtttccttgccgtctgcatccgtgtaggtcagtttcgataccggtttgatgctgttgccatctgtatctctgccccaatatggtacatagtaatccccggaagatgccggttttagggtagagtcatcataagggttatgcagttctactgctccgcccagtgccagattgcttccgatcgtataggtgatatttctgcttccggtataattgccaatacctgtgatggttgcaatctttccctcgccggaagtcttactgtcctcacctacggatacagtgtaatcggtatcctgtgtcagaaccttattatttaagttggtgtttactacatttacaaccggcaggcgatagtcaccattcttaaccagtttctgtgtatctgtgatcgtaacaccgcttgcttcggatgtaatgtcctttggtgcgatcgtgtagtaaatggtcacggtagagccaccataatttccttttccggtcaccacgattgccggtgtcttggatgtgttattctcatcataacctgccgcgttgatcgcattcacggaacttgtcttatagtttccgctcttagcgactgtagcgtccccatccttaacggtcagacttggcgagatcgttcttcctgtatattctgcaacataggttgccagataagtattctctgcaatctgcttgacctcctgtccgcccaggataaaggtcagatttgaaagcgacttggcaacaatggagaaatactcgtctcgttcctccgtcaggttcttctcacctgtgatggtgatggttgcctgaccaatgttcttattattactgtaagacaaggaatagtttgcgtttgaaatttcacgcttcgttccatcatcatcctgataatataaggtaatatccggtttgatctgatttccggtataaatctgatctgcgatcttttccggttctacaaccacatgactatctgtcagactcagtttttggatggtaaaggtagcctttacactaccggtataattgccaataccatttgcataaacagttgctgttccggcattggtgttatcctcgtaggaaagttcaaaatcctgtccttcgacataggtcttacctatcttggtcagagtatattcaccggaagataaggtaatctcttttcctgtataggtcttctttgtagaaacattcaaagtaccactgatagtctgtggcttgatggtaaaggtcacgcggatctctttaccactgtaattgcctgcacccttgatgacggcaaccgccttctggtcatctgtgcttgcattgatattattctcataggaaacggtatagtctgtttttgcttttagccaactgctgcccatttttacggagaccgttggctggatctcagaacctgtgtaggttgctgtataatcactggcatatccatcatcatatgtgacgctgttatttccaacgctgacaaccgcagccgtctcaaaatcaccaaggatctgatactgctttgtcacagtaccctggaagttatttccggcacctgagatttccacactcatggtaccaatggctgtattcttgctataggttactgtataatcctgatcctgaaccagggtataaacagagttgtcacgtgttaaagtaactgtcatgaccggctcgatcttcttaccggtataggcaaatgtagtagcagccacgccatcgatgcttgccgtaatatccagtttatcatcatcctgtgcctgctccagatcacaacggttgatgtcaaagcctaaaacgatcgttccggtatagccgtttgcttccttaccggtgatggtcacagttgccctgccaacttctacattgttggtatattcaacattacaattatcgccaaagccttcgatcgcttcgtttgttgtggcattcttaaaggtaaccgccggttcctttgtcaagccgtcataagtataagaagtctgtgacaactcagcgcttacgatctggctgatatcaaacttattgtcagatcctgccttgatctcataattattgtaaatctgtgctcctgtataattgccaataccggttacggtaatatcgtacagataaaccagttgtccgctttctacctgatttccttttaatactgcttccgctgtatagtccgtcccaaaagtaagagtcttgccctcatcggaatagataccgttagtgaccgtgttggatgcaatatctacactaaactgtgcacccgcatcctttggcagagcctttctaccgatcgtataggtcagttccttgctatagcctgcataatcaccaatacctgtgatctttgcgactgcttcccctgcgctggtactgccattataggtcacattatactgacttccctgtgttaaaactgtactaccgcattttacagtaactgccggttctaccgcttctcctgtataagtataagttccttctgcgatggatgcctctaagatattgactttgatacttgcagtactgcttgttccgactgctgatactgtcacatttccgctgccactggtcacatcggcattaagagaaatcgttccatctgcatttaccgtaaatggcgcacctgcatctaccgtataggtaagtgtacgtttcaaggctggtgaaaggcttgcctgaaccgctgtctgtgtgtccgttgcgtctatggcgatggtagattgaccggcagtgacagtggtgttatctgaaactgcatccgcgcctacatcagaaagcccggtctctatcataccgtcacgtccatcccaggcgctttcataataatagccgctaccggataccgtatagtaatagatagcatcgctgacactggtgaagttaaagacaaccgcataggtctcaccggaagataaataaattcccgctccgctcagatccagagaaagttctcttgcagatgcgctctccgatgttccatccatatgctgctgggcactggtatagcgtaagactccactggtcggatcactggcatctgccagattttgatagaccgaaacggtataatctacgctctgctccacatccatgtccactttcatggctgcacgatccagcctctgataatcttttgtcgcgctgccaatctgtgcatattgtccttcttccagcaatgtttcgccaatatttgacgtgtagtccgcgaacagattgcttccgatcgacagtgtcgagacaaccatcagcgccgccagcactcctgctaaaattcttttctttacatccttgtacatactcatagagcccctttcaccaagtttttctctatttttcacgcccatccaagggcatagttagacttattctatttccatatcgacctatcctattcaaaactttacctttttctgtaaaattatcttccacagcaaataaaaaccatgccggaagcacaaagcccctgacatggttcctatggtcatttctattatgcgttcacgatctttccggtatataactggtagtatttaccgccctcggcgatcaattcgtcgtggttaccgcgctcaatgatacgtccctggtctaagaccatgatacaatcactgtttcggatcgttgacagacgatgggcaatgacaaaggtcgttctgcctgccatcaatttatccataccatcctgtacgatcttctctgttctcgtatcgatcgaacttgtcgcctcatcaaggatcagtaccggcggatctgcaatggctgctctagcgatcgccaaaagctgtctctgcccctgactcaagttagcaccgtcaccggtcagtaccgtatcatagccattcggcagtttgtgaataaaactgtctgcattggcaagttttgctgctgcatgcacttcttcatccgttgcatccagtttaccgtagcggatattatccgccaccgtaccggtaaagaggtgggtatcctgcaatacgataccaagtgaatgacgcagatcatcttttttgatcttattgatattgataccatcgtagcggatcttgccgtctgcaatatcgtagaaacggttgatcagattggtgatcgtcgtctttccggcaccggtcgcaccgacaaaggcgatcttctgtcccggtgtcgcaaacatcttgatattgtgcaataccgtcttgcccggttcataggcaaaatcaacatcatcaaagaccacatcgccttccaattttacataagatgtcgtgccgtctgcctgatggtaatgtttccaagcccacataccggtacgctcgcttgtctcaacgatctgtccgttttcttccttggcattgaccagagtaacataaccttcgtcatcttccggcttttcatccaaaagtccaaagacacgttctgcacccgccatagccataacgataaagttcaactgctggctgacctgcatgatcggcatattcagactcttattaaaggtaaggaaacttgccagaccacccagggtaaagccgccaaatccaccgatagcaaggataccgccgacaacggcaacgatcacataactgacattaccaatctgtgcattggcaggtcccaacatattagaatacatatttgcctgataagcactgtcaaaaagttcatcattcaaggcattaaattcttcgattgcttcttcctcgtggcagaataccttgacaaccttctggccgttcatcatttcctcgatgttaccattgacacgtcccaggtttctctgctgcttgccaaaatatttgccggaatttcctgccaagaactttgtcaccaaaagcatgatggctaccatgccaagtgtgaccagggtcagcgggatactcagtctgatcatgcagacgataacaccgataacggtgacgccggagttgaccatctgcggaatactctggctgatcatctgacgcagggcatcaatatcgttggtatagatggacatgatatcaccgtgctgatgggtatcaaaatagcgaatcggtaattcttccatatgaacgaacatctcatcacgcagggcgcgcagtgtaccctgtgtcacctgtgccatgataaagttgtaaaggaaggcacataccacgcccagtgcgtaaaagcctgccacgcgtccgattgctgccaaaagtggtccaaagtccacactgtgtgcttcgaccatcggtgtaatgtaatcatcgatcaaattctgcatgaacatggttccctgcaaagaacagagcacacttgccagaatacatactaaaacaatgatcaaatggatgccgtacatcttaaagatgtagcgtgccagtctgcccataatatgtttgtttaccttgaggcttcccttgcctctcggagccgcctgttgtcttggcatattactcaccctccttctcatcaaaatcgcccgaaccgccgccggtctgggattcatatacatcacgatagatcgcattgctttccagtaattcctcatgggtgccaatgccatcaatgcggccattatccatcacaacgatacggtctgcatcctgtacggaggagatacgctgtgcgatgataagtttggtcgtacccgggatctcctcacggaaagccttacggatcttggcatctgtcgccgtatcgaccgcactggtactgtcatccaagatcaataccttgggctgcttcaacaaggctctggcaatacaaagtctctgacgctgtccaccggaaacattgctgcctccctgctcgatatatgtatcatagccgtccgggaaacgctcgataaactcgtctgcacaggcaagtttacaagccttttggcactcctcgtccgtcgcattttcacttccccagcgcaggttctcatagatggttcctgagaaaaggacattgttctgtaaaacaacagatacctgattacggatgacttccagatcgtagtcgcgcacatcaatatcgccgacccggacttttccttccgtcacatcatacagacgcgagatcaggttgaccagtgtagatttggcactaccggttccacccaaaacgccgatggtctcaccacgtttaatatgaaggtcgatatcttccaacacaaattcttctgcatcctttttgtatgcaaaattgacatgatcgaaatcaatatctccgtttggcacttccatgaccggattttccggattcacgatcgttgctttttcatttaagacttctgccacacgtttggcatttgccacactcatggtgatcataacaaataccatagagagcatcatcagactgcctaggatattcatacaataggtaagcatactcatgagttcacctgtggtaaaggtagaggtcacgatcatctttgctcccagccaactgataagcaggatacaggtataaaccgttgtcatcatgaccggtgcattgcaggcaaggatacgttctgcttttaataagaacttgtagatatttccacttgccttctgaaatttttctttttcaaaatcttctcgcacatatgccttaacaacacggataccggaaatattttcctgcacgctggcattcaagtcatcatatttcttaaatacataatcgaagatcttggtcacgcgtgaaatgatcaaaaagaggacacaagcaagaatcaaaactgcgatcagatatacacttgccagacgcgggctgatgtaaaaggacatgatcatggcaacgatcagacttgcaggtgcacgcatacccatacgcaggatcatctgataagagttctgtaagtttgtcacatcggttgtcagtctggtgaccagacccgccgtagaatatttatcgatattctcaaaggagaaggtctggatattggcaaacatggatttacgcaggtttctggcaaatccggcagacgctcttgctccgtattttcctcccatcataccagcccagagtccaacgagggctgctaagatcatgtaagcaccgatgacaaagatatggtgcatatctcccttgttgacaccttcatcaatgatggatgccatcaatagcgggatgaccatttccattgccacttccacaagcataaagatcggtgtcagtatcgaatctctggtaaattcttttacctgtgcaagtaatgtttttaatacatgcattatttttccctttcctttcctattttttctc

SEQ ID NO: 12476 - DNA, 7242 bp, Unknown
  gut microbiota DNA sequence
gtgtggttggagccgcacttttaactgcactttatgtatcgattttccgcagccaactcggcattacgatgacagaagtctggctcttggcaggcgtttctgccattggagcgttgatctctatggtgggagatctggcggcttctgcgatcaaacgtaattacgatatcaaggactatggaaaactgatcccgggacatggcggtattttggatcgttttgacagtgtgatcattaccgcaccgatcatattctttttagcatcaagagttttgtaggagaagataagatgaaaaatattgcaattcttggttccacaggttcgatcggaactcagacactggatattgtagatcaaaataaagaagacttacaggtggtagcccttgcggctggcagcaatattactttactggaaaagcaggcgagaaagtatcggccgactttggttgcggtctgggaccaggcgtgtgccaaagaattaaaagaaaatttaaaggacacagagatctctgttgtatccggcatggacggacttttggcagtagcgactcatccggcatccgagatcttagtgacggctatcgttggcatgcttggcatccgtccgacgatcgcggcgatcgaggcaggaaaggatattgcacttgccaataaagagaccctggtaacggctggtcatattattatgcctttggcaaaaaaatgcggagtatctattctgccggtcgacagtgaacacagtgccattttccagtctttgcagggcaatgcacacaataagatcaaaaagatcttactgacagcatccggcggacctttccgtggaaagacatacgaggaattggaacatgtgacattagaagatgccctaaagcacccgaattggagcatgggaaagaagatcaccattgattctgcaaccatggtcaacaagggactggaggtcatggaggcaaagtggctctttggtgtaaagccttcccagatcgaggtcgtcgtacatccgcagagtattttacattccgcagtcatgtatgaagatggcgctgtgatcggacagatgggaacaccggatatgcgacttccaattctttatgcattattttatccaaatcgtcgtatgctttatgcagaggaactggatcttttcaagataggcagtctgacttttgaaagaccggatcgcgagacattttatggtctgtcccttgcatatgatgcattagatgccggcggcaatgtgccgactgtctttaatgcggcaaatgagcgtgcggtagccaagttcctggacggcaagatctcctttatcgagataccggagatcattgcagccagcatggaagaaatttactacaaggaagatccgaccttggaggagatcttagatacagaagcagcaacctatgaatatatagagagtcggtggtaaattgagtattattcttgcaattatcatttttagttttatcataatatttcatgaattggggcattttctggttgccaagaaatgcgatgtcaaggtcaatgaattctgtctgggacttggaccgacactccttcattttaccaagggagagacaacatactccttaaaacttctgccttttggcggagcctgtatgatggagggtgaggacgaggacagtcaggatgaccgtgcttttaaccataagcccctttggcagagggcggcgatcgtagcggcaggacctttctttaactttattctggcatatgttctgtctgttattttgatcggggctatcggctatgatgtgccgaaacttgccggtgtcatggaaggctcatccgcagaagaagagggacttgcggctggagataccattcttgcgctggacggttaccgtgttcatttctatcaggagatcagtgtttattccttttttcatccgggaaagaccatggatgtgacttatgaaagagacggtaaggaatatagtgttcaggtaactccgcagtataacgaggaagcgggcagatacctcttgggcttacagggggactacaccaggatcaagggcaacataccgacgacacttgcctatggattttacgagatgaaataccagatctatgcgacttttgagagtctgaaaatgctggtgacagggcagttatctgtaaatgatatgtccggtccggttgggatcgtcaagacgatcggcgatacctatgacgagtccgtatcttccggtgctttttatgttgccatgaatatgatcaatattgccatcctcttatccgccaatctgggcgtgatgaaccttctcccgatcccggcactggatggcggacggcttctcttctttttgatcgaggctatccggggcaggcagatgaatgaggagatcgagggaaggatccatctagtcggctttatgctgcttatggtattgatggtcgtcgtcatgtttaacgatattcagaaattgttcgtctaggaggtttttgctatggagcgaaagataacaaaagagatccatattggagatcgtgtgatcggtggaggcaatccgatcctgatccagtctatgaccaatacaaaaacagaagatgtcgatgcaacagtcgcacagatccggcagttgacacaggcgggctgtgatattatccgttgtgctgttccgactatggaagcggcatgtgctttggaagaaataaaaaagcaggtggagatcccggtcgttgcagacattcattttgactatcgtcttgcgatcgcagccatggagcatggtgcggacaagatccgtatcaatccaggcaacattgggtcactggatcgtatcaaggcagtcgtggatgtggcaaaagagcgcaacatcccgattcgtgttggggtaaacagtggttccctggaaaaagaactggtagaaaaataccacggcgttacggcggaaggcattgtggagagcgcactggataaggtgcatatcatcgaggatctgggctatgataatctggtcatcagcatcaaatcatctgatgttctcatgtgtgtcaaggcacatgaactgatctccagccagacggattatccgctccatgtcggtatcacggaatcggggacactgaccagtggcaacatcaagtcatcgatcggtctgggactgatcttacaccagggcattggcgataccatccgcgtttctctgaccggagatccgatcgaggagatcaagtctgccaagttgatcctgcgcactctggggctgcgcaagggcggcattgaggtcgtatcctgtccgacttgtggacgtacacagatcgatctgatcggactggcgaaccgcgtagaaaatcttgtggcaggttatcctttggatatcaaggttgccgtcatgggctgtgtggtcaacggaccgggcgaggcaaaagaggcagaccttggcgttgcggggggcattggcgaaggccttttgatcaaacatggtcaggtagtcaagaaaatgccggaagaagaattactcccggcattaaaatacgaattagatcattggggcgagtagccccttagttggagtgaagcagattggataaaagttttcaggaagtttttccatccttacaattagataatgacttaatgcagatcatgcagggagcaatgattcagaaggtaagtacgaaccgggacagaagtgccattcgtatttaccttcattgtgattcccttgttcccaagcgccgtatctggaagatggaagatgcaatcaagaaacagtgctttgcaaaagaaaatgtaacgatacatatcatagagtctttttcattatctgcattatatacgccggaaaaattatacgatatttataaggacagtattttagaggagatcaatgcctatagtgcccttttatttggcgtattcaaaaaagcggattttaccttttcagaggatcatcttctggtcactctggaagatacggtcatcgcacatggctatgagcaggaactgcacgatatcttagataagatcttttgtcagcgctgcgggcagaaactcatcattgatttttcctataaagaaccggttgcaagcaagtatcgtgaaaattcacagatactgatcgacaaccagatcgcggagattacaagacaaaaccgcatgcgccagcagcagaaggaactgctgaatgcagaggaaggcgagcaggataccggcagcgagaagccagccaagcctgccggcaaagatggcggaaacgaaaagaagtcctttggcaaaggcggcggcagacgcggtggctttgcagcgaaaaaatcaaacaatccggatgttatttatgggcgtgaatttgatgatgaaccgattccaattcaggagatttccggtgagatcggcgaggtaaccatccgcggacagatcatcagttttgaaagtcgagagatccgcaatgagcgtactattttaatgtttgccatcacggactttacggatacgatcgtcagcaagatctttgtggcaaatgatcaggtggacgaggtctgtcagggaatcaagaacggtgcttttatcaagttaaaaggcgcaccgatgatcgataaatttgaccatgaccttaccatgagttcggtctttggcattatgcgtatcccggactttacgacttcccgtcatgatcatgccccggataagcgtgtagagttacactgtcataccaagatgagtgatatggatggggtatcggatgtcaaggatatcatcaagcgggcagccggttggggacatcaggcgatcgcaattaccgaccatggagccgtacaggctttcccggatgcagaccataccgtgcatgatctggatacggacttcaaggtgatctatggctgtgagatctatctggtggatgataccaagggtattgtgacggattccaagaaccagagtctggatgatacctatgtggtctttgacttggagacgacaggatttcatgcaaaaaataataacatcatagagatcggagcggtcaaggtcgttggcgggcagatcacggaacgtttttccgagtttgtcaatccgaaagaaccaattcctttccgtattaccgaactgactagcatccgtgatgaggatgtcattgatgcggaggatattacaaagatcctgccacgttttatggatttttgcaagggtgctatcatggttgcccataatgcagactttgatatgagttttatcaaggcaaattgcgaacgactgggactgccatgtgactttacctatgtggatacggtggctctggcgcgttatctgcttccgtcactcagcaagttcaaactggacaatgtggcaaaggcagtgggtgtatctttggaacaccatcatagggcagtagatgatgcgggctgtaccgcagagatctacgtcaagttcttggaaatgttaaaagaccgtggctttgagacactggatgatgtcaacaaggacggtatggcatctgatgagaccatccgcaagatgccgtcttaccactgtatcgtcttagcaaaaaatgacattggacgtatcaatctctatcgtttgatctccatgtcacacttacagtattattacagaagaccaaagatcccaaagagccagttgcagaaatatcgggagggtctgatcatcggctcggcatgtgaggcgggagaattataccgcgccatcctaaacagccgaccggaagaagagatcacgcgtatcgtgaatttctatgattatctggagatccagccgctcggaaacaatgcctttatgctccgtaaggatgacggactgatcaagagcgaagaagacctgcgcaatatcaaccgcaggattgtctccttaggagaaatctttaaaaagccggttgttgcgacctgtgatgtgcattttctggatccgcaggatgaagtatatcgccgtatcattatggcgggtaagggcttttcggatgccgacgatcaggcacctttgtatctgcgtactaccgaggagatgttggaggagttttcctatcttggttctgccaaggcggaggaagtcgttatcaccaacaccaaccggatcgccgatatgtgtgagccgatctcgccggtgcgaccggacaaatgtccaccggtcattgaaaactcagacggcatgctgagaaagatctgctatgatagggcgcatgcgctctatggcgatgatctgccgcctgtcgtagaagagagactggaaagagaactcaaatccatcatcggcaatggttatgccgtgatgtatatcatcgcacagaaactggtgtggaagtccaatgaggacggctatctggtaggttcccgtggatcggtaggatcttcctttgtcgccaccatggcaggtattaccgaggtaaatccgctcagtccgcattatctgtgtgaatattgtcattttgttgattttgattccgaagaggtcaaggcttattccgggcgtgcaggttgtgatatgccggaccgcaagtgtccggtctgtggcaaggatctgaaaaaagagggatttgatattccgtttgaaactttcctgggatttaagggaaataaggagccggatatcgatctgaacttctccggggattatcagtcaaaggcgcataaatacaccgaggttatctttggggaaggccagacctttaaggcgggtacgatcggtacgcttgctgataagaccgcttttggttacatcaagaattattatgaagaacgtggcatacacaagagaaattgtgagatcgaccgtatcgtacagggttgtgtgggcgtgcgaagaacgaccggacagcatccgggcggtatcatcgtacttccggtaggagaggacattttttcctttacaccggtccagcacccggcaaacgatatgacatccgacatcattacgacccactttgattatcactccatcgatgccaaccttttgaaactggatattctgggacacgatgatccgaccatgatccgtatgttggaagatctgaccggactgcatgcgcaggagattccgctggatgataagacggtcatgtcactctttaaaaatacctcagcccttggggtcacaccggaggagttgaacggctgtccgatgggaacgctgggtatccctgagtttggtaccgattttgccatggggatgctccgggatgcaaagccgcaggagtttacggatctgatccgtatttccggcttgtcccatggtacggacgtatggctggg

SEQ ID NO: 12477 - DNA, 23125 bp, Unknown
  gut microbiota DNA sequence
actttgatcgaaaatggtacggctacgatttctacctgtatctgtacgcgtgatgatatcatgacctatttgatccatatgggactggatagtgcggaagcctttgatatcatggaaaagaccagaaagggtatcattgccaagggcaaatgcaagcagtggccggagtggaaacaggatatgctggatcatggcgtgccggaatggtacacctggtcctgtgaaaagatcaaatatatgttcccgaaggcacatgcggcggcatacgttatgatggcatggcgtatcgcttattgtaaggtcttttatcccctggcttactacgcggcattctttagtatccgcgcgacatccttcagttatgaactcatgtgtcagggcaaggataaactggaattttatattgcagaatacaagaaaaaagacaagttgtcggcaaaagaagaaggaactctccgtgatatgcgtatcgtacaggaaatgtatgcgcgaggttttgaatttttacccctggatctgtataagtcagatgccagatatttccagatcgtcgacggtaaattattaccgcctttcaactcgatcgacggcatgggagacaaggcggcagagtcgcttgccattgcagccagtggcggcaagttcttatccaaggatgacctgcgggagcgtggcaaggtaagtaaatcgatcattgaacttttatccgatctggatattatttcggatctgccggaatccaaccagttatccttcttcgactttacggcgtaggatgaagcagtttaggaaattccacggattttcctatttataaaaagagatgattatgagaggaattacatgaaagatttaagtgagatccgatgtgatattgacgcgattgaccgtcagatcgtatcgttgtatgaacagagaatgggacttgctgcggaagtggcagaatacaagatcgccaaccataaaaatgtctatgacaaggcacgcgaggatgacaaattaaagaccttggcggggctggtgccggatgaatttttaaagcagggcgtggtcgaactttttgaacagatcatgtcgaccagccgcaaaaagcaataccagatgttagcggaagcaggacagatcgagccgttgggatttcgggcgatcgatgctctggatgccaaggataagcggatcgtttatcagggagtcgaaggggcttatgcccagatggcaatgcaacagttctttggcaaggaatgtccgggtgaggcagtagcgacctggcgggatgctatggaggcgatccagagcggatgcgtggattatgcggtcctgccgatcgaaaactcatccgccggtattgtggcggaaaattatgatcttttgatggaatatgacgtgacgatcgtgggcgaacagatcattaagatcgaccatgcactcttaggtgtcaagggggcaaagatcgaggatattaccgtggtatattcccatccacaagccctgatgcagtgtgcggactatctggatgaccatgcaaaaatggagcgcaaggcattgaagaatacagcccttgcagcccagaaggtcaaagaggacggtctgaaaaaccaggctgccattgcaggcatacataatgccggtatttatgatctggatgttttagaccaagccattcaggataataaagaaaatgagacacgctttatcattgtggcaaaggataagacctatctgcaatctgcggataaggtcagcctgtgctttgcactcccggatgatgaggctggtgccttgtatcgcatcatgtcacattttatctttaatgggatcaacctgacccgtatcgaatcccgtccgagcaagggcggctcctggggctaccaattctttatcgattttgaggggaatctgagacaggaagcggtcgtcaatgctctgcggggcttaaaggaggagacatcttctttccgcattttggggaattaccagtcttttgcaaaggaaaattagatttttcaaaaattttatggggattttacatggatatgttaaggtggagattatgtaaagggggatattatgaagttatatgcatcgatctatattggatcttatgagattattctgaaagtatttcagatcacacaaaagaaacgcttgaaggaactggattgcctgcgtacaccgatcgatacggcacaggatatctatgccagcggtcagttgaaaaaggagactgtagataggatctgcaatgtgctggaagatatgaaacgcacccttgccctgtatcggctgacggaggactatcagatctatgccggctctacctttacggcggcagacaaccgcctctttgccatggaacagatcaaactgcgcaccggtatgaaggtgctggcgctcagcaattccgagcataggtttatgagttatcgcgcggtggcatcccaggataattttgatgccatggtatcggagagtgcagcaatcgtggatatcggcggtgccagtttacagatcaccctcttttatcatggaaaggtcagaacgacacagcatatcggtttgggaacggtcatcatgagcgagaatatgaaacgtttatcctatatgaccaaccataaagagcagatcgctcagatgatgtataaggaactggatgcctttgtcaccatgcatatgcaggatgtcaagttaaaatatttgatcatcttaggcgaccatgtatcgactttgatggaacgcgccgtagatgatgcgaccagggaaccgatcaggatggagcattacatggaacttctggagaatatgcgggataagaccttgcagagcatcatccgggaatttgatgtcttaaacgatcatgaggaactgatcgaaccctttttgatgctgcatcatgccattgcagaaaaactgccggcaaaatatgtctatgtgccgggcgtatctgtcaatgacggtatggcatatcactattttgcaccaaaacattatctgcaggtagaacatgactttgaccaggatatcatctctgcggcatggtcgatcgccaagcgctacggcagttaccagccgcacttaaaggcactggataagatctcgacccagatctttgatgcgacaaagaagtttcacgggctggataaaaggcaaagattattgatgcgtctggtcgcgatcttgcatgactgtggaaaatacatcagtatctcggatgcgtccgattgttcctatatcattatcatgtcatcggagatcctggggctatcccacaaggaacgtgagatggttgctacggtcgtatctttgaaccgtaaaagtctggaatcttatgacagcatggcggatcgttttagcgtggatgagtatatgacgatcgtcaaactgcttgctatcttaaaagtggctaatgcgctcgaccgcagccacaggcagaagttcaagaacatcaagatggcggtgcggggcaatcgtttgcacatcaccattgaggcgacggattccatcgcattggaaaaaggcatgtttgaagaaaaggcagacttctttgaaagtgtattttccatccgtccgatcttgcgggaattgcgcgtgtttgaatagagggggatcaaaaaatgagcaaggcagaagaattcaaaaatccaaaatattatgataaccgagaattgagttggatcaaatttgagcaccgtgtactaaacgaggcaaaggataaggagataccgattctggatcgcctgaaatttgtcagcatcacatcttccaatctggatgagttctttatggtacgtgttgcttccttaaaggacatggagcatgcaggctataccaaaaaagatattgccggcatggatccaacggaacagttgtgtgcaataggaaaggaagtccatgcgcttgttgaaaagcagtacaacacctacaatcgttccctaatgccgattctgcgcaaggagggcattcggatcataggcgcttatgaggaactcaacgaaaagcaggcaacctatgtagataaatactttatggagcatgtctatccggtgctgacccctatggcggtagatgcttcccggccttttcctctggtgcgcaacaagtccttaaatattgcggcactcatcaagtccaagcatccaaattcaaaattacagcagggaagtaagcaggaactggaatttgctaccgtgcaggtgccgtctgttctgccacgactggtgccgatcccgggcgaggacgaccgttatacttttacactcttggaacagatcatagaaaagaatatggcacaactctttttgaactatgaccttgtgtgtgcctatccttatcgtatcatgcgaaatgccgatctgtcctttgatgaggatgaggcgagcgatcttttaaaagagatccagaagcagcttgtcaaaaggcagtggggtgaggtgatccgtctggagatcgaacataaggcggataaacgccttttgcaggtcttaaaagaacaactggctgttagcggtaaggatgtctatgagatcgcaggacctttggatcttaccttcttgatgaagatgtatgggctgtccggctgtgatgatctgcgggagaaactttttgtaccgcagaaaaatccaagaatccttccgggagagagcatttttgacgagatcaaaaaaggagatattttcctgacccatccctatgagacctttgatccggtcgttgattttatccagcaggcagcagttgacccggatgtacttgccatcaagcagactctgtatcgtgtcagtggcaattcaccgatcatcgcagcgcttgccaaggcggcggaaaacggaaagcaggtcacggtcttggtagaattaaaggcacgttttgacgaggaaaacaatattgtctgggcacaaaagttagagaaggcgggctgtcatgttatctatggactggtgggcttaaagacccattgtaagatcgcactggtcgtccgcagggaagaggatgccatcacacgttatgtgcatcttggtaccggcaattacaatgactcgaccgccaaactttacacagattgcggtatctttacctgcaatgaaaattatggagaagacgcaacggctgtctttaacatgttatccggttattcggagccggcaagatggaataaactggtcgtggcaccgatctggctgcgtgaccgctttatcgccctgatcgatcgggagatcgctcatgccaaggaaggaaaagaggcatatatcgttgccaagatgaattccttgtgcgaccggcagatcattgaaaaattatacgaggcatcctctgtcggtgtagagatctacctggtgatccgcggaatctgctgccttcgtaccgggataccgggcgtaagcgaacatatccatgtgacctcgatcgtggggacttttttggaacatagccgtatcttttatttctataataatggacaggaagatatatatatgggaagtgcggactggatgcctagaaatctggatcggcgtgtggagatcgtattcccggtggaagatgatgtgatcaaggatcggatcaagcatatcttagatgttctcctgcgcgataatttaaaggcatatgccatgctttcggatggcacttatgcaaagatgagccgacgcggcaaacaggcgatcggcgcccagatgacattctgtcgtgaggcaatggaaggagcgaaggaggagaccacagtttggaaaggcagacgctttataccgatctgggcctttgatgaagaagaacatgaagcctaagattttatttttagatttaaattgtacaaaattgtccaaaaaacacaatatatagtgcttttgccttgcacaaggtacaaaagcatggtatagtatatacaagtatttaagaggatacttaggaaccacttaaaatatgcaccgaggagggaatcaaagcaatcggtttagatgagtattttaaggtatcggcggtagtcgagtattccggttccgaagattccggacaaggacgactgatatggcatactagaagaagggagtcttctggtgaattcggaaacatattcagagtcgcctgtgatgaattaaaacaagagacaggcaaggtctaaggacaagggggaagacgacaggatttctgtcgttttccttttgtgcgaatttagcagaaaaatccgaaaaaagtattgacgccccatagaatctgtgataaagtaccaatgttgtgaaaacaaagtagagtatccactctcacctgagcacagaggtgactcagcgtttatattccgactttttgaagtgttgtgagtttgattgtggatagtctgtctatccactttttttattttaatctggaggtataagaccattagcgatttaatgattaacgagcagatcagagacagagaaattcgtctgattggttcaaacggagaacagcttggcattatgtcagcaagagaagcaatgaaattggcagaggaagcagaacttgatcttgtcaagattgccccgaatgctaagccaccggtatgcaagatcattgattacggtaagtatcgttacgaacttgcacgcaaggaaaaagaagcgaagaagaagcagaagacagttgaagtcaaagagatccgcctgtcaccgaatattgataccaacgatctgaacacaaaggtcaatgcagccaagaagttcctttccaagggcaataaggtaaagatcacacttcgtttccgtggtcgtgagatggcgcatatcgcacagagtaaacatatcttagatgactttgcaaaggaagtcgaagatatggcagtagtggagaaagcaccaaagcaagaaggcagaagcatcagcatggtgttggcagaaaagagataatttaaggaggaaaataacatgccaaaaattaagacaaaaagagcagctgcaaagcgtttttctacaacaggaacaggaaagttaaagagaaataaagcttacaagagccatatcttaaccaagaagacaactaagagaaagagaaatcttagaaaagcagcaatgacagatgctacaaatgttaagaatatgaagaaggttttaccttactgctaataaataggttaaggaggatatcaaaatggcaagaattaaaggcggaatgaacgctaagaagaagcataatagagtattaaagatggcaaagggctacagaggtgctagatctaagcagtatcgtgtagcaaagcagtcagtaatgagagcacttacaagttcttatgctggtagaaagcagagaaagagacagatgcgtcaactctggattgctcgtatcaacgcagcagcaagaatccatggtctttcttacagcaagttcatgtatggactgaaacttgcaggtgttgaaatgaaccgcaagatgttagcagagatggctgtaaatgacgcagcagcatttgctgaattagttgaattggcaaagacaaaggttgcctaaagataatgcaggactccgaacgtattcggagtcctttttttgtcaattttttaaccaaataaaggtttttttataaaggcacttatgctataatgccctttggtgagtgaagaatattttaattaggaggaatgacagatggcaattttagttaccggtggtgcaggctacattggaagtcatacttgtgtagaacttttgcaggcaggatatgacgtggttgttttggataacttatccaatgccagtgaaaagtcattggatcgtgttaaggcgatcacaggcaaagaggttactttctacaagggagacatcttggatcgtgacatcttaaatgagatcatggacaaggagcagatcgactcatgtattcattttgccggcttaaaggcggtaggtgaatctgttgagaagccttgggaatattataacaacaatatcgcaggaacattaacactggtggatgtgatgagacagcatggcgtaaagaacatcatcttttcatcatctgcaacagtttacggcaatcctgcacagatcccgatcacagaggagtgcccaaagggacagtgtaccaacccatacggatggacaaagtctatgttggagcagatccttaccgatatgcaaaaggcagatccggagtggaatgtgatcttacttcgttattttaatccgatcggtgcgcatccaagcggaaccatgggtgaaaatccaaacggtatcccgaacaacctcatgccatatatcacacaggtggcagttggtaagttgaaagaacttggcgttttcggtaacgactatgatacaccggatggtaccggtgtcagagactacatccatgtagtcgatcttgcgatcggtcatgtcaaggcattaaagaagatcgaggagaatgccggactttgtatctacaatctgggtacgggtgtcggctatagcgttctggatattgtaaagaactttgaggaggcgaccggcgtcaagatcccttatgtgatcaagccgagaagagccggcgatatcgcaacctgttattccgatgcgaccaaggcaaaggaagaacttggatggactgcaaagtatggtatcaaggaaatgtgtgcagactcctggagatggcagaagaacaatccaaacggctatgaagactaagaattttcttgaatttcaattttttcaaaaaaattgaaaaaagtacttgacgaggaagagtatttgatatattattgtcttgttgtcgcgatgcggtaacaagacatcatggttcgttggtcaagcggttaagacgccgccctctcacggcggaatcaggggttcgattcccctacgaactgttgagcgcaagtagatatgttgctagaattgagagtggacattttgtccactctcaattttttaaaaaaagaaaggtggtggacacatgtcacaaagggagcagtacgaaaagaagacagaagaattgatccttccgattctggacgaaaaaggctttgaattggtggacgtggaatatgtcaaggaaggtcaggattatttccttcgggcatatattgacaaaccgggaggcattaccattgatgactgcgttgcggtcagcagagagatgaatgtcctgctggatgaactggattatgtagagggggcctatacctttgaggtgagttcaccgggattgggacgaccgctcaagaaagcgcgggattttgaacgcagtctgggacaggaagtagagatccgcacttataaagcaatcgacggttccaaagaattctacggtatcctgcatgcctatgatgatgatagtgtcactgtcctatccgaagacgatgaagaagttacatttaataagtcagacattgcattgatccgtctggcatttgatttttagcgtactataacaagaattttaggaggatgaacaagaaatgaagaacaatgaattgttagaagcgttaaatgtgttggaggctgaaaagaatatcagcaaagatgtccttttggaagcgatcgagaattcgcttcaggttgcctgcaaaaatcattttggaaagaatgataacattaccgtgaacatcaatccggaaacatgtgaatatcatgttttagcagccaagacggttgtagaagatgtggaagatccggtagagcagatcagtttggaggacgcacaggcgatggacggatcttacaatatcggcgatgtggtcaatgttgagatcaagtcaaccaactttggacgtatcgcagcacagagtgcaaagaacacgatcttacagaagatccgtgaagaagaaagaaagatggtatttgacgagtattatcagttggaaagaacggttgtgaccggtatcgtacagcgttacatcggcaagaacatcagtgtaaatcttggtaagaccgatgctttcttggcagagaatgagcaggtcagaggtgagcactttgagccgacagagcgtatcaaggtattgatcttagaagtaaaggatacgacaagaggaccgaaggtcttagtttccagaacccacccggaactggtaaagcgtctgtttgaagaggaagtcgcagaagtacgtgacggcgttgtagagatcaaggcgatcgcgcgtgaagcaggcagcagaacaaagatggctgtatgggcagaggatgaaaatgtggatccggttggcgcatgtgtcggtatgaacggcagccgtgtcaatgcgatcgtagatgaactccgcggagaaaagatcgacatcatcgaatggaatgaaaacccggctatgctcattgagcatgccttaagtccggcaaaggtcatttctgttatcgcagatgcagatgaaaagacagcaaaagttgttgttccggattatcagttgtcacttgccattggtaaggagggacagaatgcaagacttgcagcccgtctgacaggatttaagatcgacatcaagagcgagacgcaggcaagagaagcaggcgatttcctggattatgaaaacgagtatgatgatgagtattatgacgacgatgaatactatgatgatgagtatgacgagtctgaagatgattatgtagaagatgactacgatgatgatgcagcatcagaaagtgaagaataaaatgaatggcaaaaaaattccacagcgcaagtgtgtgggatgtaatgaaatgaaagacaaatcccttttagtccgcgtggtaaagacaccggaggatacctttcttgtggatgccagcggcagagccaatggcagaggggcttacatttgtaaagacatcgaatgttttcacaaggcgatgaagaataagggattggaacgttcattgaagtgtaagataccagaagatattgtaaaacgattggaagaggagatgatctaaatgcaggataaggctttggcgatgcttggtatggcaacaaaagcgggaaaagtagtcagcggagaattttccgtggaaaaggctgtcaaagaaggcaaggcatggctggtgctggttgcagaagatgcatctgacaataccaaaaagagttttacgaacatgtgtgaattttatgagtgcgaccttgttttttatggcaaaaaagagaatctggggcatgcaatcggcaaagagttccgggcatccgttgcgatcacagatgaaaatctggcacaggctgtaaaaaagaaaatcacactggtataacaactgaataatggaggatatagtatggcaaaagttagagtatatgaattagcaaaacagttaggtgtagaaacaaaagaagttgttgcaacacttgctgcaaacggaatagaagtaaagagccaaaacagcattgaggatgctgcgatcgcgatcgtagaaaagaagtttaaaaaggcagaaccggtcaaaaaagaagtaaaagaagcaccggagaagaagacagaagcaaagaaagaggcagcggtaaaagaagaacctgcaaaagaaggggcaaagaccggggaaaagaaggcagagcataaggaagaaaatgcacgtccgaagaagaaatcaagcatttccgctgtctttaatgcccagtacagcaagcagcagagacctcgccgtgatggtgaccgtccgagaagaagaccggatggtgacagacaaaatggcaatcgtggtgaccgttccggttccggacgtccggcacagggaagaatcacaatccgtccggagagtgagcgtaccgtcagaccttcccaccgcgtacaggaggagaaggaacgtcaggagagattggagcgcaaggagcgtcaggacagacaggaacgccaggacagacgtgagaatggcaaccgtggtgacagaccaaacggtaatcgtccgatccgtccacgccaaatgtcagaaaatgaccgtccgagcagccgcgtaaacgcaggcgacaaccgcagaccgcgcaataacgacggcaatcgtggcaacagaccaaacggcaaccgtccaaacggtggtggatttgccggtgacaaccgcagaaacaatgctgctccggctgcgccagctgcagatatgaatgcaaagggaagccgcgacaacaaccgcaacaataaaaagaaacatgagcacgatcagtttggctctaagaagcaggaacgctatgtaaacttggagaagaacggtggcaagaagaagaataaggcgccacagccaaagccggcagaaaaggatccgaacgagatcattacactgaccctgcctgagcatattacgatcaaggaattggctgacaagatgaaagtgcaggcatctgtgattgttaagaaactcttcatgaagggcatcatggttaccgtaaaccaggatatcgactacgagcaggcagaagagatcgcacttgagttcaactgcatctgtgagccggaagtcaaggtagatgtgatcgaggaacttcttcgcgaggatgaagagtcagaagaagatatggttgcccgtccaccggttgtctgcgttatgggacacgttgaccatggtaagacatcccttttggatgctatccgtgacactaaggtgacagaccgcgaggcaggcggtatcacacagcacattggtgcttacatggtatcagtcaatggacagaagatcaccttcttagatacaccgggacatgaggcatttaccgctatgcgtatgcgtggtgccaattctaccgatattgcaattctggttgttgcagccgatgatggcgttatgccacagacggttgaggcgatcaaccatgcaaaggcagcaggcattgagatcatcgttgcgatcaacaagatcgataagccaaacgcaaatgtagaacgtgtaaagcaggaattatccgagtatgaactgatcccggaagattggggcggaagtaccatcttcgtaccggtatctgcacatacacatgaaggtatcgatgaattactggaaatgatccttttgaccgcagaagtcttggaattaaaggcaaatccaaagcgtacggcaagaggtcttgtcattgaggcacagttggataagggccgcggtgcagttgcaaccgttttggtacagaagggtaccctgcatgtgggagatccgatcgcagccggaagttcttatggtaaagtccgtgccatgatcgatgaaaacggacgcagagtcaaggtagcaacaccatctacaccggtagagatcttaggactgagtgatgtaccgaatgcaggtgagatctttgtttccatggattctgaaaaagaagcaagaaactttgcggagacatttatttccgagagtaagaataagttaattgaagatactaagaccagaatgtcattagacgatctcttctcacagatccagtccggtaatgtgaaggaactcaatatcatcgtcaaggcagacgtacaggggtctgtcgaggcagtgaagcagtctctggtaaaactttccaacgacgaagttgtggttaagatcattcatggcggtgttggtgccatcaatgaaagtgatgttatcttagcatctgcatccaatgccatcatcatcggatttaacgtcagaccggatgccatggctaaggctaccgcggacagagaaggcgtagacgtcagactttacaaggtcatctacaatgccatcgaggatgtggaagcagccatgaagggtatgctggatcctgtttatgaggaaaaggttatcggtcatgcacaggtacgtcagatcttcaaggcatctgatgtcggaaatatcgccggatcttatgtcttggacggttacttccagcgtggatgtaaagtccgcgtatcccgtgagggcgagcagatctttgaaggtgatctggcatcactcaagcgtttcaaggatgacgtgaaggaagttaaggcaggatttgaatgtggtcttgtattagacggatttaatgacatcgctgaagatgatgtgatcgaagcatatattatggtagaagtaccgaggtaggatatgaaaaaaagaagtattaaaaatacaaggatcaatgaggaggttcaccgcgaattgagcaacatcatccgcggtgagatcaaggatccgcgtgtcagttccctttgcagtgttgtggctgtagaggtggcaccggatttaaagacggcaaaagcctatatcagcgtcttgggcgatgaaaaagcccaggctgatacgatggagggcttgcgcagttctgcgggctatatccgcaaactcttggcatccaatatcaatttgcgcaatacaccggagattcagtttattttggatcagtcgattgaatatggcgtcagaatgtcaaagatgatcgatgatctgaatcagggcaactaaggaggatcttatgcaattagatcaggaactgcaaaatgtatcaagtgtggcgatcgccggacatatccgcccggatggagattgcgtgggctcctgcctggcaacctacaattacatcaccacctattacccacaagttaaggtctgtgtgttcttagagccgatcccaaggatctttcagtttttacagggcgcagacaagatcttggaggcaaaggatagcgaggagtcgtttgacctttgcattgtcttagattgtggggatgcgacaagacttggggatgcggtcaaattttttgagacagcaaaaaggacgatctgcattgaccaccatgtcagtaatcaggcatttgcggataagaataagatcgtggcagatgcatcttctgccagtgaacttgtctacgatagcatggatccggctaagatcacaaagaagatcgccgagtgcatatacacaggcatgatccatgataccggtgtctttcagtattcctgtacttccagtcataccatggaagttgcggggtgtctgatggacctgggaatagattatccgaccatcgtagataagactttttatgaaaagacctttgcccagaacaagatcttagggcaggcactcttaaagagccggctctatgaagatgcagagtgtatcgcttctgtgatcacacaggaggaaatggcagaattttcagtcctgccaaagcatttggacggcattgtcagccaactccgtatgacgaaggaagccgaggtggcaatctttctttatggtctggaaccgggggcttataaggtcagcacacgctgcaagggagaccgggtcgacctgtcacagatcgctatgaaataccatggcggcggacataaaaaggccgcaggctttacagtcgaaggggatgatccatgggcattgatcgatggtatcgtgacggatgtcaaggaacagttagcacaataggtagcatatgaaaagtggaattataaacgtttacaaggaagccgggtatacttcgttcgatgtggtcgcgaagatgcgcggcatccttggtataaaaaagatagggcataccggtacgctggatccggatgccacaggggtgcttccggtctgtatcggaaaggcgaccaaggtctgtgatcttttgacagacaaggacaagacctatgaggcggtcatgcggctgggggtcgttaccgatacgcaggatatgacagggcaggtcttagaggagcacgctgttactgtgacagaggatgcggtccggcgggcagtcgggcagtttgtggggcagatcgagcaagttccgcctatgtactcggctcttaaagtaggaggacagaaactctgtaatctggcgagaaaagggatcgaggtggagagaaagccccgaccggtcaccatttatgagatccgaataaaaaatattgcactgcctctggttaccatggaagtgcattgttccaagggaacttatatccgtaccctttgtcaggatatcggacaggctttgggatgcggaggctgtatggagagtctggtgcgtacgcaggtggcttcttttgccgtggcagacagtctgaccttagcccagatcgaggaagccaaaaaggaagaccggctggatcagatcctgctgccgatcgatcaggtcttttctgcttatcccaaggtatatgcatcagaggaagcagataagagactggtaaatggcaacgcgatcgagcagatgcaggcaagggcagacgaggcgatcgatgagggagatccggtacgcatatatctgtcagatggcagatttgttgggatatatcacttaaatgagcatcagttcaaactaaaaaagatgtttttggagacgacatgaagataattacttcgctggtaaatgagacgatttcagaaaatacagccgtcacggtaggtaagtttgacggtatacataaggggcatgaacttttaacggaaaaactgcgtgggcaaaaagaaaaggggttggcatcctgtgtcctgacttttgatgtatcaccgcggatccgtctgaaaaaggatatgaccaaactcttgattacaaatgcagagcgggcacatattctggaagaagaaaaaatcgattatctggcgcagtgttcttttgaaaaggagatcatgcagttggaaccggaagaatttatccgcctattggttgagaattttcacatgaaatacttagtctgcggcaccgacttttcctttggcaggatgggacggggcaatgccaagatgctggaggaactttccaagacctatggttttaccttggaggtcgtggaaaaactgcaaaaggatcacagggatatcagttctacctatgtccgtgaagagatcgctgctggtaatatagaaaagggcaacgaacttctgggctatgaatactttgtctggggcgagatcgtacatggctatcatctgggaagcaagatggggatgccgacgatcaatctgatcccgccggaggacaagttactgccgaaaaacggcgtttatgtgaccaagatcgagatcgagcatcatatatatcacggtgtgaccaatgttggtgtcaagccgacggtgaccggggaaaatcaaatggggatcgagacacatattttggattttgatcaggatgtctatgaaaaggacgcgcgtgtggtatttctttcccatatccgtgatgaaaagaagttcgactccgtagaggaactctttgcacagatggagagggataagaaaacggcactttcttactttaatcattagtttgttacataattgttacaaatttgttgacagatgaaatatgtcttgctataatgcaaaaagacagcagtgtttgctgctgtttttttagtggaaattttggaaaattcagtttggatttgggaggacattgtgaagaatcgattgattagtgcaatttcggtggcatgtgcaggatgccttatattttctttttgctatagcaacaaacagatgcagtcgcagggattgactgcaggtatcgtggcatctgctgcagtcaatgtagaggaagcggcagccatgccgcaggtatcggatgcggatgtggcgaccaccggtacggcacagttagatacctttggctatgctaatttaggactagccaatgtagagggcaatatcaatatcagagaagcagcctcaaccgatgcttctatggtaggcaagttaccggaaaacgccggatgtgagatcttaggcacagagggagactggacacatatttcttccggtgaggtagaaggctatgtcttatccgaatatcttctgaccggtgatgcagcgatcaccaaggcaaacgaggtggcacgttatactgccacagtcaatactgactctttgcgtgtacgcttagagccaaataccacatctgagatcttagcgaccatgccggagggcgaggagttagagatcgtatcggagaccgatggatgggtgcaggtcaatatcgatggcgaatatggctatgtcagcggtgactatgtgacatgtgcaacgactcttgcagatgccatgactatgtcagaggcaagatacggacagggtgtatcggatgtccgtgtggatcttgtcaactatgcgacccagtttgtaggcaatccttatgtctggggcggcaccagcctgaccaatggtgcggattgttccggttttgtcctttccatttttgcaaaatacggttacagtctgccacattcttcccgtgcacaggcaaattacggtaccagagtcagcacttccgaattgatgccgggagatctgatattttacggcagtggcaagagtatcagccatgtggctatttatatcggcggcggacagatcgtgcatgccagcaccgaacgtaccggtatcattatttccagtgccttcaacagatcaccgatctgctgcacaagattgttagattgatacaataaatatctttacaggatatacaacctgtgttatactcttttggtatgattttacccgtattcggtatttggaaactccgaccttatgctgagtacaggcgtatgaaattttaggaggtagaaacatgatttcaaaggaaaagaaaacagcaattatggaagaatacgctagaacacctggtgatacaggttcaccggaagttcaggtagcagttcttacagcaagaatccaggagttgaccgagcatttaaaggaaaacccaaaggatcaccattctagacgtggtatgttaaagatgatcggtaagagacgtaatctcttagcatatcttaaggacgttgatatcgagagatatcgttctttgatcgagcgtttaggcttaagaaaataatttgcttgcatgggcggggtagttttctattccgcccaatttttcgtatgggattgcccataagttaccggttatcagacaggaggatgatccgagaccactgataagtgtcaggctggcttgggatttatcagtagtttcgggtttctgtcttaacaaatataatataaggagataagaaatgacaaagacatttacaatggaacttgcaggaagaaccctgcgtgttgatgttggtcgtgtggcagcacaggcaaatggtgcagcattcatccagtatggtgagacaaccgtactttcaacggctacagcatcagagaagccaagagaaggtattgatttcttcccactgagtgtggaatttgaagaaaaattatattccgtaggaaagatccctggtggatttaataagagagagggcaaggcatctgagaattctgtgcttactgcacgtgtgatcgaccgtccgatgcgtccgcttttcccaaaggattaccgcaatgacgttactttgaacaacatggtcatgagtgttgacccggaggctcgtccggaacttgttgccatgcttggtgcggcaatttcaacctgtatttccgatatcccatttgacggaccttgtgctatgacacaggtaggtatggtcgatggcgagttcatcatcaacccatcacaggcacagtgggacaacggagatctgaaactgaccgttgcatctacagcacagaaggtcatcatgatcgaagccggtgccaatgagatcccggaagacaagatgatcgaggctatctacaaggcacatgatgtcaaccagaccatcatcgcatttatcaaccagatggttgctgaagttggtaagccaaaacattcttacacctcttgtgccattccggaagagatgttcgcagaaatgcgcaagatcgtgacaccggaagaaatggaagaggctgtatttacagaccagaagcaggtacgtgaggagaatatccgtcaggttaccgagaaatttgaagaagcatttgcagataaagaagattggctggaagtcttaggtgaggctgtatatcagtatcagaagaagactgtccgcaagatgatcttgaaggatcacaagcgtccggatggcagacgtatcgaccagatccgtccactttccgcagaagtagatctgatccctagagtacatggatctgctatgttcacacgtggacaaacacagatctgtgacgttgttactttagcgccgctttctgaagttcagaaggttgacggtttggatgagaacattaccgtaaagcgttacatgcatcattacaacttcccgtcatactctgtcggcgagacaaagccatcccgtggaccgggacgtcgtgagatcgggcatggagcattggctgaaagagccttgatcccggtacttccttctacagaggagttcccatatgcgatccgtgcggtctctgagacatttgagtccaatggttctacatctatggcatctacctgtgcatcttgtatggcacttatggcagccggtgtaccgatcaagaagatggttgcaggtatttcctgtggtcttgttacaggagagacagatgatgattatatcgtacttaccgatatccagggcttggaagatttctttggtgatatggactttaaggttacaggaaccaaagacggtattacagccatccagatggatatcaagatccatggtctgaccagaccgatcgtagaagaagcgatccgcagaaccagagaagcaagattcttcatcatggatgagtgtatgtcaaaggcaatctctgcacctagagagagcgttggcaagtatgcaccaaagatcatccagatccagatcgatccggcaaagatcggcgatgttgtaggtcagcgtgggaagaccatcaatgagatcattgagcgtaccggcgttaagatcgacatcacagatgaaggtaacgtatctgtttgcggtacggacaaggaaaagatggacgaagccgtagagatgatcaagatcatcacaaccgactttgaacagggacagatctttaccggtaaggtcgtaagtatcaaagaattcggtgcattcatcgagttcgcacctggcaaggaaggcatggttcacatttctaagatctccaaagagagaatcgagcatgtagaagatgtacttacccttggcgatgttgttaaggttgtatgccttggcaaggacaagatgggaagaatttccttctctatcaaggatgtaaaataatctataaacacaggaactctcatcggtttgaaccgatgggagtttttttcatatactgaaaaaaagtgaaaaaatacagatgaatcaggtaaggcattggataggatttgaagaaaacatggatcggctgggggatagagaacagccggttggtgtttgtattttagatagcggtgtggaagcacaccctgattttggaaaacgtattgttttgttccgggattttgtagaggaacgtcagggtttatatgacgattacggacatggcacccatattgcgggcatcagttccggcagcggactgcgttccaagggcaggtatcgcggaattgcggcacatagcaatctgatcataggaaaggtcctaaatcaccagggcgacggacgtattgaggactttatcgcggcaatttattggtgtatgcagatgcaggaaaaattccacattcgcattttaaatatttcggtcggtctgatcaaaagtgttgccaaagactggcagagagacctgttaggcgcagtggaagccgcctgggacaaagggattgtcacggtatgcgcggcaggcaacaatggaccgggcaaggggagtgtcaccataccgggcactcagcccaaggtcataacggtaggcagtgcagattaccggcagggtactttttctccaagcgattacagcgggcgcggaccgacagcggattgcgtcaaaaaaccggaaatctatgcaccgggaagtaatatcaccagttgcagcaagcagggctggtatgtaaaaaagaccggcacttccatgtcagttcctgttgtaacgggagccattgccttgctcttacaacaggaaccatatcttagcccggtcgatgtcaaactccgcctctatgaacgggcgaagcgggggcatatggacggtggtggcaactggggcaccatttacctgccgacactcttggatacaaagcagtaatagcagaacatttcctgtaaaatatctccataaccggcggctgcaatggactccttggctacgaccgggatggatccaatctgcttgtcacccaggtaatagtcgatggagccgacggtatcaccttttttgatgggagccgtgaggttttcaggcaggttttgtttactggtgatctggctgagatctgccttcttttgatccagataggaaaaatcctgcttggcaactgcatgcagggtatcggcgactccttttttgaccgggatctgcaggatcttttcggtcgttttgtcctgatagatggcagtgttggcaaagccataggcaaacagcgactgggcatcccgaatacggtctttggaggtcggtgccgccatgatcacagcgatcagatcgatattatctttgctggctgtggcggacagacagaatttggccaggctggtcgaaccggtcttaagacctgtggcataaggataggatttgagcagtttattggtgttggtcagtgtaaaaggagtctgtcctttcttggtcgtatgggtaatatcttcctgccagatctggcaatagtcgtagatggctggaaaacgcaggatcaactggcggcttaaaagggcaagatccttggcacaggagtaatggtcggtgtcatccagaccgcagcagtttacaaaatgcgtgttttccatggaaagggcggcggctttttcgttcataagggcaacaaaggcttcttccgagccggcgacagtctctgccatggcaacggctgcatcgttggcagaggcgatgctgatacatttgatcagtgtttctacggtctgtatctcaccggcttccaaaaagacctgtgatccgcccatggaggcagcgtgttccgaaacgctgaccggggtttccggagagatctgtccgttttcgatggcttcaaagatcaaaagcagggtcatgaccttggtcacacttgccatgggaagtcttgcaaccgcatccttttcgtatagaatacagccggtcgaggcttccatcaaaaccgcggaaggacaggacaaggtcagggcagtatcctgcgtctcgtctgcttcttctgcaagtgcgggcatacaaaaaagaggcaggagcaaaagaagcgatagaagcagacataagagggacttataggatttcataaaatacctcaggaaattacattattacctagtatataaaaagaaatgtctcctatgccaaaaacttgaaattcatgggaaaacccag

SEQ ID NO: 12478 - DNA, 2575 bp, Unknown
  gut microbiota DNA sequence
ctatatttctgttcatcttgcacaaaattatatttttttcaagatcatatcaagaattttatacctttttatcaaaaaagtgcatcttccaaagcaacaaagacctgccccatggctgcctcgataaagagatccttctcctggttcaactgcacatgcagtggctctttgtttaaaacaataagatggtcgccccggaactcatagacataggatgccgccggatagacatttagggacgtgcctgccacgatcagggtgtcggcttttcggatcgcatcaactgcccctctgactgcatcttccggcagaccttcttcatacagggtgacctgcggacggatcatgccgccgcatttcggacatctgggaataccggtcgtctcaaaaatataattctcgccgactctctctccgcaggatgcacaataatttttgtgggtcgtcccatggatctcatagacacattttgatccagccaactgatgcagcccatcgatattctgtgtaacgatagcatccagttttccgatctcttccaacttcgccagcaccctgtgagtgacattgggttcaaagccccggctatccattttttgccggtaaaactcaaagaaaacctccggttctctcatcagacaggtatggctcaagaggtattccggctgatacttgtcaaactgcacatcatgctgattgtataagccgtccttgctgcgaaaatccgggatgccgctctcagtcgatacccccgctccgccaaaaaagacaatatgttctgactctttgatccattcgataaatttcgctatcaatgcttccatggcacttctcccgctttattttaagaaaccggaaatgatctgttcctctgcttcttcttctgtcaagcctaaagtcataagttttatcaactgctccccggcgatcttgccgatggctgcctcgtgaataagacttgcctctgtcgttgccgcagacaactgcggggtggcgagcacatatgcctgatccatcaagatggaatcacactcggtatgccctgcacagcggttgttgccattcaaggtagaggtataatgctgcttgctatggtctctggcaacggtacggctgacgatattgcaagcgcagtcctctccgttaagatctgccgtaaactgtgcatctgcattctgatcacctgtcgtcatgatgctgtcatggatctccagttttgcgcgatcacataagtctgcctctgtgatacgcagtgtatcatcaataccggagatctgggatgtctccatgatcatctcggcatcttcctttaaatgaacgatggtcgttggattcatcagacgtttgcctgtcgtgcccggatctccctcgccgtaatgcttttcgatgtagcgcaccttagcacctttttctacataaaaggtatggatgccatcgtgaccgctatccgcactgccgcagttgtggatgccgcaaccggctacgatggtcacgtctgcgccctcaccgacaaagaaatcattatataccatatcctttaatcccgcctgtgaaaccacgaccgggatatgcacgctctcattcttggtgcccggtttgatgatgatgtcaatgcccggcttgtcctctttggtgacaatatcaatattggctgttgtatttctggcagaagatgtgccattggtacggatattgtaagcgcccaccggaagtgcgtccagaccggcaacttcttttaaaatattctgttcaatcgttcccacgtccttagtcctccttcatcttttctgtcagtacactacaggtcgaactcggcatgcccatgatctttggcagaaccttgtcctttgtatcgtacatttcaactttgccgtcctttaaataaagaaccttgtccgcaatatccaagatcctctcctgatggctgatgataaggatgtttccgtcgctaactgccaccatcttttcaaagacatggataagtttctggaaactccacagatcgattcctgcctccggctcgtcaaacaaggtcagatcggaatttctggcaaatgccatagcaatctcgatacgctttaactcgccgccggaaagactgccatccagatctcggttgatataatccttggcacaaagccctacctcagacaagagatcacaaagttcgctgactgtcgcatcctttcctgccgccagtgacatgagatctttgatcgtcagccccttaaaacggaccggctgctggaaagcataagaaatcccacgattggcacgatcggtaatagaccagtcggtaatatcttctccatttaaaaggatccgcccctggctcggcttattgatcccggcaataaccttggcaagtgttgattttccactgccgtttggtcctgtaatcacaacaaaatggtcctcgatggtcgcattgatatggtctaagatcaacttgccatcttcggtctcataacaaatatcctgtaactctaacacctttatatctcctcttctcgcagggacgttccatttgccacaaggagtgtccctattggctatttgcgccaaatgggacact

SEQ ID NO: 12479 - DNA, 3123 bp, Unknown
  gut microbiota DNA sequence
atcaatgccagagatgaaatggtcaagagccagttcgcggatgcgaaaaaagagcaggaagatgccaaggcgttgaaggctgaatatcaggataagttggagagtgcaaagacagaagcagaccagattattctggaggcaagagaccgtgcacaaaaggagcacgagagaactttggaaaagaccagagttgaggcagatgccatgcttgaaaaagcaaaaagtgatattgcaaatgagcaggaaaaggcaacgaaggcagcggaagcagacattgcgaagttagcgctcattgcagcaagaaaaattgtaaagacaggtgatgctcatgacgcaggcagcagtaaataatgcaaaagttttgtaccagttgtctgtagagcgtgcggttgtagaaaaaacggatgcactcatctttttgacaccggaactattagaggttctggaaaatccgaccattgacgaaaagaaaaagcaggagatcatcgaacgtgtatgtgcgctggaagagatcccgcagatcatggtcaatttcctgaaaatgatgagccatctgggaaactgtgatatgatgcgtcagatctttgatgcttattaccagtattgggatgagcagaatcacatcatgcgggtgcagatcatttttgcagaccagccggatgaggcgacacgccatgaggcagaacaactgttacaagagaagtatccagattataaaatagaaatgacggagagtgtcgatgagtcgcttttgggcggttatctgatccgcggcttccatgaggaatttgacagaagttacgagggcagactccgtcaactagaaagaaaattaaccgggaggtgacccctgtgggcgcaataagtgcaacagatattatctccattattcaggaagagatcgaaaatgccaactgggatgacgagagcaaggaaacaggtcaagtcatctgggtaggcgacgggatcgcaacgatctacggcattgatcatgcaatgtatggcgagatcgtaatctttgataatggagtcaaaggaatggttcaggatatccgtgcaaatgagatcggcgttatcttatttggcagagataccggaatcaaagaaggaacaaaggttgttagaaccaagaaaaaagcaggtattcctgtaggcgatgcctttatcggaagaatcgtcaatgctttgggtgagccgatcgacggaaacggcgagatcaaggcagatggctatcgtccgatggaggaagatgcaccgggaatcgtagacagaaagtccgttgatacaccaatggaaacaggtattctttccattgattccatgttcccgatcggtcgtggacagcgtgaacttatcatcggagaccgtcagaccggtaagacatctatcgcaaccgatacgatcatcaaccagaaggggaaagatgtcatctgtatttatgttgctatcggtcagaaagcatctaccgtagcaaagatcgtatctacattgacaaaacatggtgctatggattattccatcgtactttcatctaccgcaagtgatccggcatctttgcagtatgtagcaccttatgccggaacagcattagcagaatatttcatgcatcagggcaaagatgttctgatcgtatatgatgatctttccaagcatgcggtggcttaccgtgccttgtccttacttttggagcgttctccgggacgtgaggcatatccgggtgatgtattctacttacattccagacttttggagcgaagcagtcgtttgtcagaggaacttggcggaggttctatcacagcacttccgatcatcgagacacaggcaggcgatgtatctgcatacattcctaccaacgttatttccatcactgatggacagatcttcttggagagtaaccttttcaactccggtatgagaccggctgtcaatgtaggtctttccgtatcccgtgttggcggtgctgctcagaccaaggctatgaagaaggcatccggaagtatccgtatcgatctggcacagtatcgtgaaatggaagtatttacccagttcgcatctgatctggatgatgcgaccaaagcacaacttacccatggtaaggccttgatggaacttttgaaacagccactttgccagccgctttctttgcatgagcaggtcatgaccttatgccttgctaaccacggtttctttgataccgtagagacaaagcaggtaaagcagtatcagaaggatgttctttcctttatggacttaaagcatcctgagattggcgaggagatcgagacaagcaaagccatcaatgaggaactggtagagaagatgcttgatgcagcaaaagaatttgtaggatagtaggtgttgttatggcaaatacgaaggagatacaggatcgtatcaaaagtatcaatgatacattaaaaatcacaaatgccatgtatatgatatcttcttccaagttgaagaaggcaaagaagatgctggcagatacggaaccctatttctttacgttgcagtcggaaatgagccgaatcctgcgacatcttccggacatggaggatatctactttaagtccaacgaagataagccgatggaagaaagaaaggtcggttatatcgttatcacggcggataagggtttggcaggttcctataatcacaatgtcttgaaactggcagaggagcatttgctttcgcatccaaaccacgaacttttcgtactgggagaactgggacgtcattattttgaacagcgtgggattgaaattgaaaagcagttccattataccgtgcaaaatccaacgctgaaccgtgcgagaaatattgccgaagagatcatcgagatgtatcaggaagaaaagttggatgaggtctatatcatatacacgaccatggtcaatgcagtgcaggaagaaacccagatcctgcagcttttaccgctgaaaaagacggactttaatatgaagttgccgatcgatatcccgcatgaggaactggcacttcgtccttctgctgaggcagtgatggatcgtattgttcctgactatgtcgttggctttgtatatggtgcgctggtagagtcctattcctgcgagcagaatgcccgtatgatggcgatggaagcag

SEQ ID NO: 12480 - DNA, 4781 bp, Unknown
  gut microbiota DNA sequence
gtaagcagatcaatatgcaggtcaacggcgtggaaacggatgtatcggagatagaaattctgggtagtggtgttttgaaatataatcagttcgctagctatggcccattgcaggtagatttgcaggcggggacgaatacgatcacttggacagtgattgggtattcggtgccaaatgtagactatgtggaattatataaagtaacagagtaattaggatgttcaagtcatccatggcggatcaggcgtatgctctctgccatggatgattttgctatttcggtaaacgcatctaaggacaattccgggttgtcctggcggaaccagtaggcatacaagcccatgatgccattggctatgtattcggtataatactccttttgctgatccgaaagtgtgctgtttggattggatgcgaggatacagtatttgatggcagcgacaccatcttcgaaaaaggcagagcaacttggctctgtaaagataacgcggtaaaaatccattttgtcccgcacaacgttggtcagaccatcgaataatgtatcgagctgtacgttttcacaattctttaactgttctgcaatcatatcgcgtgcgatttgctgcatttctgaaacgagatcatcaatgcattcataatgtaaataaaaagtccgtcgatcaatatttgcttcacgtgtcaattccgagatggtgattgcattgtaaggctttcttttgagtaattcgacaaacgcatggcgcattgcctgttttgttttttcgatgcgtcggtctgtttttcgtgcttttttttcttccataataaaaactcccttgaaatgatgcacacaagaataggtgatgtgtatttttgctcatttgtgtgatgcttggcgattgtttattcgttcacatgtttatataataataacataaaaatgcacaaagtgtgtatgaaaatattaaggaggggtttggtatgggtattttatacaatgtaccggatttaaagacctggggctttatggcgtttgttttattagcactgatcgcttttaatgaactgggcagaacaaaaaaatggggaggaatcttattatttgttattgtaccattggtgcttacaattacaatctggcctacaacggctgcaccaggcaatgaatatggaacaggaaactggtttaactgggttaagacttactctgcactggcaggttgtgtcggcttcatgctgattcgtttctgtccaaagattgagcacagcaagtttgctatgtacttcccaccaattattttggcagcaaatatctgcgaagcagttatgcgtgatttccaggtattctcatggggattgacagaaggcggatatgttgacaacttatggacaatttctggtccttggaacgtaatgaatggtattgcaggtatcttcaatatcttattgatctgtggctggtcaggaatcttcgtatcaaaagataaatctcgtgatatgatgtggccagatatggactggatctacattttgacctatgatttgtggaactttgcatatacatacaattgtatatcagaccattctgtatactgtggaatgttgcttcttttgtcttgtaccattccttcattcttcatcaagagagggtgctggttacagcacagagcacagacattggcactttggattatgtttatcatgacagtacctaccttcgcagatcgtgtagcaccagtacctacaacacacaatccaacagcattctttgtcgtaagtttccttgcacttgcaagtaacgcgggtcttttcatctatcaggtatacattattcgcgagaataagaagaacccacttaaggatgaactttatacagaaacagcacattacaagaagattgttgctgaaaactaaaatttcataatttcacttatatagctgagccgccatttttatggtggctcagcattttttcgctttcatggtagaggtgttgtgaggtttctgattttgaacaagggaaagcgttttgctcgtgttatacttgtataaaatggtaaagtgcatctatactaaatggaggataaaatatgaatcaacatgtagataaagcaatggagttaagaaacgagatgccaatggtaaataactgtgcacagaccatcatgcgtgtctacgcagatgaacttggcatgaatgaggaacaggcggcagccatcggctgcaattttggcggtggcatgaaatgcggtggtacttgtggagcaatcacaagtggactgatggtgttaggcgctatgggcatagattcgccaaaagttgttggagaatatcgcaaacgtatggcaggtatgcatgatggattgacagactgtgcggcgttattgcaggaaaatgccagaaaaggtggcgagaaaaaggtacattgtgataatatgattaaggagtccatcgaactgattgatgaactcacagagaataaataaggaatggagcatcaaaatggatatttttgataagattgaattacaggattgcccaatctgcggaggcgcaggattgttggaagaggagaatggcaacagcttttatgtagcatgtatggactgtggcagccgttctgtaaatattgattacaaagaagaagcaaaacgcgaagatgcagcacagcgcgctgcagacttgtggaataccggaaaagtaatttccagtcatccgggagaataaaaaaagaagccgcgaggcttcttttttatatgctttatatgtgccttagatattttttattgtatagcattatgcagcagagtaagcactgtatttacgtcatccacattcatttgaccaggggcagagattttattggcagcggcaaatgtcatggaagaaccgaatacctcaccgcagagacggctgaggacaccggtatctgccatagacatggttataattggacttgtggcatgacagcgtgtcatttcttctgttgcggagaggagtgtcaaaacatcttttttgctttgtggcatgacagcgattttggggatatcagcccccatgtcctgcattttacatagacgttggaggatgttctctttggaaggtgttttgtaaaaatcatgattagaagcaatgacttttacaccagcagcgtgcgcaccggcaatgatttcggatactgtatcatcaccaataaaaatctcaacatcaataagatcgacattaccggtttgggacgcatgaatatttaattctttataggcatcaacggaaatagatttttcgccaccttctgcggaagtccggaaagtcatgagcagtggtgtttcaccaaggatgttacgaagttcttttaatacatcttctacttgcgtaaagtcaaagacgccctcaaaccaatcagcacgccattctactacatcaagtggaatggtattaaaggaacgtgctgtagtaagaatttcttcctttgtcacaccgacgatgggaacgataatctttggcattccagtaccgatttcgatattttttacttttacaggattcataatgtattctcctactataatatgcatgcaaaacctaactataatgaatgtactcgttgttttgcataaatgcaactgccttttgataaaaaatgactttatcactttaaagccaaagagtacttgaattcagacctgccatacgttatgatggaagaaattcgtgaagtcatatagatatctgtgattttacataaaagaaggcagaggacttgaaaaatgaaagatttggagaagttagattttaatatttttctgattggctttatgggcgttggaaaaagtacagtttcaaaggctttacagcgtatgttcgccatggatgtggtggaaatggatgagattattgcaaaacgcaatggtatgagtatatcagagatttttgagttacacggagaggaatatttccgtaacaaagagactgcgtttttgcgagaaagtcgcgaaaaaaagaacatgatcgtgtcgtgcggcggtggtgtaccgatgcgccaggtgaatgtggatgagatgaaaaagagtggtaaggtagtgcttcttacagccaacccggagacgattttagaacatgtcaagcatagccatgacaggccacttctggaaaataataagaacgtagattatattgcagaactgatggaaaagcgccgggaagcttatgaagcagctgctgatatcgtcattgctaccgatggtaagagcgtctatgatatttgtgaggaaatcattacaaaggtcaatcagtagcacatgatgttgttgatacgagaataaactacaacatatagaaaagaggaaaaaagatgggaaaagagattacaggacatacagggcttttatgtttgcttggaagcccggtggcacacagtatatcgccggcaatgcacaatgaagcatgtaagcagttgggattggattacgcgtacttagcgtttgatgtgccggaagagaagatgccgcaggcggtagagggacttcgtaccatgggagcgcgaggttggaatattacgatgccgggaaagaatattatgtgtaaattagcagataagctttcgcctgcatctgagatttccggtgcatgcaacaccattgttaatgaggatggtgtactgactgcatatacgacggatggcgtaggttttatgcgtgctgttaaggacaagggtgtagatatcattggaaagaagatgacacttcttggtgccggcggagctgcaacagctattttggtgcaggcagcgcttgatggtgtgg

SEQ ID NO: 12481 - DNA, 19347 bp, Unknown
  gut microbiota DNA sequence
gctctgaaatctgacttgctgaatgtatcaaaatcaacttcttcctcaaataaaggctcaatctttacatttgaaaaatcaatcttctctggctctgctttcatttcttcggcagcctgatttttttcatcatttttcttatttacatcaccgagtgacttcattgtcgggaagagcaatacatctcgaatcgctgcactgtctgtaagcagcataaccagtcggtcgattccgtaaccgataccacctgttggaggcataccgatttcaagtgcattcaggaaatcctcgtcagtatgttctgcttcatcatcacctgctgctgcatttgcatcttgcgctgcaaaacgttcgcgctgatcaattggatcattcaactctgaatatgcattacacatttcccatccattgataaacaattcaaaacgttctaccttgtttggatcttccggctttttctttgtcagtggagagatctcaattgggtgatccataataaatgtcggctgaaccaattcatgctcacaatattcctcaaagaacagattcagaatatcacccttcttatggcgttcttcatattcaacatgatgttcttctgctaatctcttcgcttcttcatcatctgccacctgatcaaagtcaatgccagcatatttcttgacagcatctgtcatagtaagacgtgcaaatggctttcctaaatcaatctctgtaccctggtaagaaatcttggttccaccacatacggtctctgccaaataacggaacatagactctgtaagttccatcattccttcataatctgtatatgcctggtataattccatcaatgtgaattccggattatgtctggtatctacaccttcgttacggaacacacgtccaatttcatatactcgctctaatccaccaacaattaatctcttcagatataattccaaagaaatacgaagttttacatcttcattcaaagcattgtaatgtgtttcaaatggacgagcagcagcaccaccggcattggataccagcatcggtgtctccacctccataaaatcacgtccatctaagaacttacggatttccttgataatctgtgatctctttacaaatacatccttgctttcctgattcataatcagatcaacatatctctgacgataacgggtatctgtatctgtcaatccatggaatttctccggtaagatctgtaaagacttagaaagaagtgtcatttcttctgcatgaatggaaacttctccggttcttgtacggaaagcatatcccttaatgccccagatatcaccgatatcagatttcttgaaggttgcatacaaatcttcaccaatggcatctcttgccacatagatctgaatgttgccctttaaatcctgaatatttgcaaaagaagccttgcccatcacacgcttgaacatcatgcgtccggcgatagacacccggatcggagaagcatccataatgcttcttctctcgtcgtattctttcttgatgatctctcttgcttccccttcatccataccctcggtatccggatcctctctgccagcaagaagttctgcctcatgtgcggcatagatttcctttacgtcggatgtatgatgggtcacatcatactttgtgatctggaaaggatcctgacctgctgcctgcaagttggctaacttttcacgtctgatctgtaaaagttgtcccagatcctgtccctgtgtattattctgatttgccatgtaacacctctatatctattagtttgatctctgaatctctaaaatcttgtactgtaaatcgcctgccggagtctcaacggtcacgatatctccaacgcttgctcccatgatggctctgccaaccggtgactcattagaaattctgcctgtcaggctgtttgcctctgtagaacctacaaccttgtactccagttcttcgtcaaattcaatatccaaaatcttgacctgacatccaacactgatcttgtcaagatctacttcttcctcatctacaacttctgcattcttaagaatcttctctaattcctcgatacgagcctcaatatcacgctgctcatcctttgctgcatcatactctgcgttctctgataagtcgccctgctctcttgcttctttgatcttctgagcaacttcctttctacgaacaaccttcaactcctgaagttcatcttcgtattttttaagtccaccatatgtcaagatatttttcttttccatgtctgcatatcctttctgatatttaatcaatctattataggcaaaaagccctctgattgtcaagaaaaggtgcccttaaaaccacgttcttacgggtcttaaagccacctcttttcttttttatttacttttgcagacgaccgtatatcttggtcatgcgatatagtttctctgcaatctctgtcgttgcctctcccgaaagcatacgccaggtccagtttccacttgccgttcccggcacattcatgcgatgtcctttgcccagtcccagataatcctgcatctgtgccacaaagagaagtgctaccgaccgcatgccaccgcggataaagccccaataataaggttcgtccccaatgcctaaatactctgctgcataggcggcatctttcggctttgcctctgccttccagagcatgaccggactgttatcatgggttccggtgtaacaaatgcagtgtctcggataggtgtgcggctgatagtcgcttggctcatccgaatcaaaggcaaactctaagatcttcatgcctgggaagccactgtctgcaagtaactgtctgacacttggtgactgctcacccagatcttctgcgataaattccagttttggaaatgtctttttcaaaagtccgaccagatccatgcccggtccatgcttccactgaccgatcttagcggtcttttccccataaggcactgcccaataggtatcaaatccgcggaagtgatcgatacggatcacatcatacaacttgccggctccttcgatccgtcggatccaccaaccgtatccatcttttgccatagcctcccaatcatagatcgggttgccccagagttgcccatcctcactgaaataatccggcggtacacctgccacttccaatgggatacgctcctcatttaaaacaaaatactccggttctgcccacacatccgcagaatccatggatacatagatcggcaaatccccgatgatctcaatgccaagatcattgatataggcacgcagggcattccactgtttaaaaaagagatactggatgtaaataaagagttccatatcctcctgcaaatcccggcggtacttttcgaccgcttccgggcggtgcatacggatatccttatcctcccactcactccatgccttcatgccaaaatgctttttacatgccatgtaaagtgcataattatccagccactgctcattttcctgacaaaaagcctgcacatcctcatagtctctcgcatagcctcttgcctttgcctttgccaatatggcaaagcggctttcgtaaatctttccataatccacatgacggggatcttctccccagtcacatgcttctacttcctccgccaaaagcagtccatcctcgatcaaaagatccagatccacaaaatacggatttcccgcaaaggtggaaaaactctggtaaggcgaatccccataactggtaggccccagtggtaaaagctgccagtatttctgccctgcctcatgcaaaaaatcagcaaaagcatatgctgccgctccaaaggtgcctataccatatggtgatggaagcgaagatatgggaagtaatattccactacttctattcatatttttcacctcataattttataagggaacaagtcttagcctttgacagcaccagccataacacccttgataatgtacttctggcaaaccagatatacaatgatgatcggcaataccgtcataaggatacaagccatcattggtcccatttctacttttccgtaacttccctggaagtactggatcaaaatcggaatggtcatatacttcttacgatcaagtaccagatatggtaagagataatcgttccacaaccacatggtttccaaaattccaacggagatcagtgtcggttttaagatcggaagtacgatcaaaaagaaggtctgcaaaggattacagccatcgatcatcgccgcttcctcgatctccaatggtatggacttcatgaaaccacagaacataaataccgccagtcccgctccaaatcctaggtaaataatacagatattgtatggtttattcaaatccaatctgtctgccgtagaagataaggtaaacatcaacatctggaatggcactaccatagaaaatacaaagaggaaatataaaatcttggatatgatgccattgactcttgtgataaaccatgcacacatagagcagcagatcagaatcagtacaactgaggtgatcgtgatcatcagactgtaaccaaatgcctttgcaaaacccttggaggttagtgcatccacaaagtttgacagaccggcaaaactatctgcattcggcagttggaataccgttcttgtcgtgatatttcgatccgtcttaaaggagttgatcaggatcataaataccggatagatccatgctaaactaaggatcaaaagtacaacaaataagatcttgctttttaaggttgttttctctttcattactgctgcacctccttagatttggttgccttcaactgtatcatggaaatgatgatgactaaaatacagaagagcacggctttcgcctgtccataacccttccactgtggtccgcttctcgcatagaaagtactgtagatattcagcgccagcatttcggaagcatgtgccggttcaccgccggtcagtgctaagttctgatcgaataacttaaagccattggtaagggataagaacatacaaatggtaattgacggcataacattcggaattttgatcttccataatatttgtccttctgtagctccatcaatctttgctgcttcaatataatcatccgggatcgactgcaatcctgctatgtaaatgatcatcatataaccgatctgttgccagcacatcagtatgagcaaaccgataaatccgtatttttcatccaatgccaaaagcggcttttccagtaaagtcaaggctccgttgagcagaatctgccagatgtatcccaagacgataccgccgatcaggtttggcataaaaaagatggtacggaaaagattggatgctttcaacttactggtgagtgcaagtgcaagtgcaaatgctccgacattgatcagtatcgtaaccacgatcgtaaataatgccgtaaaccagaatgcatgcaaaaaagttgcatcggtaagtgcgtatttataattctgcaatccgttgaactttgcccggtcaatcgtaatgaagctgcagaaagataaatataatccttgaatgaacggatacaaaaagcctacacaaaaagccgcagcggtcggcagcacaaagacaggccaatattttctaactgctttttccatggtaacctcctttaaaaaacgataaaatcatctgccttttgggcataaatatagagggcaggcgttgtttgcccgccctccggttattcaaaacaattataagcgatgctattcctgcgcaagggaatcgatgcatctatgaaatttgcaaatgcggattattcctgatttgctgccttgtactctttttcccatccatctacgaatgctgtcttaacatcatcccatgatccagttccagctgcataagctgtaagtgcagaactaaggtcagccttccactgctctgaagggatggttgtgaagtcccaaggaattgttgtcttgcctgctgcctgcatttccttatccttctgaacgaatacgttgtctgtatcctttgcatccttgaaaggaataacaaatcccatgtcatcagccattgctgttgttcccttgtcagaagatacacaccagttcatgaaatcaagtgttgcctgaatatccttttcatcagcagcgctgtttacacaccagtagttctctgtacctgtgcagagtccctgatttgcttcatcaccaacaccaatgtaaataggaatcattgtaacatcatctgcagataacttcttatcacctactacgttgccatattcccatgaaccattctggaagaatactgcttcgccattgataaactcagcttctgagtcatcaccggtcttgcttgcaagttcctttggatcacatgttgagttgttgatgtacagatcaaagatgttcttgtagttgtcaagataggttcccttgatcgcatctgtgcttgtttcgttctcatcctgatactcaaaatagattggaagatttgaaaggtgtgtcttaaatctccagtcagaagaatcatccatacctgcagaagtaaatgctgcaaatccaagttcgtcttttcttgctgtgatgtcttctgctaccttctttaagtcatcgaaactctggatatcatctacagtatatcctgcttcttttaataactttgtatttgtaatgataccgtatgtctcaacagccattgcgatacccttaacttcgtcgccatctttcaatgcatattcatcaccgtttaagttcttatatacatctgtatctgaaagatccattgcgtaatctttccagttcttcaatccaaccggtccgtttacatggaataaagtaggagcctcactctttgacatctctgccatcagtgtctcttcatacttgttggatgctgctgttacaaccgtaacatcaacacctgtctccttggtgtattcctttgccaaagcctgccacgcatcatctgcttcgggtttgaagttcagatagtagacctttccggaatctgacttagcagaatctcccccatctttggaattgccgcatccgacaaatgcgccaactgccattgtagcaaccattgtcaatgctaatactttttttagtttcatgattaccctctccttctcgtgataattgataagtatttatttccaattatggcactgcgcttttgccacaatcaaaaatcattatatgcaggaccactgctatttatgaccgatttatcggactgcaatggtctccccctcgcggaagatcgtcggcaggatgatctgcctgtgttctccctttttctcgatcagatcgatgagaaggtccacactggtctttcccagttcttccatcggctgacaatatgtagaaagtgccggtgccatatactctgacacctcaataccatcgatcgctacaatggagcaatctttcggcacgataatccctttttcccgaagcgctctcatggctcccatggcaaggttgtctgcgatcgcaaagatcgcatcaaaggctattcccttatccagccacgcttttgtcccatgataggcatctgcgatattgtaactgtccacagatatgatcagatcttctgtcggaaccatccccacctcggtcaatgccttgacatatccctcgtagcggatctgggaaaccgaaccgtcatccggtcttgccagaagaacggcgatcctgcggtgtccctctttatagagttccttgaccgcttcataggcagtctgcgtatcgtcgatcgatacactggaataacaggtatcatccaaggatccataagcattgttggaagaacaggaaacaaaaggtacgctgatcgctgcgatctgttccttggtatagtccagacgtcctcccaaaaagatcaatcccagcaatctcttgtcccgctccatcatggcacctgctaagagttcatcctccgtggcgccgatctgctgcatcacaagtgtgtaaccagccttctcgatatcctgctcgatctcatggatgatggatgtatagaaaggattggagataccacggacgatcagtccaatgttatctgacttgctctgtcccaatgatctggcgctgttgttgggaatgtaattgtactcctccacaactgccatgaccttgcaccgtacatcctcgctcacatccgggtggttgtttaatacgcgggaaacagtgctgacgctcacgccactgatttttgctatatctttgatcgtcatatctgtgccctttcccgtttattttgttgaaaacgttaccggaaacgttactggaaacgttttcagttgatatgcatatatcttataccccaaaatttaccatgtcaacatacctatgtcatttttgctattttcgacgaaagcaatccattatttttgtgcaagatcacaaattcctgttttcattgaccttgcggaagtctcttggagtcatgccgaatttccgcttaaagacgcggttgaagtaggacatgttatcaataccgacctcctgggctatggacagaacggaggcctcggatgccacaagcatgcgggatgccatggtcagtcggtagtcgttgaggtagtcaatgaaactctgtcccatgttttgtttgaagtatttcataaaatgggaagcgctgaaaccgctgacctccgccatatcggagatcgtgatcttttccatataatgcagttccacatattttaagaccagtttcatttcctcatggggtctgctgttcttgaccctgccccgttgcccactggtctgacacaaatgatatatcagaagatagagcctgcttttgagcaaaagttcatagccctccacaggctctttacaaatgctgtcgcagccatctaagacctctttgatctcccagtaaccgggaactccctccccataaaaggcaggaatgacgatcttcatctgaaaaaggggattaaaaaagtcctgtcttaagccatcgtccttttttccatataagatttccgggcgaaagaggatattttcgtactcgacactttcccccggcacagaacggatgccatgcagttgccccggcaggactacgacaaactctcctccgctcacgatcctctcatcaaattctacggagaccatgccccgccctttctttatatagatgatctccatctcgtcatgccaatgcatgggcacctcgctaaaatccagcggcatggagcacaaataggtattatatggaaaagtctgtcggctgtgttcttttcgttcatgatagttttcgtattcttttatatccattttctgcctcttttcctgttctttgtttttccaatgataggattgtactactttttgctatgatatgacaagaccagagtcatcatagcctatatactggaagcataaaaagaatgtgtaatttaggaggtttttatggatgcattagaaatcaaggtcaaggatacctttggcacggatccgggacatgtcacaaacgagcagatatatgttgctcttttagaactggtaaaggaagaagccgaaaaaaaggtaaccaccgagggcaagaagaaactctactatatttctgctgagtttcttatcggaaaactcctctccaacaacctgatcaacctggggctctacgacgaggtggaagcctgcctgcaaaaatacggaaagaccatggcagagatcgagaccatcgagccggaaccatctcttggaaacggtggacttggtcgtctggctgcctgctttttggattccatcgctacacttggcttaaacggcgacggtgtcggcttgaactatcatttcgggcttttcaagcaggtatttgaaaacaatctgcagcaggaaacgccaaacccttggattgaaaacaagaactggctgaccaagaccaagcggacttatgacatcgaatttggcggtctgacgctgacttcctgcatgtatgatatcgacgttgtcggctatatgggaagaacaacgaaactgcatttatttgacattgattctgtcgatgaatcactggtaaaagagggcattgattttgacaaaacggacattgccaaaaacctgaccctattcttatacccggatgattcggacgaggatggtcgtattcttcgtgtttaccagcaatatttcatggtcagcaatgccgctcatctgatcttggacgaagccttagagcgcggcagcaacctgcatgatctggcagattatgtaaccatccagatcaacgatacccacccaagcatggtgatcccggaactcatccgccttttaatgcaaaagggaatccgcatggaagaagcgatcgagatcgtgacaaagacctgtgcttataccaaccataccatccttgcagaagcactggaaaaatggccgatccactacttacagaaagccgtaccgcaactgcttccgatcatttacgaattgaacaacaaagtaaatgatactttccacgatccaagcgttgccatcatcgatgcggaagaccgcgtacacatggcacacatggatatccattatggctattccgtcaacggcgttgcctacctgcacaccgagatcttgaagaacagcgaactcaacaacttctacaagatctatccggaaaaattcaacaataagaccaacggcatcactttccgcagatggctgctccactgcaaccatccgcttgacgatcttttgaccgaactgatcggagacggctacaagaaagatgcgaccgagttggaaaaattatctgcctatgccgatgatactgcggtactggagaaactgcttgccgtaaaacagggcaagaaagaagaacttgcgtcttatctgaaacagacacaaaacattgccattaacccggattctgtctttgacatccagatcaagcgtctgcatgaatacaagagacagcagatgaacgccctctatgtgatcgataaatattttgagatcaaggaaggcaaactgccaaagcgtccgatcacagtcatctttggtgccaaggctgctccggcttatgtcattgcaaaagacattatccatgtcatcctctgcttacaggagatcattgccaatgacccggaggtatctccatacctgtccgttgtcatggtagaaaactacaatgtcacacttgctgaaaaactgattccggcagcagatatccacgagcagatatcacttgcttccaaggaagcatccggtacctccaacatgaagttcatgttaaacggtgccattgcgatcggaaccgaagacggtgccaacgtggaaatgcatgaatttgtcggagacaacaacatctatatctttggcgaatcctcagacgaggtcatcgcccattacgagaaggctgactatgtttccagagattactatgagaaagatcctgccatcaagcgtgccatcgactttttgatcagcgataccatgcttgcggtcggacaaaaagaaaacttagaacgtctttaccatgaacttttgaacaaggactggttcatgaccttaccggattttgaagattacaaggcgaccaaggaacgtatctatgcggattatgaagaccgcatgacctgggcgaagaagatgctgatcaatatcagcaaagccggcttcttctcatccgatcgaaccatcgcccagtataatgaagacatctggcatttatcttaagacgcgccccatcaggtcttccaagtcctgataagtgttgacctcattgatcataccacgtaagcgtgcggaattgtggtaaccactggtgtaccacgccgcatgcttgcgaaattctcgtattccatacaattcatcccctttaaaggcgatctgcatcttcgcatgccgaagcatggtagccaccacaacatcgatcggcggctttcctatcatttcccctgtctcaaaataatgcaggatctgatgaaagatccaaggattgccctgcgcaccacggccgatcataaagccatcacatccggtctgctctttcatggcgatcacatctttggcatccagaagatctccatttcctatgaccggaatggatacggcatctttgacttgggcgataatgtcccaatcggctttgccggaataatactgctctcttgtcctgccatgtacggcaatggctgccacaccggcatcttccgcaatctttgccatttccacggcattgacatgggcatcgtcaaaacctttgcggatcttgactgtgaccggcttttgaatggcttttaccgtttttcgcatgatctgccctgccagtttgggatttttcatcagtgcggagccgtcgccgttattaacgacttttggcacaggacagcccatattgatatctaagatgtcaaaaggacggtcttcgatccgctttgccatctcgctgatgcaatccgggtccgagccaaataactgtaaggagaccggccgctctttttcctcaatctccagcagttgatatgtgtttttattgttgtactgtaaggccttggcgctgaccatttccatgcagatcagccctgcgccctgttctttgcataaagtacgaaatggcaggtctgtcacgcctgccatgggtgctaagaccagattattttccagtcttacctttcctatttgaagtccttgtaatgtcgacttgtccatgcttttcccctatctaacgatctgccccgcggtttttcatctctttttcgtagatcagacgcagtccctgcaaggtcagttccggatcatagatattgatacaatccgtttccttggagatcagattgcccagcccaccggtcgctacgaccttgatatcctcgtagccggattctgcgatcatatgttttacgatatattccgtctgaccgatctgcccataaaccaggcccgcctgcatggaggaaatcgtctcctttgccaggatatgctccggtttgcggatctcgatctccggtagttttgccgtctttgaccagagtgcctctgcggatgtacggatgcccggcgcgatcacaccggatacatatgccccctctgcactgaccagatcataggtggtcgccgtaccataatcaatgacgatcgccggtccgccatacaagcccagtgcgcctgcggcattgacaatacgatctgctccgatctgacgcggattttccgtgatgatcttgaccccggtacgcacgcccggctccactaagatcggatgcacctcaaaatacttgatgatgccgctggtcagggagtgcatgatctttggcactacgctggcaatgatggcatcgcttatgtcctgcttttctatatcattgtagcgcaggatctccccgatcgccgtcccgaactcatcggaagtacgtgtcatgcctgttgtcagacgaaaatttcccactaacttctgtttgtcaaaaatacccacggtaatatttgtatttcctacatcaatcgtcattaacatcttatcttctcctactcctcgccttcgtatgcctctcccagataaaagacacgatagtacatttccagcgattcaaacaattcttccttttctctctgcaactgcttgatctttaaaacgctaccaatctcatcatagaggatatcatcctcctctgtctgtgtgcgcaactgcagggagccgtcctcatcaaagacaacctgcaggacacctccgacatctgccgtaaagagcacacacataatgtgtaactcgtcctgtatcccctgtggcagagaagaaaactgctcattaaagtaatattttttattgtaggaacttgccccacaaagtacgatttcgtcattcatctatcgaatgttcctttctatacatagccatagacaccccggactgagacctcgccggaatccacctgccgcaggtcctccttggtctctaccagaagtttgcccgattcgtcgataccacgcgcaataccttcccattcgccgtttggatccagtacacgcaccttggcattgcggttgatcagaaaacgattgtattcttccatgatgatagacagatcttctgtcatgcaaaaagcctcatacaaaagggcaaactcctgccagatgcggtaggtcagttctttacagtcgccccgctttgccccaaaaggatcctgctctttaagcgccatatccacagagattgccttgtccgccaattcctcggaaaaagaagtctgatgcacattgaccccgatgccgactacaacatattctgccttaccctcgctggcactcatctctgtcagaataccgcagacctttttgccatggatgatgacatcattgggccacttgatccaggtctcgataccataaagttcttcaatggcgcgtcgcaccgccactgcagccaccagagtaagactgctgaggtggtctatggctaccgttggtcgcagcaaaagcgatgtggcgatcgaaatatccgccggtgtctcccactggtgtccgctcctgcccctgcctgccgtctgctttccggcagaaatgacaagcccttccgtctcgccggctaccgcacggcgcttgatctcattgttggtagaatcaatactctctaaatactcatgtctcatctgtatcatatgctgtcttgctctcttatccttttattttaaagtcgcatacatgatcgccttgatggaatgcatacggttttctgcctcatcaaaaacaacagactgcttgctttcaaagacctcatcggtcacttccatctcggtcaaaccgaatttttcatggatctctttaccgactgtcgtatccagatcatggaaagccggcaggcaatgcataaagatggctgtgtccttggcataggaaagtgccttggcattgacctgatatggaagcaggtcatggatacgttcttcccagacctcggtcggctcgcccatagaaacccacacatccgtatagatcacgtcagcatccttacagccttctgccacatcctctgtcaaagtgatggatgcccctgtcttttctgcaatggcacggcactctgcgaccaatgcctcattcgggaaatactttttattggtgcatgcaacaaaatccatgcccagttttgcacaggtcaccataagggaattgcccatgttgtagcgggcatcgcccatataaacaaacttgatcccatccaacttgccaaacttttcctcaatggtcagcatatctgcgatcatctgtgtcggatgaaattcattggtcagtccattccataccggaacacctgcatactctgccagctgctctacgatctcctgcccatatccgcggtactcaataccgtcaaacatcctgccgagtactcttgccgtatctttgatgctctccttcttaccgatctgggagccggacggatccagataagtcacatgcatacccagatcatgcgctgccacctcaaaagagcaacgggttctggtgctggtcttttcaaagatcaaggcaatattcttgccctttaattcatcatgcgcgatcccctttttcttcttgtccttcaattcttttgaaagatcaatgagataacggatctcctccgggctataatctaaaagtttcaaaaaatttctgcctgacagattcatatgtatcgatctcctttatcctaatttttacccacttttttctcattgtattatatttcctttttccctcttgtgcaaggaaaaaagaaaaggcagccgcgcctgcgaccgcctcttttcatttccgatagaaaatgttctactcgtcctttgccacttctgtgatggacttgaccagacctgccattccctggatctcagacggaatgatgatcttggttgccttgccatctgctgccttggcaaatgcctctaaactctttaactgtaaaacagcatcatccgcagcggcttcctttaagaaacgcagaccgtctgcattcgcctgctggactttgagaatggcttctgcctgaccttctgcctcgcgaatggttgcttccttgacagcctctgcctttaagatctgtgcctgcttctctgcctcagcgtcgagaatggcagactcttttttaccttcggcgatcaggatggttgacttcttctcaccttccgcgatcaggatagcttctcttcgctcacgctctgccttcatctgtttttccatggcatcacggatggccgccggtggaatgatgttctttaactcaacacggttgaccttgataccccatgggtctgttgcaacgtccagggcagaacgcatctttgtgttgatggtctctctggatgtcaatgtctcgtcgagttccagatcaccaatgatattacgcagtgtcgtcgctgtcagattttcgatcgccatgatcggattttcaacaccatagcaatacaactttggatctgtgatctgataatatacgaccgtgtcgatctgcattgtaacattatccttggtgataacaggctgtggcgggaaatcaactacttgctccttcaagttgacattgcgtgccacacgatcaataaacggcaccttgaagtggagtcctaccggccaggtcgtaagataagcgcccaaacgctcaataaccatagcatgtgcctgcggtacaaccttgacgcaagaaataaccagtaataagatcaccacgactaaaatgataactactaccataaactacctcccatatgcattttattctttgctaccatcttatagtaccctatctgtgctaatagcgcaacaaatttgcgattatgtctactattctactgtatgataaatcgtcatagcaaatcctgcctgcttcttgctggcgtacattgcctgatccgcctcctgatacaggcgatcgaaactcatctgctctttctgacgatagaaggatgcgccaagacttaatttgtaatctctcctccaaagtccggatataggacaaaacaatgacaaaatccctttccaacatgattccatgtcaaaaagggatttttgctttgcatattttaatttagaaaaatacgtgattgccgatcacaacgccgccgcgtccactgctgaccggtctaaaactcaatgctccgcctgtgttgtccgttcctgcaagggctgcctgcgctgcctgcatacaggatgcctttggaccacttgccgctacggatgctacagatccgctcgctgccggtgtaaactgtccgctctgatatacaacaccgtaaacagaacttggataaccaccgctgcggacacggttacataccaccgcaccaacggctacctgaccttcatagggttcattgcctgcctcacactggatcagggctgctaaaagtgtcgtatcatcataagatgctgccactgcctgattctgtacggtcacagcgcgtgcctttgctgccgctgcttcttctgcggctttggctgctgcaatggctgcctgttcttcttcgatcgtaatggctgttccataatcaatgctgacatccacataatcactgctgacatatccggtaccagccttggtgcttacggccacccagccgtctaccggcgtagcctgcgtatctacttccagcgaatcgcctaccgccatcacggtatagatcgcactctcagcacttgcctcgctacgaacgcggataccgccttcctttgcctttgcataggtcttgcagacgctttctgccagtgcatgtgcatcatcaccggtaagacaatactcaccgagcacatagccattcacattgccggatgtgatctgataccagtcgccctccggcgctgtaacctctgccacatcgcccttatacatcttgccgacaatgtcagaatctgtacttgcggttgctctcacatacaagaactcatccacatttgccatcaggcgatcctgccactcaggatatacgacctgtgcctgctcatttgcggcagcaactacggttgcctgagaacctacgacattggcagtcgcatacgcacctgcttccatcgtactgactgcctggacaataccggcggtacgatagccgctcacagtgtctgtcgcttctttgggctgactaaatacggtagtcgtactcatcgccgtcactgccaaagcaaccactgttccctgcgcaacgcgcttcttccaattataattcatataaataattcctccatattcatgtaatactatctatatatcaagtattgcatttctatgatactttatacaaaatttgttacatttgttacaaatttattacgaattataacaaggttgcctcactttgtcaagttttgttcatttttcatcccaaaaggtttcccagcatctcctgtaaaagggcttcctgctccgcaggtgtcatggcatccgtttcctctttcttccctcttatgatgggatcttcccctgtcgccaaaggctttttttctgccgcctcgcctgtctcctcatagtctcccagcacatcctgcacatatacttggatctgtcctgccgcctgctcacacttttttgcaaaacgtgaaaagcgaatgataaagatcagcaaaagcaggaccagtaaagccaaaagtcccagcccgatccagccctctgctcccgctaatttttccagccatgtcatatccacctgttcttcctcctcttgcttttcttcctatataaaatggtacaagcctttgtctgcaaaaaatgacgtaaaaagtagacagtcaccatcttgacaattagcaaaagcaaggtaagattgatatagattagaataaaggagtttttgtatgaaaaaaatagttatgacaggcggcggtaccgcaggacatgtaacgcccaatattgctctgtttgattctttacaaaaagatggatatgagatccattatatcggttcctacgaaggtattgaaaaaggattgatcgaggataagaagatcccttactatggtatcagttccggcaagttccgccgttatcgttcctggaaaaacctgaccgatcctttccgtgtgcttcacggcttctttcaggcaagacgcctgctgggaaggatccgtcccaatgttgtcttttccaaaggtggttttgtctctgtgccggtcgttatggcagccaagacaagacatatcccggtcatcatccatgaatccgacctgaccccgggtctggcaaacaaacttgcgatgccatcagctaccaaggtatgctgcaatttcccggaaacactgccttatctgccaaaagaaaaagccgtccttaccggatctccgatccgtcaggaacttttacacggcaataagcaggcagccaaagatttctgcggatttaccggcgacctgcctatcctcatggtcatgggcggcagcatcggatccgtctatatcaacaatgccatccgtggatgcattgataccctgctgaccaaata

SEQ ID NO: 12482 - DNA, 6233 bp, Unknown
  gut microbiota DNA sequence
caacatctttacacgtaaatcgaaaatcaactgcataactgccatcgcggattgttgtatcaagtattttcataatttctaaattaatgactccactacagaaataatatagcggatatcctcctcatcatatctttgatctacaggaagaaatattgtattcttcgtcagatcatactcccatgtttctttatatttttcatcgccgcattgatcccataaagttggcacaaaaattttattctcaatcaatttcttttttatgttttttcctatgtttaatggataaatatagggtatactctctggctcaacggaaatacgattgatttttctaaatctctcctcatatacctgtgcattcattcgccgtcgttgctttacactttcataatcaatactctgcatgattgcatccgccaaaagagacattccttcatatcgttctgcaatatattgatccatcttcttttttccctgataacaggcattggttccttcttccagacaagtcaataaatatcccgcttgcttggcattacacacaaggcgtggctgactagcaataacagcgtttgttataagataagccccatccggaacaccaaaaaactttctacatgaatatatataattgtctcctacattgggtttgtgataaaaggaatgacaattatcaacaatataatgctgctctggatgctcactgatatacttatctaccttggtatccattactccaaaataatcaacaatgtaaatccagtcttcttcctcggctcgttctatgatcggaagtagattatcatctattgagtaatactcaacctccaagtcatgcctttcaatttccctacatacatttgggcataagtaaaaaggaacgaatattttctgtatatgttccttttctatcaatatatcaattcctacttttgccgagttatatttcagcaaattatatttatcttccgaataatacgcttgtccttgttttaattctaatggttgaaatccaccatatgaactatgctttcttttcaccatctacttcctcttcgaaattaatcttatctctgataacatattgtggtgcctgattaagcgctatatatgtctgccctatatactcgccaaatattcccaacatgacaaacaaaataccaaatagtattaaaatcacagccatcattgaactataaccagcacttatcgccggatcaattaatttgcgaacaatcgtcactatgccgcaaatcagccccataaatcctacaaataagcccaaaaacatcgtaactcgtaatggtttcgccgaaaaagttgtaaagccatttaagaaaagttctaccatcttttttaggttatatcctgatttgcctcgaaggcgttcatttttcttcacatcaacattgcatacatttcttgtacttctcaggattaaaccgcccaaataaggatgtgagttaggatacttgcacatctcatccactacaaatctctttaccagccaaaaggttgttaaaacaacccccttcggtttatcaataagccaggattgcatactttcattcatgaacgttccaaattttctgaaccaagaacgcttttcatgttcaataaaccttgcttcgaccgcatcatatccttcatcaattttttcaaacaaacgcggtaattctgaaaatggcgtctgcccatcatcatcaccgcacaccacgtagtcacctttagcgtgatttaatgctgccattacagccgacggttgtccaaaattgcgtgcaagattgatgcctttaacatgtgtatttccagtagcaatctcacatatttttgggtaggttgtcccatttggcgagcaatcatttaccagaataatctcatattcatattgtgataatttctggcacataacatcttctatttgagatacaacatcctctaaggtatttgtagaattgtaacacgggatcacaaaactcactaattctcttttcaccctttttgctcctcaaaagtcacatatacattattcaaaatgtcttgtgctaatttctgtgcttcatcataggaatctgcccctacaatgaaatgccccggtctcaatcgtccatactttggattctctaatcgatctccttcatggatctccaactgataatcaaggacgttcgcatgttgtgctaaatattctttcccatgtactttctgtacaattccctctccaaaatcaaagaagcgcataacaacacatcgctgttctggcaaatgtaactgatccaatgccttctgatcaacactctgccccaatgcttcttttatcagatactcataattatcaacgcctgacatatatggtacgattttccctgaaaggttgcttccgcctccccttgcgccagcctctatcaaataaaacttacctttataaaatttgtattctgaatgagtcaatcccatcggcagaccaatgctttcaaccagtgccttattcgtgttccgtaataattcataatcatataccggatgactatatgtatatgtctgtactttagaaacattcggattttctttatacatttcctttattgaaatacataaaggataatgtgttccattcactacaagtccatcaatggtaaactcatctccgccaatatattcctcagcaagaatttcttttcgtcgatttgaatatgacattgtatcatcaaatttatctctcaattttttttcgtctgtaattgtatagacacctcgactagattggctgtcaattggctttatgataattttcttgtgtttgttcagcatttctaatgcatcatccagcgttttacaaattttaaaatccggcactggcagacctgcttctttgcatctctgacgcatcagtgttttatctgtaaaaatatctgccttgtctgtaccgatgcctcgtaagcccattttttcatttacataagcaacggttggtactgctatatcactctgatcagagatcaccgcatccggctgatatttctgcgcaatttgaagatttttttccttatctaacacatttgccacttcacatgcatccgcataaggaaaggctggtgaatcctcgtataaattagagcaaataacataatgccccatctgttttgcctttttgataagttcaatttgccaatctccaccggctataaccataattttactcatataattcctctcagttctgataaaatgcagatatcaactcaatcactttatctatttcattctctttcaagccataatacattggtaacctcataagtctttcactttccttggtcgtgtacttatcttgtcccacaaattgaccaaactttctgcctgccggtgcactgtgcagcggaatataatggaacactgctccaacgccatggttttttaaatactcgatcagttttgttctctcttccaagtccttcgccttaatataaaacatatgtgcattatgtatacattcctccggaacatatggtaactcaatatatcccgcctctgccaacggcttcagcatttcataatactgattccaactgttcatgcgatcatcataaatttcctgcgccttctccaactgcgcccagagatatgctgcattgagttcacttggcagataagacgagcctgcatctacccatgtatatttatcaatctgcccacggaagaacttgcttcggttcgttcctttttcacgtacaatttctgctcggtctatataatctggatttttgattaataaaagtccaccttcacccatgctataattctttgtttcatggaaactataacatccaaaatcaccaatcgtcccaagagctttccctttatatgtactcatgacaccttgcgctgcatcttctataaccaacaaattatgtctacgcgcgatatccatgatcgtatccatctcacaggaaactcccgcataatgaaccggcacaattgcccttgtctttttggtaatcgcatcctcgatcaatttttcatctatattcattgtatccggtcggatatctacaaatttcactctagcgccacgcaaaacaaaggcgtctgctgtcgatacaaaagtatacgacggcatgatgacttcatcccccggctgaatatctgccagaatcgctgccatctccgtcgcatgtgtacaagaagtcgtcagtaacgccttttctgttcctgtagtatcttcaaaccactttgcacatcttttgcaaaaaggtccatcaccgcatattttatgattgccaatcgcctcggcaatatatttttcttcgtctcccacatgaggcggtacattaaaattaatcataattttctctctttcagggtaaactgacctcattgaaaaccaataaggtcatatctactatactattattgtcgtattttgtctagtttgaaaaaatcagctaacaatggagtttccatgatgtctgatttcccttttctaatgtaatattcacaaaaaataaggagtgccatatcattatggacacaccctataaaaactatcgcttttcaattgtgcttatattatagcattctctttcaaattatcaacaatttttcgtataaaatcatattgtttatgaattacatagcatttccacaatttctcttttctgctccattctgggatgtacgtagcgatccatggtgattttgatagaactatgcccaagtatttcactgacgcatttataatcaccgccattttcaacacaccttgtagcaaatgtgtgtctgaggcagtggaaattacggtagggaatttctagcctattcaaaatcttttcatatatagaaggtactcttatctacacagacccaattgatgaactgtttcattgtgatattggggaactaccataccgttccttacgtttcaaatggctactttcgctatcttgcatcacacttctttttctcataatttatgtttacagacataggatttgatacgatttccattattcatccctttgcagccgcagccgcagatagccatatcggaagcctgaatgactattcctttcaatcgggactgggtggtggtttatacactctgctgatttcctatctcaatccagcgcaaatattgacctatattgtgccatcagccctgcttccctatacatatatactgagtatgtatatttccactatgcttgcaggtatttacggttatcgcattggtaacgattatactggggcatacaattactatgaaggtacaatcctctggtgctcccttctgtcgatcatgatgctgattttctgtctgttctttcgggggaaccataaaaaacgcatcatttttttgctatgcactttaacgctgctctttccgatcgtcacaaaactctttacgtttgatgcaaccaagcagcgctggacttttgtctatatcatagcgctaatctgcctatgtatttacacattagatgatattacagaatatgtcgaccatattcctctcaaacgctggctgctcatcagcgatgtgattattttacttttacttgcacttgtattcggattttccgtgaccggacagatagcgattagcaaacgcgcttttgtaaaggtaatctttatcctatttttgtacaatatggtttttatcgcaatggtcaagaaaagccggcaatttgcagccctcagtttattgctcgtggtctgccttgatattgcactagagacttatccgattactaataccagaaccgccattatcaaggagaactatgaaacatctctgtataatgacgggacaaaagaggctgctgctgacatacaaagtaaagacctcgggctctaccgtatcaccatgcactttcccatgacggttacgataagctgagtcctgaacagaaagcatatgctatgacttccggcttttatctgacaaagtctgaaaatgagtctgagttgctctcacaatatgctaccattgacacgtcttccctttgtgtagaacaagccaatctcgcattggaacaactgcaaaaagaatccttatatgatatatcctatgtcgaccatgaactaagcggaaagattaataataccgagatagccgatgccatgttatgcctccctatcttttatgataatcgttggtctacctatatcgatgggcaaaaagtcacagcatacaatattaacggtggtttgacaggcataagcatcag

SEQ ID NO: 12483 - DNA, 1753 bp, Unknown
  gut microbiota DNA sequence
ggtgagcatgatgtacgtttggcctacagtgaccctatgatatatgtcagcatctgcatcagcgggcttgcgctcatgggcatggctctttatcttctgctataccgcaaacgcaatttttcacgcaacgaacgccaaaaactgtaccgctgcacagccgttattcttatcccttgtatgatactggtgattctgctttatgagcgacataccggggaagataacagtattcgaaagcgtcttgcttccggagaaacgatcatcacacaatatggctatgacagcaccactgcaacgcaatttagtttttggacggttgaaacagcagactccttttccatcattgacggcggtataccagctatggctgaccttgttcgcacagttataaaggaacataataaccatgtggataattggattattacgcacccacacacagatcatatgggagcctttaatcgtatcatgcaggatgacgccgtctcgatcacaatcgaccatctgtatacagtggaatttccattagaagtttatgaacagattgcacgtgatgttgacgatattgacacctactatacttttttagataccacgcaaacactgaaggataagaatatattatctgtcgaatatctacacgagggagacaccctgcatctgggagacagccagttgaaggtatatagcgaatacacgcctgagattatagaacgaaatcttgatttgccgaacagtagttctctcattttcaaaatatccgggaaaaacaaagtatgttattttttgctgattttgaagatgccgaattggctgacaaactgtatgaaaaatacggacacgaactggacgccctacaccgaaaacctatcccaatactcctgaaaatccactcttttatataatgtatacaatccatcctgactcagttcatcatacaattttagaaagttttgattttgataaaacttttcatacatatgctcgcgacattccaatacaattaactgtcctccaacaacgcgtgctgctgtgctaattgagtgataacattcattcaatatcgtcacaccatccatatcttcatgactatatgcatcattccgccccagttgtcctatcaaataggcagacatagaattcatctgatctcttcctggctgtccccctaaaacctttctccttttcttcttggataactgattgatatccagcgacttcattgcaatcgtgtaatatgcaacaatctgaaattcaccttgctgcaacagcaccttatctaccaaaagaaatgttttgccatattgagaattttcatataaaattgatttattaatcaaaaaattctctaaatcaacttcatgttgacaagagaattttttgaatgcatcttcaacttggcttctatctactcctgtagataaaacatctcccaatgatactactatatactatatactatatactctatcattttctctctactttcgtaatgccgccaataactgccctctgagttccttactctgatgtatagattcgctctgggagacaaatgttctaggaagtgttgcccgaacaggctgttcaaacgactttacaaaatcttctgccttttcacgtttcactgtaaactgtttatcaaatgatacagttgccataaaaccatctcctttcttgtttctaatattatactctaattttccacttccatgcaaccataagatgtgggtatacaaaccacgtttgttca

SEQ ID NO: 12484 - DNA, 8724 bp, Unknown
  gut microbiota DNA sequence
agggaaagcatctgttgctcaaagaggtaggtgccatgctgtgcttgttcttctcttgctgtgtaggcacgttctgcctgttgttttccgatctctaactgatatttcgtatcggtcagacgaaaggcttcgtttaaatctagtttttccccattgagaataaaatgcaaaaaaagtaaaagttccagaaattgattatatgtatacaagggaatagcggttaaaaaggatgcaatctcgtcatatcttgctattggcagaccattcttggtcatataggaacggatgaaagatctgtcaggaggcgtgctataggcaggccctaagatgaaaaaatgctgtttgtctttgcagacgacatagccatagtacccggtgtctgaggatacatagacggatggtgaggaagcatcacatagttttggcgtgacgaaaggataaggatccgtattgtcataaaatccggcagaacacacatattgatgacctttgtacaaggcaatgggcagatagtgggcagcaaaaaacatttcgcaaaagttggaataatcgtctatcatagtaaaaacctcctgattcaaatatacaatagaatgtacgatattacaatacagaggcgtggagatttcttatactgatagaaaaagaagggaaaaggggatcccggaaagggtgaatgtatatgggaaaagagggcttttcagaagggtttttatggggagcatcatctgcagcagcgcagatagagggaggctggcaggaagatgggagaacgccgagtatttgggatattgccaagccaaagcagatcaaacatggggaaaactgtcatgaaagctgcgatcattatcatcattggaaagaagacgtggctctgatgaagaagatggggcttaaggcataccggttttctatcagttggtctcgtgtgataccggaagagggaaaggtaaatccaaagggaattcaattttattcggatttggtggatgaactgcttgcagcaggaatcgaacccttggttacaatttttcactgggatatgccggtatggatgctgaaaaaaggaggctggttatcgtccaaaatcattccggcgtttcaggattataccagggtggcagtggaggcgctttcagatcgggtaaagtggtggatcgtcatgaatgaaccgggctgttttatcatgaatggttatatgcagggagaacatgcgcctttcaaacatcgctatctggcgttgtcgcgactgacacgcaattgtatgttggcacatgccgagggggtcaaaacggtcagagcgtatgcaaagcagccggtcaagatcgggatcgcactttcaactggtgcgtatgttcccgacacagagtgtcctagcgacatacaaagagcgcgcgaacttagtatggataaaggaaatggtctgatggggaataaatggtggatggatccgatccttgccggaaagccggtgcgtgcctatggtatttatgcatcacatcagaaagatatggaagccatctatcaggaattggatttcgtcggattaaatatctatacatcctataattatgcagaatggggtgcagaaagacaggaagcaaagcctggaacaccgcgcaattccctcggttgggtcattgatgaacgcgttatgtactggaatgtacgtttcgtgtacgaacgatatcatctgcctatcatgatcacagaaaatggtgttgctgaacacgatgttgtaagtatcgatggtgccgtccatgatccgcagagatgtgattttatctatcgttatcttggacagttaaagcgtgcagccagtgaagggattccgattttgggatattgtcattggtctgttatggataactttgaatgggcggaaggctatgatccacggtttggtctggtctatgtagattatccgacgcaaaaaagaattgttaaggattctgcgtgggaatacaagaaaataatagaaagcaatggaagtattttgtagggggttacacatgaaaaaagaagttaggttattagatcatggattgtttgaaaagccttttatggattcaaaggcacgtacaagagcagtatcgacaaaagagattgcctttggacatttgataggaccactggggttgatcttaattgttaacacgattgcagcactggtagaaaaattcttcacacagcagacaggtgctatgtatggtacggcaaatgtgaatatgattcgtattatgggtagtcgttatgaagttgttatgactgtggcaaagatccttgcagtcggtatggggctcttaaacggatggctggttcagcatacacattcgaaacagggaagactgcgtccctggtatctgatttttggtttttgttcgattattattggtgctctgatttttcagtttgcaggaccgaatgatctgggagaagcttactggtattactttttctttttactgatctgttatcataccgtgggttccagttatttctttgtctttaaagatatgatcgtttcgttgacatcgcgaaatccatcggagaagatgcgcttgaaatttgtccgtcagttatgctggacattgatttccggaattttaattggaatgatggtttctatggtcgttcttccgatgtggctggaaaatgacattagcggttacccgctactgatgatcatcttatccgtgattgccataccattgcttttgctggagtacttctacacccgtgagcgaatcacagaggatgtcacacaggaatacggagatgagaataagattccgttaaaagaacagatgaaggctctgtttaccaacaaatattatgttttgttgaccatcattgtaacggtaggaagtattgttgataattttaagggtggtaatgtccagtacttctatatcaagttcttattgggaggtgcggataacccgatcatgtttacactctatcaggtcgcaaccggtattccgctggggataggagcctttgctatttatccattggcaaagaagtttgggataaaaaacgtatccattgtaggatacatctgtgttctgataggaagtgttgttggtctactgaacccatccaatattccggttgcaattgcggctggcttcctgcgccagacaggtatgcttccaaatgcttatgtgtttgcaacacttgtatgttatgcctatgacagcgtggaacatgattccggttatcgtctggaaggcttgcttggacctgccattgtccttgcggtccaaacgatattgacggctccgttcgcaggaggatatgagtccggtattttaaaactgggatttgtggatgttcagggcattacaccgaacagcgatgtacttcagtttatgactttcgcattttatatgtttgatattgtggcatccattatttatatcgtacttttgccgtttgttgatattgaaaagaaattaccgcagattaacgaggatttgcgtgaacgccagaagcagattgccttatccaaaggagaagaatggatagaaccggaagaaattgccagacgggaacgcgaagaagctgatcgtatacaggaacagaaccgcattcatgatttagaggagcgttgcgcaaagaaaggactggactttgagacagaaaatcgaaaatatctggagaaacagtcaaggaagaagaacagattaggaaagaggtaggaaatgacatgtgattttaacgatggctggttgtttcagaaagaaggtcagccgggggaaagtgttgatctgccgcatgatgctatgataacagaagtacggaatgcctcttgcagaaatggcgtcaatacaggttttttcccgggaggaaaatatgtctataccaaatattggaaagttaatccggaatggttagagaagtcagtccgtattcattttgaaggggtttatcagaattgtcatatctttttaaatgcagtggaagttggcagccataaatatggatatacgccgtttgacattgatttgacagggtggttgcaggttggtgagaattgtctgcgtcttatggtagataactctctagaacccaactgccgttggtattcgggggcaggtatttatcgcccggtgcaactgattgtggaagagaagcagcatattgagcgaattcgcgtgaaaacacttgcaatcaatcctgcggtgatttctgtggatgttataggagatagtctggaggctgtgaccgtttccatttgtgatagaagccacattctatatgagggagaacctgggaaaattacactacagcaagtacaattatggagtgatgaaacgccaaaactatatacctgtattgcaaaatgtaaaacagatgaaaaacgattggattttggcattcgtaaactggaatggtcagcagaaaaaggacttttggtgaatgaaaaagaaatactgttgcgaggtggctgcattcatcatgatcatggtgtcctgggggcgtgtgaattttgggatgcggaagaacgacgtatccgtatattaaaggatgcgggattcaatgccatccgcatggcgcatcaccctgcgtcacagattttactgtctatttgtgacagactcggcatgtatgttatgaacgagacttttgatggctggtatgtaccaaagacatatcatgattatgccagatattttgacgaatgttggaaagccgatgttagaagcatggtggaatctgcggaaaaccacccgagcgtgatcatgtactctattggtaatgaggtatcggagacagcgaccccaaaaggcattaaagtctgtcggatgatacaggattatgtgcatggattagatgacacgcgaccggtaacagctggtatcaatgtgctgctgaatgtatatgcgcatatggggatcggtgtctatcgtgacaagggggaatatcagccaaagcctttgccgccagggaaaagttatcatgataaaaagtcgggatccgctttttttaatgcaatggcacaaaaactgggtccgctcatgttctttatgagtaaaggcagacatggggataaggcgtgtgcgccggcgggagatgtattagatatcataggattgaattatgcgtcctcgcgctatgatgaagatgcgaaaaaataccctgagcgcatgatggttggcagtgagactatggtggcagatttaccttataattggagtcgagtgaagaaatatccgcaacttgtcggggatttcgtttggtcggcatgggattatctgggagaagcctgcattggagattggacgtatcattcctacaaaggtcttcctttgctggctggtcaggggatgattgatattacgggaaaagcactggcatccatgtattacatgcagattgtatggggcttgcgaaagaaaccatttattgctgttagtccgctgaatcatgcagatgagacgccaacgaaaggagcctggcagtttaccaatgcgattgatagttggagttgggaaggatatgaaggtgtaaaaacaacggttgaggtatatgcggcgggcgagtcggttcgactctttttaaatgacagactgattgggtgtcgcaggctgaaaaaatttaaggcaagtttttccctagtctaccaaccgggagttttacgggcagaggcattagataccaatggaaatgtaatcgcgcagcatttccttggaacagcccagaaggagacgatcctttgggcggaagccgagaagaaagaactacgcgccaacgggcaggatctttgctatgttccaattgaatttacagataagaagcattgtctcaagccttatatagagaagcgtgtggatattgcggtagagggctgtgtaagtctggctggatttggcagtgccttgtgtaagaccaacgaggtgtttgaccggaaccatcatatggcatatcggggaagatgtcttgctgtgcttcgcgcaaagaatgagcaggggaaagccaaggttagcatttccgcagagggagtggaaccggtagttattagattggaggtaaaataaaatgaagaaatttcagtcgtttggagttcttacaccagaggaatcagagcgtgaaaaaaagcataagtcacttgccagaagagcagcggcagagggatatgttttgctgaaaaatgaaggccttctgcctttgcagaataaaaatatcgccctatatggagcaggcagcaggcgtacagtgaaaggaggttccggtagtggcgatgtttacgagcgccatagcgtgaccatcgaggaaggcttaaaaaatgccggatttaccttcccgacgactctgtggatggatcgttttgaaaaaaagtttcaggaagatattgcggagtgggaggcgatggtagaagaaaagataaaaggtttctcaccagtgcaatccatgaaaatgtttgatgtgatccatgaatatcagaaaccgaatccagcgtgtacgccgatattggaagatgaactgagtgacgagacagataccgctatttatgtattatccagacaggcgggcgaaggcggtgacagacgctatgagaagggggattatcttttgtcggatgtggaagaagaaagtcttcgtcttctgtctgcacattataaaaaacttgtgctggttttaaattgtggcagtgtgatagatctgtccattttggatcaggtacggattgatgccgttattttctatgcgcaaggtggtatggaaggtggaaatgcccttgcggatattttgaccggaaaggtaaatccatgtggaaaacttacagacacatgggcatatcactatgatgattatccatgcgccgatacgtttggctatcgcaatggggatgtgtcacaggaagattaccgggaagatatttatgtgggatatcgttattttgatgccttttctattcatccgcgttttccgtttggttttggtttgtcctatacaactttttctatgggaagaaaggctgttctggtagatggaagtaaggttacagtagatgtttctgttaaaaataccggtaaatatgccggacgtgaggtggttcagttatatttgcaaaaaccacagatggtgcaaggagtagaggagaagtcactggcggcatttgcaaagaccggatgtctgcagccgggggagacagaactggttactacaacttttgatgtctgtgatcttgcggtttatgatgaggaaaaagaaatgtttgtcctgccgcagggcgagtatggagttctgttgggaacgcatgcaggagcggtcagccctgtggcggtattgacgctttcagaagaggtggttgtggagcaggtgtctgccgtacatccatttgcacgttcttatgaacgtatgcaaccggaacaaggcaagcgtgtttacgaagaaagtcttacccgttacgcgatgcaggtggatccgaggagaagaaaagagaagacacaggcaaacccttatcagaagcgagtagaggaacttttgcgaaatttaacaatttccgaccgtatcagattggtcactggcggtggatacagcatgaaatgctacaacaatgtcatgggggcggcaggaagaacctgcaccaaattattaaaaaaaggcgtccctaatattgttatgtcagatggtccggcaggactgaacgttgtgccgtgtactgcgatcgcaaaagacggcacaccgcgtttcccggatggcgtacttgtagattggcgctggggatggataaaaaagcacgaggaaatgattaaacatcttccgggaaaatatcaaaaggtatatcgttatatgactgcctggccgagtgaaacacttcttgcgcagagttttgatattgatttactggaggaagtgggacaagccattggcagggagatgaaggaaataggtatttctatatggcttgcgccaggcttgaatattcacagaaatccgctgtgtggaagaaactttgagtattattcagaggatccgctggtatccggaaagatggcggcagcggtgacaagaggcgtgcagtctgtaggaggcgtcggcgtttctgtcaagcatttctgttgcaataatcaggaagataatcgtatggaaatgtcctccaatgtcacacaaagagccctgcgtgagatttatcttcgggcgtttcgtattgcgattgaagagggagacccatggacgatcatgagttgttataatcgtgtgaatggtctgcatgtctgcaataacaaagaacttttaacggatgtcttacgtggagaatggggatatcagggactggtcatgagtgactggacagcgacaaatcagtgttcccatgccaaggcaatcaatgcaggaaatgacttgatcatgccgggcgataaatctgtctggaaggcgttagaacaggcaaaaaaagaaggactcctgcaagaggatgccttacaacaatcctgtgaaagagtcctgaccttaatcttgaagagtgaaacctgtaaagattttcgctaggtcggcgcatttgcattttcagcaacaatctgataaacactgatcttaaactgctgttccggtgtaatgccgacaaagcagcagccgtattgaatagagtcatcgatacattcggcacggatgacttcaataatggtttggatactttctttgttttcaagtgttatattggcatcatagtaggtgccgagtttgaattggtagtcggatttgaaagccatg

SEQ ID NO: 12485 - DNA, 9727 bp, Unknown
  gut microbiota DNA sequence
tttacctgatgttcgactaacaaattggacgatttcggagacggttgcgattattttgaaatatcgtgcactggcggagagggatttaaaattcgcatggaactttcaaaacgcattatctgtgctaactatggatttgacaatgcgttgaaagagccaccgactgtgcggattatggaatgaaaggagataggatgcaaaatgacatgacgatttaccagaataaaacagccatttgtcgcacctttggtatagggcggcagacaatgtaccggtatgaagccggtataagggagcagatcgcgcaaggtcgctataacgagtacgccatcatcgacaatgagatcaatgttggagtatttgctgattacattaagtatcgtcggatgctaaaggataagaacgcgcggaagtacgtgccgccgttcaatctgcaaaaggcattggcgatggttgtaccggaggaggtggaagatgacgcagtgtgaacggatcgttgactacctggatagtcacgtaggcattacctcaaaagaggcaatggaaaaattaggagtgtatcggctggcaaaccgtatccatgatctgaaagaaagtggatatgagtttgagcggatcaccagagaagaagtgaaccgatacggacaaaaaagtaagttcacggagtatcggttgaagaagggagtgaaacagaaaagtgcgtaaaggatggttcgaggatctgatgttagcgatagcgttcgcggtgattttctggggtgttatctggatcgtgtgcctatccaaagatatggtcccgaacataaaacggaatatcggacagggcattgcagtcatggaagatatgcaagtggagcaggcgcgagacatagaggttctgcgacacgtagaaagggagatggcagatgcagagtatgatccttccccaaaataaaagaagcactgacaaagcagtgcaactttcaaataaaccaatttcattataacggaggaagtaaacagatgcaagagccatatcagatgcaggaagcacacgatcgaatcaatgaccgatcggaggacagcagaccacactgcgcgatatgtggcggtgtgatctgggaggataaagcgatcagtttcaacgaccggtggttttgctgggagtgtgaaactgaggcatggaaagacattagaaaggattttttagagaggacaagcaatgaatgaaaagacgagatacaaactacacaggatcttagaccttgccatggatgccagtgagcagggagatatcgccatcaacatatgctgctgtgcggatggcgcggcgagtgtgtttacaaccatctgcgacggcgagtacaagaaggatgcacagatggagactatgagtgcgtatatcgacaaggagggcaaagcatccatccaagagatagtcaatgaaatgagacatcggatgaccaaagatggctatgtaaagtaggtggcgatcatgttttttagggaatgcccttattgtgggtgcaatcttgatcccagcgagaaatgcgagtgtcgggatcagaaacagaagaaagaagatctgttggctgaactgatagagagcgatcagttcgggcaaatgacaatgaaagtagaggtattgaaatgcaggaaattgagttattagtatcaacagaaaatggaagtatcgtaacaaatatcgaagttattaagaagcatattgcggctggactggaagagtacaagcatatggtctttacggaggaaaccaagaaagaagcaaaggcaacggtagccgatcttcgcaagttaaagaaggaggtcaatgcaagaaagattgaagtcaaaaagcgttatatggctccttacgaggattttgagacgcaggcaaaggaactgatgagccttattgatgaacctatcgattatatcgacggtcagatcaaggagtttgagcagaagcgcattgaggaacgcaaggctcttattacagatacctatgatggcattatgcaggagcatgaagacgtaaaagagtatttgccgctttcacgcatttacaacagcaagtgggagaatgctacaacctccatgaaagcgatcaatgaggagattatggagcgtgtggaacatacagaaaaggacctggcaatgatccggagcatgggatctgaatttgaagataaaggcattgcggcatatgcaagatcattggaactggcagatgccatttctacaatgaaccagtatcagaaacagaaagaagaaattctgcgccggaaggaagaagatgccaagcgtaaagccgagatggaagaacgtaaggcacaggaagtattggagaaagttgaaaatcatgtggttgctgatattacatcagcacaagaggtaaaagcggcaagtgttgataatgtctatccaggagacacaacttttaatgccaggtatgagatcaaagcggatgcgttccaaatcgcacagttagagtccgctatgcgtgagtatggtatcgagtataggagggtgcagtaatggcagagaccgcaaagaagatgaatatttatgaagccatatctaagtgtatggaagatataggagcagttggaaagaacgataaaaacaagacacaaggctttatgtaccgcggtattgatgccgttatgaatgcaattaatcccgctctggtaaagaatcatgtgtttgtagttccggaagtattggaacagcagagaactgagagacagacaaataaaggcggcactctgttttactccatctgtaaaatctgttttaccttctatgcggaagatggctctttcattaaggcaacaacaatcggagagggtatggatagtggagataaggcgacaaataaggcaatgtccattgcatttaagtatgcctgctttcaggtattctgcatcccgacagaagaaatgcaagatccggatgccgatacaccagatccaatcaagcctttacaacaggagccgtcgtttgttccagcaaccacagatcagttgcataagatgaatgagtttgtcagtgcctacgctgatatgtgtgagaatgcgcaggaggctgatatttggaacaagttgaaggatatgtaccatttcaagagtaccagtgaaattaccgccaaaatggcagacaagatcattgagcaggtggaatgctggtacaagaaatccaaggaaaaagaggctagttgatggatgtaagcggaaagattgtttcattgtcgaaggattgggtcacagggaagttcctgctgacccttgagatcaacgagccgtcggtggtggagagccagatagaccatctgaaagcaatcgaaaagttgaagatcaagatcacgaaatggaccagtaagagaagtctggatgcaaacgcatattttcatgtactggtcggaaaaatcgcagatgtgcggcggatatccaaggcatattgcaagaacatattgattactcgatacggacaggtggagatgatagacggcgagcctatgatctataagacaaatgctccggttgaatatatgaatgaacttgaaaccttacacacgatctgtgttaaggctgcggaagaacacggaaaggaagttttcttctataaggtctaccgcggcagtcacacttatgactctagggaaatgagcatattgatcgatggttcggtcgcagaggctaaggaacaggggatagaaaccttgccgccggaagaacttgatcggatgatggagcagttgcagaagaaagaggcaaagcatgaaaagcatattacaggataaaaaggaatgctgggtatgccgttcgacgcacgatctggcttgccatcatgtgttttacggaacggctaaccgggcaaaatcggaaaaatggggcatgaagttgtggctttgttacaactgtcataccggaaataatggcgtacatttcaatccgtcgctggatcggaggataaagcaaatggcgcagcaggaatttgaaaaagtatatggtcatgagaagttcatggctgagttcggaaagaactatttgtaggaggtagagcatgaacaaactgattatgatggggcggctgtgtgctgatccggaagtaagatatggcggtgccaataatgacaccgcagtggcaaattttagaattgccgtggatcggagatttaagagggatggagatccagatgcagacttctttcgcatcactgcccttggcaagcagggagaatttgcagagaggtatctgaaaaagggaaccaagatcttactggaaggtgagatcagaaacaataattacaccgggaaagacggacagatggtctaccaggatcagattttggcacactccattgagtttgcagaaagtaagagtgcacagaacggagcaagacaggaaccgccaatcggtgatgtgccggacgagggaggctttatgaatatcccggataacatcgaggaagagttgccttttaactaggagatacgatgagaagatacagaaaatataacaacaggaaaattgaagtagatggtatggtttttgattctaagaaggaagccagccgatatgaagaactgcttttgttacaaaaggcaggagcaatctctggactgcgtagacaggtcagatacgtgcttattccggcgcagcgtgagtggtgtgatgagatctataccaggggcgaaaataagggcaaaaacaagcccggaaaagtgctggaaagagaatgcacatatattgctgattttgtctattaccagaacggcgaggtggtcgtggaggacacaaaagggtttagaaccaaggaatatatcattaagcgtaagttgatgctctatatgcatcatatacggattaaggagatctagtgagtggtaattggataaagataagcagaggcatccgtaagagttggatatgggaagaacccaaatatctgaaatggtggatagatttgataatgcttgcaggatatgaagataaacgcattcgttgtggaaatgaaattgttgtactggaaagaggttcatttgtgaccagccaagtaaaactagcagagagatggaatgtgaaccgagaaacagtaaagagatatcttgatctgttaaaagccgacaacatgatagactacacaaccagcaacaggaaaaccattgtaaaggtgctaaattacagcgtttatcaagattgtggtgaaagtgacccagcaactaacccagcaactaagcaagcaccaaatccagcaactaacccagcaactaacccagcacaacacaagaagggaaagaaagaaaagaatatatatatattagcgccgggcgcaggcgcgcgcgtgataccaccaactcttgaggatgtcaagagttattgcaaagaaaataaccttgttgttaatccagaagaattttttaagacatatgcaccggattggatgaaaggggatgagccaatccgcgattggcagggactggtccggggatggcatcgtaaggcgctgagagaaagagataagcctgttagtggttcaaagaaccgtttccgcaactttgatgagcgggaacatgatgatgcgtattatgacgatctggaacaggcattgttgagaaagtaggagtgtatgacatatcaggagtttttagaatcgaagatagaacttgcaacagacagtggatttgttatagagccagaaaaagtaaataaaatattaaagccacatcagagagatgctgttatgtgggcattaaaaggtggcaggagagcattgtttgagtcttttggacttggaaagacggtgcaggaattggagttttgccatttggcagcggagcatgaaaagggacgtgctttgatcgtgttaccgcttggagtaaagcaggagtttacccgggatgcagtagagatccttgggtatgagcgacagatctattgcaggacaatggatgaggtcaaggcatgtgatagccagatcgtgctgacaaattatgagcgtgtgcgagacggtgatatagatccgtcatatttcgtggcaacgtcactggatgaagccagcgtattgcggtcttttggcagtaagacctatcagacgtttctggataagtttaagaatgtgccgtataagttggtggcaacggctacaccaagcccgaacaagtacaaggaactgatccattatgccggctatctggaagtcatggataccggacaggcattgacccggttcttccaaagagacagtaccaaggcaaaccatttgaccttatacccaaacatggaagatgagttttggctatggatttcatcatgggcattgtttatcacaaagccatcggatctgaaccccgaatattcggatgagggctatgatctgccaccattggaagtccgttggcatgagatcccaatccattacggcgatgccatggaaaaagatggtcagatgcaacttttccaagaggctgcggaaggtctaaaagaggcggcacaggtaaagcgtgagagtattgacaagcgtgtggagaagatgaaagagatcgtggatgcatcaccggaagacaacttcctgttgtggcatgatctggaagcagagcggcacgcgatcaagaaagccatgccggacgtggtagatatttacggatcaatggactatgaccttagggaaaaacgggtgatcgatttctccgagggcaggatgagactgtttgcaaccaaaaagtccttgtccggatctggatgtaactttcagaggcattgccaccgggagatctttctggggatcgattatgaatttaacgattttatccaggcagtgcatcggtgctatcgttttctgcaacaggataccgtagtgatcgacatcatttacatggagaacgagaaagccatcaaggatgcgctgatggagaaatggaaaaatcataatcacatggtggataagatgatcgccattgtgaagaaatatggactaaatgcagcaaataaggctgagaggctggaaaggaagatgggtgtggaaggtacaagagaagaaaggacagtgcagggagcacattatacagcggtgtatggtgattgtgtggaagagacacgcgccatggaagataacagtgtggatctgatccatacgtcgataccatttggaaatcattatgagtattcggcaaattacaacgacttcgggcacaaccagaacacagacaggttttttgagcagatggactatctgacaccggaactgctccgggtattaaagccgggaagagttgcagccattcatgtcaaagacagagtgctgtttggcaatgcgaccgggacagggatgccgacgatcgagccgtttcatgcggtatgcatcgagcactatatgaagcatggatttcagtatttcggcatgattacagtagtgacggatgtggtaagggagaacaatcagacctaccgcttaggctggtcggagcagtgtaaggacggatctaagatgggagtcgggtgcccggagtatatcctgttattccgcaaacttccaacagatagatccacggcatatgcagatacaccggtcaagaaaagcaaagaggactatacaagagcgcagtggcagattgacgcgcacgcatactggagaagttccggtgactgccttatcagcaaagaagagttgcagaacgcatcggttgataccttgcaggcggtctaccgggaatatagcagggacacggtatataactacgacgaacacgttgcacttgccaagaagttagataccgaggacagactgccggcaacctttatggtagtggcaccaggatcatggaaccagttggaagtatgggatgacatcaacaggatgcggacgttgaacactacacagagccgcagacgtgcccagatgcatgtatgtcctttgcagttggatattgtggagcgtatcatcaaccgctatagcaatgagggggatgtggtctatgatccgttcggcggactgatgactgtaccgatgacggcggtcaagatgcatcgctatggcaaagggtgtgaacttaacccggattactttagagatggtgttgggtatctggaagcagcagagagtgaggtagatatgccgactctgtttgatctgtttccggaagcaatgtgaggtgggagatgattgatggagaattgatcgtagacaactttgccggcggtggcggtgcttctaccgggatagaactggctaccggctatagcgtagacatagccattaaccatgatccagaggctatcaagatgcataaggcaaatcatccatataccagacactattgtgaaaatgtctgggcggtagatccggttaaagcatgtaaaggacatcctgtagcgcttgcctggttttcgccggattgcaagcatttcagtaaggcaaaaggtggaaaacctaaagataaaaacattagaggtcttgcatgggtagcctgtcggtgggcggggcttgtcagaccgcgggtaattatgttggagaatgtggaggaatttaaaacgtggggacctctgaatcggtcacatagacctatcaaggcaaagcagggcgttacatttaagaaatttgtaagccagttacaagatcttgggtatcaagtagagtttcgcgaacttgtggcagcggattacggcgcaccgactatgcgcaaaaggttttttatgattgccagatgtgacggcaagccgattgtatggccggagcccacacatggaccggcagacagtgaagaggttaaaaatgggctacgcaagccatatgtgggagcgtacacccagattgattttagtcgtccatgcccaagtatctttgaaacatcggaagaaatcaaggagaagtacggcatccgggcggtgcgtccactggctccgaagacgatggagcggatagcaaggggcttgaaaaaatttgtattaaacaatccggaaccgtttattatccaatgtaatcatggtggcgaacggagaccgaacgacattcgggaaccgatgccgaccataaccggaaagcatgggtatgggattgtggagccatatgtggtgcagattggtcagactggtttttcagaagatagaagcaaggatgttcgagaaccgcttacaaccattgtgagtaagaatgagcattgccttatcagtcccacgttgatccagtatcattccgagacagcgcagggagaagtccgggggcagacgattaaagatccgattatgacagtagatggatcaaatcggtacggactggtcacatcttttttgcacaaatattacgacggaggttatacaggtgcaggagaagatatgaaaaatccattgccaacagtaactgcctgggatcataacagcgtagttactgcaaatctcatccaaatgaataatcattgtgatggaagagatatgcgtgaccctattccgaccattactgccggtgacggacatttcggagaagtaagagcatttttaattaaatattatgggcagggaacaggacaagacataaaggctccgttggatacagtgacggcacaggataggtttggcttggtgacgatcaatggtgtggactatcagattgtggatattgggctgagaatgttggaaccaagagagttgtatggctgccaaggatttccagatgattacatcattgatcatgactacaccggaaaaacatatccaagaagtgaacaggtccgaagatgtgggaacgcagtat

SEQ ID NO: 12486 - DNA, 1056 bp, Unknown
  gut microbiota DNA sequence
ggagccagaccaaagacttggttatttgcatgcttcctatgattctccatatggaaagatcacgtctgactggaaatatgaaaaaaaccgtattgtctacacctttgagatcccggcaaatatgactgctacggtccgattggaaggctgcgatccagagatcctgaaggcaggatcttatgagagagttgtgtctttacagttttgatatacaaatgtatagttaataaataaggcagaacaaagagaaagccatatctccaacgagtttgtatagtaaagttgaaaaaatagccagatcagacaaatttgtttacatttcgtcgaattttccgacatctgattttataaactctttataatttaatcataagccacagagatactgcacaactttctacgaaataggaaagcgcagtgttgagaagtgataaatgaaaagaatatggagggtttgactatggcaaacgagaaaaaagccggcatttttaatgccagcgcacgtgatggcgttcagtatcgtaaagcatccatgctcgaaatgatacttggtaacgcaaataacggatgtggtatctgcttttatttgctgatgatgtatgcatcttacattgcaaatgcaggatacgcaatcgtaccggcagttgcaggtatcattattacaggaacaagactttttgatggattcacagatgcgctttttgcagcattgttcgaaaaaatgaatccaaaacatggaaagatccgtatcttccttgttgttggatgggtgatggcagcgctcgctgtacttatgatgtacgactgggcatccggtaaatacacaggaacaactggtattgtagtatttatccttatttatgttgtatatatctgcggatataccatcaatggtatggcaggtggtaccatcggtatcgtacttacaaatgatcctacacagcgtccaatgatgggtgtattcggaacattatattcttaccttgtaccacttatctttaacaacattgttacttttgcaatcttacctagatatgacaatcagtacaatgcacc

SEQ ID NO: 12487 - DNA, 2671 bp, Unknown
  gut microbiota DNA sequence
atcatgataccctgatcgaccatgagatcctggggatcgatctgtccgatgtggaatatccttaccgcgtgatgaactggatcgagatcccgttttttatagccatcatctcgccttatattgttctggcggtgaaactattccggcggatcctggcgcgggctcaaggaaaaacagaacggctcaaatacggctttcttgccattgccgcaggaacgcttttgcccctgtttttgatgaaatgcgattatgcgcgctgggtatttgccctgatctcctattactgtatgatctttctggcactggttgccatggaagaccagatcgtggcggaggagttgaccggcatttttacagagatcaaagaaaaatatccttttgccatccttttgcttttgctgccggcgcttttgacaccgttttgggatgtgcatatcaatgggctgctgcgaggaatcagcaacccgatcaatgagacatttttgaatttatggtagatagactgaggtagaaatgacagagcaatttgataaagttgagaaaaaaagatacaggcagtttatcggagccatgctggcatttgcggtattctattatctgcgttattttaagcacaccatgacagagtacaatacgacgctctttgccatgtcctataagtatggcttcatttcccgcggtatgttggggacgatctgggcaggcttggataagatcctgccactggatctgatgacctatgaggcggtctactggttcaactggggaattacctggctctttagccttctggtaatcgtctttttgggaaaatgcattcgaaaagtcaaagctgaacatcgtcataacatgtattatatggcaattgcctgtgccatttactttttccctatgttctggtcggaagaaatgtttggcagactggatgtatatctctatatcctgacctttatctgcctttttgccctgcttgatgaaaaagccgagtggatcatcattcctattggcatcctttgcatgtgtattcatcagggctttgtttttaccaatgctaatctgattctggtgccgctcttttataagatcatgacggaagaagggaaaaggcggaaaaaatatatccttctttttgcaggatttttcctgaccatttctgccttgtttttatactttgagtttttcagccatggcaatggggcatccatctataaagaggtcgtagccgctacaaaggcactttcggaaaacggaaaaggctacaataaatcagtgatccagcatgagatcctgggaaaagatgtttatgactcagaggcgcgttatcatgcactgaaccggacggagttcccggcatttttggttttgtatgcgccatatctgccgatcgtgattcactttttcaaaggcctgtttggacggagcaaggatgcacggagcaaatgggcgcacgcggcatttttgctgggcgcatgtacgatcctgccgcaatacctcctaaaagtagatttcggccgctatgcctttacgacttttacctattatatcgttatggtcatgatcctgatggtcatgcaggataaggctgtcgcagaccagttggagacgaccaaggaaaagattaaggcaacgattccggtgccttggatcgttcttttgtaccctatgtttttgatgcctttttatgatgtgatcatttccggggcgacatccaagttgcggacgctggtgatggaagtgctgggtatgcaagtaggacagtagaggaaaagagatggaaacagcagagaaaaatagaaaaatcaaagaatttgtcatagcagaagtcctgtttggggcacttttgttcctgcgttattatgaggcgtgggtacaccgaatcaacgggaccatgatggcattttcctataaatacggctttatttccagaggtctgatcggaaccatctatcagggactggataaaatattgccggtcaacatgatgacctatcaggcatgtgtgggctatacgcttgttatcacgctgcttttttatgcaacggtgctggggctctttgtcctgtgtttaaaaagagccagggcagaatatctggatgtcatgcgctatctgatgctctttttgacgatctttaccgtgcctatgtttgccagtcattacaattttggcagactggatatttattgcgtattcttaagccttcttggggctatgcttttgatccaaggtaaggcagagtggcttctgatcccgatctcagcccttggcgttatggtgcatcagggatatgtctttatgttttttaacatcattttagtcctgctcgtgtataagatactgtcgacagagggcaaagaacgcaaaaaatacattactatctttgctttgtccctgctggtggcatgtattctctttttctggtttgaactttttgctcatgccaatggcaatggtatctatgaggagattgtggcaagtgccaagaaattgtgtaaaaacgggaaaatccatcaggacgttgtggataaagagattttagggatcgatctaacaggtcgtgaggtaaaataccaccgtatgaatgcggtgcagtttccgatatttattcttttgatgctgccttatatcctgcttatggtgcgcttttttaaaggattgatcgcacaggcggca

SEQ ID NO: 12488 - DNA, 69583 bp, Unknown
  gut microbiota DNA sequence
attaaaaaaatcatagttctttttgttggtgcaggtttttcttactttttctatacacaactacaatttacaaaagtagctggcatacttttggtagcgggaattttactggttgtggataacctgatgagcaatgaaatcaacataatagagattgcagttgcattcatgcaattgactatgggcattatgtatagaagatcatgtttttttatgattatttgggcgatgctacctttgatctgtatatgtttcatttatctgctgacacaaaaaaatatcaaaaaaattattggcgcttgttgtttggctataacagcactttttttgttttggggattaaagcagatagacactcatagttattcaactccggaatggcaagattatacagaatataattctgtgcgaggacagttgttggatcatggatttcctgactatgaagaaaatcaagaggtatataagcagttaggcatgcaaaaggaggatgtgcaatactatagtaactggaattttgcagacccgcagatcttcaatgtggaatcgataagtaagttggttgctttgcagcaggataccaaagagcaaatggtagacaaaaaagattttgtccgagtacttactacaggatataccaaatatggatggatgccattgttcctaatttcttttttaatgctggtctttattaaaggaaaagaaaagtattttctgggagcacaaatattaaattttattctcatccagtggtatctttatgctattttgaatcgctacctgcaacagagggtggatatatcagttgcatttgcaatagtatgtgtcaatcttttggtggttataaaaaattgtgaaaattgttcaaaagagaaatgtattggtcttataacaatttgcagtgtgcttattacaacttatatcgcgaattcgtatgaatatattcaatatgacaatgaagacagtgattattccgcagggatgatggcggatgatgaacatttatattgcaacttggttaatggatcaaaagatgaaatcataaacgacatatggtatcgctcaggaaaaatagcaaagaaaaagcatacgatggcgatgggaggaacgacaacctatattccgtgggatgcggaagcaatgaacaatttttctattgtaaatccgtatgagcaatgtatagataatgaacaagtgtatattgttggagaaaatatgatagatgtaacagtagcatatatacaaaggcattataatatgggggcacatgcttgtttggtaaaaaaaatagatggacgggcagtttataaaattaagacagaccaatttgatttaaataccgagaatatggtttataactcagaagaattgaaaagtaaggagtcatatgagataaacgatcagacctgtaaactgatgttagaggcatacttacaaggagaaaaatcctatttgggcgaaggatatgcagagatacaatatgctgatggaacaagccggatatatcagatgacgcagtatacaaacgatgaatatgataaaaattcaaaatatagatactcaaaataccttttagatgcagactatataaatggtatgactgtaaattattactataaatatcatgatcaggtttattacatcaagactgtagttctataaaatcggaaatagtacgtgttgaataacacgatacgggatattgtgagaaatattatgaaaaaagagttaataataaataaagcaaaacaattatacagcaagccgcaggcaagatcattgttactaaatgtgcttgcccttgttgtcgtgttattgattggggcaccacattatgaatatgatatggatgtgatgatgcaggcacaactatttaatattagtggggcttggtctacaggaatgatcgtatttagcaatatatatgtggggcgtttcttgaagttgctttgcgagtttatgacaggtgtaaattggtataccgtatttcagtatgtgctcacattcatgtcactctggaaaatagggcaactatttttgaaaaggaatttttcacgaattgcaaacctgacctttctgatctttgctttgtttatagggtatgaatgttatatttgcccaagttacatgaaaacggctgcaatattaagtgtgagtgctttatatgtgtgctggggaatacttgtaggagaatttactcagaaacgctggctgcagcatttttatattggggtggcattattgttggcaggcttaatcagttggaaagccttgttattaagcggaagtctgacaaccgtttatatcattttgtatatgtttgtcagaaaggtaaaagtcgataaggaattgggcaaagaattatggatgccgtttgtcagtgcactggccctgcttgtgattttacaggcattggattatcgagaataccagaaagtggatgattggtcacagataaacgagtacagaagcgctgtggagcaggtgggaatgtttagagcaccgacctaccgtgcagatctgggagaaaaattaggcttacaggaataccagtacaatatcttggtcgatgggcattatataacttccgatggaagtgcctttgaaaaattagaggaagttacgcatgcaggacgcgacttttcttggacaaatatcttgcgatttatgcgaaccgttccggtaggtttgattcaggtcagtatgttctatggaatgttcgtgttgtggctgctactctttttttcgcatatggataaaaagaaggttctgctggcggcgaccgttattgtcacaggtttaggttatcttattatgttcattctggcgtcttgcagtacgtccatggctcatttcctgatcttattaccagtgggaatatgtgctttgatgaatggaaaggatatgcaggcgaccaaggaagaaagacgcagcgctttgatttatctggtactgggaaccatggttttatatcagggcatgggaagcagtattattagcacaacaaataaggacaatatcaacgaagatttgacgcaggcagtggaaggcttaggacaaccgtggcatgccatttgccttaatgagtatttgaaatcttattccgctttctgccgttatgatgaaggattacttgctggaaagaatctgcttgtcatcgatggggcatatagattgatacctctttacaatatatgtaccactccgacaggttggaatattgaccagccaatagacaatgtcaatataggagatgatttcatgatatggatgcatgtaatgtaacagacaagaaaacacaaaatcgaatattggcaaaaaacatatgtattttgctcatgctgatcctagtttttgccggctttttaaagtgcatggatttttcaaatcaactggaagtttattattatggtaataatagtagcagttatcagggagagatggcgcagaccttttgggataccgggagtggttacagcgaggagaattcctccttttattctgtattcaaacgtctcgccgctttttcttataaaaatgacggacagggattgcagagtgcccgcctggatttttcagccagtgacgaggagattggcattgcaagaatccaagtgagaagtggaatgtttacgacttatacaatctctggggcagatttggcaagaagtgccatctggcagaattgtagtgtgcaggtggaggaagatcatgtgtggatcaccccgacctcaagtgatccttatctggtattggatcagaacaatgcacctgattttatggcgcgtttacagtcagaccgttggtgtaaaatagggttgttggcactatttatcattagtctttgtctgttggcagggcttgggttttggcttaagaaggaaaagagtgaccgggtctataaactcttttctttgcttagtcttgctattgtcatggctgtttttgtcatgtctttgttcagtattacttatggacatccggatgaagatgagacaagaggcagcattgattactatttggcccattggggcttgccggattttgatgatgtatctctgcaaaatgcctattccaattatggaacggttcggttgacggaacggagtttttactatatattagccggaaagtttggctggatatgtaaaaatattttccatatctcagcatattatcgtatgtttaacgtgctgctattggttcttttggtggcatggatacttgccaaggggcgtaaggacaaatggatgtttgcctttttatttgcaacgccacagttatggtatctattttcctatgctacatcggatgcctgggacatttttatcggtttttttgttgtgacagaagccatccgagaagatggattgattgctgatgcgtggaaagaaggcttttcatggagacaatttggtggaatgctcttatatgcctttttgtgcgcacaaaccttgatgggaaagaaaaactatttgatcgttcttttgtttgcatttgtggttctattgtttaaattgtgggatgccaagaacaagaagcaattattcttaaaatacatgatgattttgggaatggtctttggcttttatgcaatacgtgcaggcattgatttatggcggtatccggagggtaagggctatttatatgaggcagagcgcataaagcataagtcgcaggaaatcattgagatgcagtctttacagcagcagggttatacctatttgcagactttaacagcgatagatgatggacttttcccaactatgtttaactcctttgtaggacgttatggctggatgtctttatacagcgctaatatttatgtatatgtcatgttgattttatacattgtgaatatggtatcaacttggagagcttgtaaagaaaagaagcgcattgtggcgattgtaacaacagttttgctattgtgtattggtacggtatatcagatgtggacgcaggattatcaggcacagggaagatacatgttgccttgtattttaggtgaggtttatattttgtcagatagccatgtatggagtaaaaagacatatcttgtttcgcagacattgatcgtcggtgcaggcatgttgtcttttgtgctatggggtatcataccattgtgtctggaactggtacactaaagggatatttgaggagaatagattgaaaaagaaattctggatcggactggtaggagcggtctgcgtgttggggattgccgtgtcactctttggcatgttgcagcgaccaagttatatttatatggtacgccatgggagaacctatgcaaacgagcaggggttgcttatgggtggagaaggaaatgcggagctgacacaggaggctgttgatcaagccaaggcagtgggacaggctttatcagatgtttcctttggaaaagtttataccagcaccttggggagaaccattgatacggctagttatctgttggagggggcagggcaggaaaatgtagaccggcaacagatggaagccttggacgatatttcttggggagatgcagaaggatataccaagcaggagtttatggagaaaaaacaattagacatcttcccggatgcgtttggctcggtagacgatgcggattatgtttctccaatccacgcggaaaccaagtatcatttctatcagcgttttgataaaggaatgcagcagatcatagacgatatcaatcccggggagaatgtcttggttgtggcacattcctcgatgcagttctggctggaaaagcaattcccggaattggaaggtcaggaaataactaacttgggtgtgaccgtaataaaggttacacacggaaagatggagttggtggagtataactgggtgatgtattgatgttttgaagcgaataattgatggagatcagaaggagcctactcatggggaaacagaagaaaaatagcaataacactatctatctgaatcgcccgatccagaacgaagacgaggattggatcggtatatctacatatgtggacaagttggatgcggcggtggatgcagatgcaagaatcgtagcggtgacatctgattttggtacagggaaatccagtttgatatccctgtataaaaaacgtgtggagcatccgctgtgcgcctgtttcggatttgggaaaaaggtactcagtatcaatatgtgggggacttatgcgcaacaggaggagatccctgcagataaacagggagattggggacatgaaaaagaagttatgccaacagaattgcataaggcatttatttatcaattggtcagcaggatcaatccgcacgatagaagaaaaagtcattatatcagccgtagattaagcaaggattttggcatatgggcagtcaacgggaagaacgcaatgtggtcatttttggcaatgtgttctcttgttggcttctttttatctgggcttctatataaatttcaaaagtacatacaggcatttttacagttaaagaacgagactttctttatgctgactattgtagtgtgtatcgtttctttagcgtgcttcgtattggcagttacagattctgaaattatctttagttcaacaaaatcggaaggaaagcggacgctggatgagaacattttgattgatctgttcaagcaggaagtgttgaatcatagaggaagacaacattatattgttgtgatcgaggatttggatcgcattgatgacaagcaaagtgtactacagttcttacgcgaattgagaaagtactatcttacggatggtggcaggcacaagattacctttgttgtgtgtatcaaaccggaggtcatgttggtagatggcagagaggagcagattccggagtacaagaagatctttgattatgtgataaatctccaaaaaattaatatagagaattacgatacaatcctaaaaggtttattgtctgaaaagaaggactggttagcctcattagatctgcaggcggagattgaaacccctggtatggattggatgatgcatgggcggaatattgatatccgggaaattaagagccggctcaatgaatccctgactttgtatgaaagtcttctgaatagatttccagggcgtgcaggtgatgaggtgattacatttgaaaaatgtgcagttgctacctatttgagaagagaatatgagaacgatttctatctgctagaagataataccttagatgtgttggtttcacaatacggtatgcgtggcatggaagtaatggaagaagaaaatcagccggaacaatgggagcagttcagcgagcgttttaaatatgaaatagaaaaactcataaagagcaaattggttgatgcaaactatcggctatacttctataactatcctgcaaacagtatattgttttcactggcagagatgcgcgtatataacagcattgtttatcaggaagcacccaagaacagcgaagaatatgaggaatatctggagcggacttctgagaaagttatacaggatgcctataaaaaagtcggttctctaggtgttcgaataccttcatttatactggattatgacaaattgtttgttcttttgtgtgaaaatgcaaaggataagatctatgaaatgatagcatcactacactttgacgagcagaatgaagcacgagcatgtgagacgattgaaaaatgtatcagaccaagaaaaggtgattatgaccgggatggcttgatctatgaaatatctaaccagttaaatgaaaacgttgaggataagaatatattgtggacgatccgcaaaagaatgtgtcagacgatcccggacaaagtgagattgtaccgttgccttttcgtgggagataatccattctggagtaaggaagaagtggaggcgatagacgatatttcaaatatttttgcggtcactaatttagatgcactggatcaggatgacgaaagcccggaaagcatacataggagaatcataaagcagaaagattggaaaccggaatatatagaattttatcagcaggtgattgcgcgtcagggaatagagcagtggtttgaagcacttgctcaagcatgtcaatgttttggcagcatacccgagcagatggttgctgtgtataaacagcagattgcatcgggaaaattggaaattgcagattatgtatcctgcatggaacaagtgaaggaattgggaaaaacgcagttgctgcttttgcgggattacctgtgggtgaacggactatccgaacgtttatgtcaacttttatatgagaatggattttatttggaatatgtctgcaattatttgctgcaagaggatgcaaaaatagattacgaggatcaaaatgtctatggcacgatacagtggaatgcagagtggatacaggcgcatgccaacactgtttttatgcgcatccgaaaagaagtcctgtgtgagtctgaactgttggaaaaatatattttcttatatgaagccccatatgcaatgccggataaggatgaactggcattagttgatgatatggcagatgcattgaaactgttacaaaaccgcatcttaacggaagtacaggcaaaatatgtgtcagagtactttaatgccaaatatagaaatcctgcaatcgcttatgatattatgcagtttattgtgggacaaacggcagagatcgcacatgaaatgttttatcaattgcatctggagaaggtagcatataagaaaatgaggcgggatcgacgaaaagcgatgaaccggaagttatatgagatctttgagatggaggataacgcagaggaaaaagtacagtttttgcatttcacggaaacaccgatagagtacattgagaaaaatctatggcaggatctgaatcaggatgaaaaactacaaaaactatatgtggaatatgtcaaccgtctgcatctgattccgggttatactttgaataatattgtgaaactgaatacagtttatatttatagcaatgtcattatcagtcggctttggaataacagatactataaattgtatgtggtgtcgaaaacgatgcgtgagaaacagtttacaatggagagggataaactggaacttctctggaaggtttatgttgaaatctttcacacaagggacggttggtcacaaactaagatctatatgcgggaaaatcaagagtttctgcatcgtctggtagaacaaaaggagtatgagttcctggatgaagaggacattgctatgtacgctgatgccaaacaaacggtggcactgatggattatgtgacaagttatgataatgctacacaagtggcatatttccggaagataaaaggctttgaaggcaaagatgcggcacatcatttctgtgaaatcgcaagagataataaggcaatcggtagagacgatgcggtgtataaaaatgttagtggtactttggtgaatccgggatatgaaggatggctgacgagaatctggaaaggcaagaagtgacagactgccacatcaattgcaaatacagaatagtggtaaacaacacattgagaatttcgcagaaattcgagagagtggcttttattatactgacagggtgtttgcgaatatctaaggaaagtgtgtttactggtctgaacaattatgggattgcctgctacaaaaaagattgcaaggtagtcatgggagagtgagaaaaattggggttaacgtggcaaaagtcgtctcattgtattatgagacggcttttgttataatgagacacagtaagaaatcagaaatggagtttcggaatgaaagagacaaaaagaaactactgtgttgcattagtaagcatggtggttatagcgatactgtgctatcgggcattttattttcctgagaatatgttcgtcaagcgtcgcatcgcattatatgtaggtttggtagttcttgtggtcttggtgccggttttgatgatcaggataacaggtctgaaccggtggcttacacatgtgataggtcgcttttgcgcattaggatccaaggtgcggcagaataaaaagacggttctttggggagtggtgggtaccttgcttggcgccattcttgtatatccgctcacttatgctatatgccatatgtcaggggcggcaatgaataaccaccgctatttgatcgcgcttgccatatatggcacgcttcttatttgttttgcgatgcatcgtattgcttatgcacgtgctgatctcctggtctttttggcgattatgatcatgggaacttgttccattttcgtgacaccgcgtattcctggaactgtaccggacgatgagacccattatcgccgtacgacggaagtgatcggcttttttaccggaagtatttatgaggcagaagagcagaccttacgcgaatatgtgggaaacgtgcaggggcatttatattatgatgaggcatcgtcaggagcctatctgaaaagcctcaacgactcttataagaagggcgaagtgattccatacggtgtcaccagattatcctactatcacattgcttatattgttccggcgtgcggaattatgctgggacgagccctgggcttaccttatgcatatacctttatgatgggcaaatggtttacctgcctatgctatgctctcttagtcggggcggcaatgcgaagggtaagaaggggaaaggcagtatttgcggcggttggcatgattccatccatggtctttttggcgagtgcctataactacgattattggatcgtaggatggactttgctgggatttgcaaaataccttgctttgtatgaaaacgatgagccgatcaccacaaggcagttggcggatattattgttacgatcatcataggaatattgccaaagattgtctattttccattgctgtttccgctattgttcttgcccaaagagcgtttaaataagcggcagaaggctgtgatccgcgtatgtgcgatcgtggtagttttgggcatatgtgcagccttgctggcaccgattgttacgaatccgcaggcatatgcagatacgcgaggcgagggtgtaatcagtaccagcgcacagatcagttatattatgtcggatccattgcggtatattaagttactgtttacttttggctttgagtatttttctgcatctgttctggggacaaaattgcaattcttctattatgtcggtcagggcaaatactgggggatttcattggtggttctcgttatggcagcctttttggatcgagacgaagaacataaaatgacagtaggagcacgtattgcggtgatcgttggtgcgatcggggcgtatgcattggcggcaacggcgatgtatctggcatttacagaagtaggaagtgataccattttgggcgtgcagtccagatatgcctatccattgttagtgccaatgttgtatgcaatcgccccagataaggtacggattacaggcaagaaagaaaattggatggttgcacttgtgctattgatgagcctgccaatgatatggaatttgaatacattaagtgttgctctttattagtaaagtaagaagtgtggaaaaggagacaagtgttaaagatgaacagcacattgctgattattcctgcctataacgaggcagagaatattgaacgtgtcgtggacaatttaatagagaattatccgcagtttgactatgtggttatcaatgacggcagtcgcgatgatacgcgtaagatcttgtataacagaggttacaattatctggatcttccggtcaataccggactcgcaggagcctttcggtgtggtgtccgctatgcgaatgcgaaaggatacgattatgtcgtgcagtttgacggcgatggtcagcatagaccggaatctgttgacaaaatgctgtctaaaatgcaggaaacggatgcagacattgtcataggttcgcgcttttgcgagcagagaaaggatcacagtgcgcgtatgatgggaagccgtctgatcacgtccttaatccgaatgcgtacgcatcagacgatcacagatccgacatcaggtcttcgtatgtacaataagcgcatgatcaagttggtgggatatgatgtggcatatacaccggaaccggatactttggcatacctgatcggatgtggggcaaaggtagaggaagtccaggtggagatggacgagcgtatgtttggtacaagttatctcaatttgtggaattccatcaaatatatggcgacagttgtaatgaatattatcgtattgcaatgggttcgtaaaaaggaggtcttgtaatgtcaactgctcttaggattttattgcttattggcgcgattgtgatgttcctgttcgttgtgaagtctatccgcaagtcgcgtattcaaatgaaagatgctctggtatggatgctgatcgcactcttgatcgcgatatttgggattttcccgagcgttccgatgtggatcgcgggcatcttaggtattgactccgcagccaatatggtatttttgatctttatcgctattttgttattgtgcattttttctctggcactccgtgtttccatgcttgaggacaagtgcacgacattagccggggaaattgcgattcgaacgcatcaggaagaggatgaggaaaagtaatggacaaacataattttgtgatttgtgcctatcaggaaagcccgtatttagaagaatgtatccgttctttgacaaagcagacgatacaatcgccgatcaggatggtgacatcaacaccgtgtgagtatatcaaaacgatggcggaaaaatacaagatccctttatatgtgaatgagggcgagggaggaattgcacaggattggaattttgctatgtcccagtgcaatgcgaaatatgtaacgatcgcacatcaggatgatatttatgaaccggcatatgcagagaagatcatagatcggttggagcaggcagagcgtccgttgatcgctttttcaggatatggcgagttgcgaaatggtcaaaaaatatggtcgtcacccttgatcaacatcaaaaagaccatgttattaccaatgcggatcaaaggattttccggaagtaagtttatccggcggcgttgtatgtcattgggcaattctatttgttgtcccgcagtcacctatgcaatggataatttgcagatgccggtatttcaagtaggattgaaaagtaatctggactgggaaacctgggagcgcatatcgcgggaacgtggtgagttcttatacattccggagcctctgatgttgcacagactgcatgaagaatcgacgacttcgcatttgatcaatgagcataaacgtggtggagaagatctggaaatgttcttgaaattctggccaagcgggatcgcgcatttgatcaacaagttttatgcgagaggagaaaagtataatggatcgtaagccgatggcaaccattatcattcctgtttataatgcacaggcttatctggaaaagtgtttggacagtgccttacagcagacctatgacaattatgaaatcatatgtgtgaatgatcaaagcccggatgacagtcagcgtattttggaagaatacggacagaaatattcgggaaaattgcattgcatcagtaatgaagaaaatatgggacaggggcagagccggatgcgtgctatcgccatggcaaggggggagtatatctttttcctcgatagtgacgattatttagatccggattatctggaaacctttattcgtgaggtgcaggagaaagactatgatatggtggttgccggtttcaagcgcattatgccggataaaacagtagaacatgatatcatagaaagcgaatttacgcgcgtgtgctacacggtggcttgttgtaagatgtatcgaaaagacttcatcttgcagcaccggatcgattttacggatcaacggataggtgaggatatattctttaccctgtctttttattgctgcaaggcaaggacaaaatttattcattattttggatacaattatctgtataatccaaagtctacaacgggagcattgagttataacagacattttgagagagtggctgcggatatgttcgcccgcttgctggacagatatcctatggagtcgttggaacaagaacaaggctatctggtacagtacgcctatgtgtccacgatgacggatgcactctttcattatggacgtggggcaaagccggcattgatgaagaaaatgcatgcctttgttttacgggatatgtacgaaaaattcccggatataaagagcaatccatattttaggatccggggattggaaggaccaagcctgatgaacaagataggtgttgcagtatttatgggaagtatcagattgcatctggatggtgccttgtgttggctggtttcattgatataggtggaatatggttagtgtagtgatccctgtttataatggggcaaagtatatagaaaaaacgattcatacaattttaaatagcacatatcaggatcttgagatcatagcggttgttgatggaagcccggataatagtctggcgatctgccagaaactgagtcaggaagatgccagggtaaagactttttataaggaaaatggcggaattcccgatgcacgtaattatgggatagaaagagccggtggtgagtacatctgtgtctgcgatcaagatgatatggtgcaaccggagatgtatgaacagatggtagatcgtctggatgcagaaaaggcggatctgtgtttttgcagtacaggacagatggtcaatggcagtgtagttccatttgaaagttttgaggatgcgacatttacagaggatgagatccgaacgcaacttttatatccggttatttttgaaggctatgatataccggttgcaatgagtagtgtaaaccgtcatccgagtatttggaaagccctgatacggagatctttttatgagcagtatcacttacgttttcatgcatatgtgagttatgaagatgatctcctcatgatcgtacacctgttatccgtcgcaaaaaaagtatgtacggtaaagtatagaggatatctttggtatatcaatatggcatcggagtctcatgccagaaaatatattgacgatatgggacaaaagcagcgaaagtgggtagatgatatctgtgcgtcagtcgcactgacagatgcgtcaccggagataaaaaattacacccgtcaggttaccaactgcaaggtgtttgtagatgccatactcaatctgtgcagcccttaccgcagggaaacattttccgatatccctcaatattatgcacagaatatctattgctatgattttgaggatgcaatgcaggtggcaggttatgcgcagaaaaagtttcctatgcagcggtatatcctacattcgctggcaaagcatcatacatatcggagttattttgtcgcacggatattagtttttgcattggacaaagtgctaaagagcaaaatgatgataaaactggatagtctcctgaaaggaaatggatgagatgtcattactgagtagtgtgcgtaatgcgctgtatagcgctatacaggcaaagaaaataggtcaactgcatggcaggttttggacgaatggcagggtttcgatcattggcggcaggcatattactgcctatggaaacttttttgtgggagatggctttcgtatagaagcagtagaacagcatttaggccatcattacgagccacagatcatcataggaaagaatttctcggcgggaaattatgtgcatatcggagccatgaaccgggtagagatcggtgacgatgttttacttggttccaagatctatattaccgatcatcagcatggaagcacttcttatgaggatatgtctctggcaccggaggcgcgggaactgtcaagcaagggaccggtgatcattggcgataaggtgtggattggagataatgcggttatcatggatggcgtgacgatcggtcataatgcccttgtcgcagcaggagcgatcgtgacaaaagatgttccggcatatgctatcgtgggcggtgtgccggcgcgggtattaaaacaagttggtaaggatggagaagattaaatgacagagcaaatcaaagtttccttatgtataccgaccaatggtatcgtaaagtgggtcagacctgttttggatagtatctacgccagccggtgtcgggaatcagaatatgaagtgatcgttacggataatggcaacgatccggaatttcagtccatgatggaacaatatgcggcaagatatcagaatctgatctataaaaaaacagatgcagtccagtttttgaaccagatcgaggcattcaaattagcgcgtggcaacatgatcaaatttatcaatcacaggtatgcgttaaaggaaggtgctttgcaatatcttattgatttctcagagaaatatacagacaaatgtccgggcatttattttttaaatcaggcggaaaaacgaaaagagacgcaggcggtttatgaaaattttgacgcgtatgtgggggcattatcgtattggtcctcctggtcggcgggtacgacgatctggaaaaaagacttagaggaattggactttacacagacattcaataagatgtttccgcatacagatgtgatcttttcggcaagaaagaaagatatgtatattattgataatacagcactgcttacggatctggagccgaacgcgtcacaaaaaggaaagtacgatctgtttgatacttttgcagtagagtatgtcaagatcattgaaagattatataaggatggcgatattacactggagacttttgaaaaggtcaaaaaagaaaatctggatctggtgatgtcattctatgtttcgtttgttatgataaaacgaccatgttcttatgatcttagtaattttagtgattctattgttgtttattataaaaagagtgcagcattttggagtgctgtgcgctatattgtaaaagaatgtttcaaagccgcgggacggatattgcatatcatcaagtgagcaggctttaggagaatatcatgcaaaaagaaatgaagcagacacggtatttgatgttagatcagccggcgaatggaaaacaaggcagatggatgcatctggcatataaggggatggcaatgctgtatcaatgggcgtggaggatcagtcctaagaagcgcgatatggcggagagacaatacaaggtctctataggggcaatttttaagaatgaagccctttatctcaaggaatggattgagtttcaccgcattgtgggggtggagcatttttatctttacaataataattctgatgataactaccgtgaagtcttagagccgtatatcaaaagaaatatcgtgactctggtagactggccgaaaaaccaggcgcagatagaggcgtacaaagactgcatccataagtatgcaaaagaaacgcgctggatgggatttgtggatattgatgagtttgtcgtgccacgaaagacagataatatttacgatttcttacaggcatttgaaaataaatatggcgcggtcaaattatactggcgtatgtatgggacatcagggcatatggcgcgtgatgtgaaggggcttgtcacagaagattttacggtgtgctggtccaagtattatgacgtaggaaaatgtttttataatacggcattcggatttgacgaaaaatcgccgaagaatgattatttgcatcacaatttatggaccaacaatggcagacgtaatcttcctccggtcaatatttttggcaaagtatgttttggggatgtcaatgtgatcccgacagcggagtttccgatacagatcaatcactattttacaaaatcatatcaggagtatgcatggaaaagggcaaagggggatgtatattttaaagtaaatcctcatgacgaagaatacttttataaccatgaaaaatggtgtgaagcgacagattatgctgcatacagatatttgattaaactaaaacatgcaatggcacaagggcagcagccggtgtcagcagaagatgagcaggagatctaagagagtatggcagaaccatcattgaaaaaacagatcatgtcaggtatggtatggaaatttgcagagcgttttatcgcacagggagtttcctttatcgtatcgctggtattggcgcgcatattgatgccggatgattatggtgttgtatctatcattaatgtctttattacagtggcagatgttttcttgacgagtggcttaaatacagccctgatccaaaaacaggatgcggatgaactggatttttcaacaatcttttattgtaatttaggtctgggaattttattatatgccattttgtttgtggcggcaccttggatggcaaaagcataccatatgccgatattgacatctgccgtgcgtgtatttgcattgcgcctgccgatttccgcctatcaatccatacagacggcatacatttccagacgtatggattttaaacgctttttcttttctacgatcataggtactttggtgtctgctgtcgttggcattgctatggcgctgcaaggatatggggtatgggcattgatcgcacagtatctgacaaacacgatcattgacaccctgtttttagcagttacggttcgctggcatccgcgcctgatgttctcctggaaagcggcaaagcctatgatccgctacggcggaaaggttatgatgacagacctgcttgggacggtatgcaacaatttgggagatttcattatcggagccaaatacacgtcagcggatttggcgtattatacgaagggaaaacagctgccaacattgatcaagagtaatatttacacctccttgatcagtgttctgtttccgggaatgtcaaagatcaatgacgagggcgaaaaagtgaaggctttatcaagaaagagcatccgtgtattgacctatatcatttatcccttgatgacagggctgttagtagtggcagagccattgacgatctttttgtatacggagaaatggatcgctatggttccgtttgtctgggtcgtatgtattgaggcaattttttcagtgcccggaacgattaccctacagtcagttaaggcaatgggctacagtgataaaatgctgaaggcagagatcttcaagaagccaattctgatcctttcgatcatcattgccatgcaatatggcgtgatggcgattgcgttgacgcttcctttaaataccttgttggaatttgtgatcaatggtgtaatggcgcataagaccgtcgattattcgatcagagagcagttatgggattgcctgccggcaaccattatgtcagtccttatgggagcaggcgtgttgttggtagcccatttaccattgggacttgggacgatagcattactgtttgtagaaattctggtgggtattgttatttatgttctgctctccgtgataacgcgcaacgaggagttcatggcattggcttctatggcaaaacaatatcttaagagataaaggggttaagtatgataagtaaaggggaaaaacgaaattccagtttggacttgttaaagatcattggtatgttccttatcattgcacatcattattatgtgcatggaggatttgcaccggtcagcgtggataatatcagcaagggacgcatctttttggagcaagtctctatgtacggatcatggagttgtgatctttttgcgctgatcacgggcttttatatgatcggatctcggaatgacggaaagaaacgtttgaaaaagatcttacaattagtagtggaaatatatttctatgcgattgtaatctttgcaatattagcctacaagggattggcggcattttcttttttcaatatgctgcgggtcgttttcccgaccttgtggggaaattggtatatcatagcatatttgctgttctatcttttggtgccatacatcaatcctttattaaatcagttgtcgcaaaaggagtatagacggctcctgctgatcttattcctttgttggtctgttgtaccaacgctgacacagttggataaatcatgggaatttagcaatgtggactttttctttgtcatgtatgcgtttggaggttactatcgtttacatatatatggaaagaaaaagtatgcaaacgtatggaatgcccttgtgggaatgatctgttttggcatagccataggatctgtggcactttgcaattatgtggggattaagtggcagaataattcaattttgggatgcgcacagtatctgatgcctttgtattcttttgttggcgtgatctgggcactatcctggtttgccttttttgccaatgtcaatttctattcgaaacttgtgacatatattgcgggctcagtttttggtatttatatgatacatgagaatgacttcttgcgacctgtggtctggaccatatggaaaccgaatgcattgcagacagttgaaccatatggtcagtttgcagagaagatgttagtagttttctttggatgtttattgattgatatggctcgtaggtggcttttctggggcattggaaaactactgggcagtataaggaatcttataaattaggaatgagccttaagaaaatcagcagtacgccggatgccatcatcgattggagtgtgaactagtgtaccaaattccgtttcgtatcgtgtgatgtccagataatttgcggggagatcgacactgcgctttttttcataatttacgtctattctgatatcaagcacagaacgaagatgatcaattaagtcgttgagacttgttccggtgccactaccaatattatagatatgatattggggggatccaaaggcgatttttaacattgcgtcaatggcatcatcaatatagatataatcgcgaacaacagatccatctccatagacatgaagcgtctcttggtgaagagccttgtaagtgaaggtggtgagggcaccaagttttccgtttgggcgctgatatggtccgtatgggtttgctagacgcaaaatactatagtcaatcccatgcatacaatggtagagatgacatatcttctcgattgtcaatttctggatgccatatgcggtaatgggatttgtaggggcattttctgtgattggacatgcgacatttccatatacggttccaccagaggaaataaaaataattttggaaacatgatgctttacactggcttctagtaagcgagtggaaaaagtaatattttcgtttaattcggcttcaatatcattattagaagaagacggatttgtcgtactgacgagatgaaatacaagatctatattttccagaatattctcgaagttgtgtgtctgtgtgtggagcgcaaggcaagagacattattggcagcaataattgtctcattagtgaaatatgaagtgtctgtgtcggtaattgtaatgtgatttgcaggatttttcatcagtgctaatgtaaggtttgttcctataaaaccagcggcaccagcaattagaatgttcatgataatacctctattcatatattgtataagggtagtttacatgatgagatgaatgttgtctatgagaaattggttataaatatgtatactatttaatagaatcagatgcatacagacatacaaagaagcaacaactaaaataaatagagaggggacaaatcatacatggatttcaaaaaatcagtagttggattacgagataaatttgcaacaatactattctccattggcttgtcggctgtgattatacttggaaaacacatacatcttactgatcaggtttaccagggtacagggaacacaattgatagttatcatagatatgatctggcagaaggattattatttgcatgttgtatttacattggtatcttattgtgtgaacgaatgattaagaaaagacctattgaaataaaaggagtttcgggagagcgcattccactggggaaaatcacagtaagtagtatcgtcctgatgcttctatggtcaccatatttatatgtttattatcctggatttatctttggcgacagtacagcaaatattgcgcaagccttgggacagcaaccgcttaccaatcatcatccggttgcatatgtgttgttcattcgattatgccttcgtttggggcaacatctaggcggattgacaattggccttgcaatttattctgtgatacagatgggaattatggctctgggaattggattgatggttcaatggatacggacgcgatttcgattgaaccgatggcttacttggctgatgcttgtagtctttggatgttcgccatatattgctcagtattcgattgctatctggaaagacccgattttctcagttacaattgtttgcgtcacaatcttgttatttgatatactatatgtagaaacagacaaaaaacaaaatattataagaaatatcttattactaatttcggtattggctatgatctttagccggaataatggcttttatattgcaatagcgatagtatgtttgtcagtgttcttgctgtttagaaaaatgaccaggcaaaaaggcatacagatattggtaatatgcttgatagtaatgattgcttccaagtttattactggaccggtttatgatgcatatggtattgtaaaggatgatgaaaaagcggaaagttatggaatctttctggcacagatggcacgcgttgttgttgagaacggagaactttctgcagaagacagtgattatatggggcgtttgttacctatggaggaatatcagtcagcttatacaccatgtttggtagataatctgaagtggaaccccaattttcaaaaagaagtgctggaggatggattttttcgtacatatctatccattctgagaaagaatccgcgtatttgttttgaagcgtgggaattacagacctttggattttggtcggtgaatcagaagtgggtcaatggatttacaggaaatatcttgaatggtgtgccaagaaatatctatcctgagtatggaatgggggtagagggaattgaaactaaattggtagataataattcattcttgacaaaaatgttcccatatacagcacgatgtataccaattggatatattcattggttattgattggagtggctctttttgccttgttgcgcttggattttcgccggcttactgtgcttgcaccggcgcttggacttatggctacacttatattagcttcgccaatatcttactggccgcgctatggacttgcccaacaattactgttaccattatttatagtaatgatatttctacgagaaggagaacaccaaaatggacaaaattgcagttttaataccttgctacaatgaaagcaagacgatcgaaaaggttgttacagattttaagaaagccttaccggaggcaaccatttatgtatttgacaacaattcctctgatggtacggatgagattgccagaaaggcaggggcggttgttaagtatgaataccagcagggcaaaggtaatgttatccgccgtatgttccgcgagattgatgcagaatgttatgtgatgaccgatggggatgacacctatccggcagagagtgccagagagatggtggactgtgtgttaaatcatcatgcagatatggtggtgggagaccgtctttcttccacatattttgaggaaaataagagacctttccacaattttgggaattccattgtgcgatcttccatcaatagccttttccacaccaatatcaaggatattatgacaggctatcgggcattcagttatcaatttgtaaagacctttccggttctctcccagggctttgagatcgagacggaaatgagcattcatgcagcagataagaatatgtttgtagagaatgtgattattgaatatcgagacagacctgaaggcagtgagtcaaagctaaatacatacagtgacggatttaaagtgcttcgtaccattgcaagcctgtttcgtacgtataaaccaatggcattctttggcgtgattgcattgattttggcggtattaggcgttgggtttatgatacctgttttggttgagttcaatcatacaggtctggtggaacgttttccgactttgatcgtatgctgctttgttattttagcggcgatggtttccttttttgcgggactgcaactccagacgatcacgcgaaagaaccggcaggattttgagatggaactgcaacatgtgcattatgagtacgaacatttggaaaagtagactagacgaacgttttatgtgtctgtataataaatagcagataagactagaatcacaggaaggtgttaatcatgggaaaaataacagtaacagatgattgcaatggaatcaaaggattgaaggtcattgaaccgaccgttttcggtgatgacagaggatatttcatggagacttacaactacaatgatttcgcagcagcagggatcgattgtcagtttgtgcaggataatcagtcagcatccaaaaaaggcgttcttcgcggacttcattttcagatcaattatccacaggataagttggtgcgtgtgatcagcggagaagtatttgatgttgcagtggatctccgcgagggttccgagacatttggcaagtggtttggcgtgactttgacagctgagaacaaaaagcagttcttcattccaaagggatttgcacatggatttatcgttctctccgatcacgcagagttctgctacaaagtaaccgatttctatcatccaaatgatgaaggtggtctgatgtggaatgatccggatattggtgtagaatggccgatgccggaaggtatgacagcagatgatctgatcctgtctgataaggataaggtaaattcctcatataaggattatgttgtaggtaaataaaagcatcgtgaatatgatgagatgataagccagcccgatggggctggcttttttgcgcgaaaaattaaggcattgacgcgaaaaatctgggtaatgtaataagaaaagttattgtcttcttgaatttttgaaaggaggacagtgacttatgagtatgtttgatgttatcgaaaactggatcaaaaatcttgttcatggtaagtagaatttagtacccctttttccgttctgttggtataatttaagaaaacgggaaaagggtgtaaaataatgaatatcatcttttcatttattagcaatgtggaatatgtaggcttgattattacaattatctcattgatatctcaaatatcgcttaaatggaacaagacaaaggcattatggacaataggagtgatttttgcatatacactggaatctgtgtatgtgaaagatgcaaataaacaaatgctcatatatgtagtgacaatcatagtgatctataaaattatcttagtgggaaaccctattaacatcttatttagtacagtaatagcaatggtgttgatcagtatcatgacacaattgttaaaagtaacaacaattacatttctgtcgatcttttctatttcagtagcagaaatcatggttaaaattgttacgcaaaccattttgtggatcgtaataggtctgctttactggtatatattgaaaaattatgcgtcagaaatgaagaaaataccattaagatatatctttgtttttatgattgtcttggctgcggaatgttttagtatcacctttttaggggaatttgtattaaaggcgttagattatgaacgagcatggatagcagaactcgcctacgtccttatgggacttggcgtcttcgtccaactcggacttctcatcgctctctatttttcgcgcaacacctaccgtacccagcaggcgctggcgacaaagtatctggaggagcaggtggcacactaccagtatctgagtgaacgtgagcaaaataccagacgcttccgtcacgacttcaagtcgcatatggctatggcgaaacagttatatgaggaaggcaagcgggaagagtttgaagcctatttccacaagatgacagagcagatcgccgccattggcaatcgtgtgaccgtcaacaacgatatagcggacgccatcattaaccgctactatgatgaagcggcactggcaggcattaccatggaggtggaaggtcacttcccgggagaatgttatgtgtctgcttacgatctttgtaccgtcttatccaatcttttgagcaatgctatagatgcagagaaagaagcgggcggtaagaccatatactgcggcgtacgttatgatgagacacagattttaattgtagtgaagaatgattatgtcaatccgatcaaaagaactgacaatcggtttgtatcaacgaaaggagatttacgacatcaggggtttgggattgccaatatcaacgaggtggtccgtaagaataacggacacatcttttatgatacagcagatgcccgattcgtcgttcggttaagtttatgcaatatgaagcagaattcttgaagattgcggtagtggacgatgaaccactatggcaacagaagacagtagatgtgatcgagaagaaatatggtctggatgcaccacatatcgaccgctattccagcggcagggaacttttagaccggaacacctattacgatattctgtttatggatatcgaaatggaggggctggatggttttgagacagcaaaacgttaccagaagcaatatgaatatgcaaagatagccatgctgacctcccataccgagttgagccgcagaggctatgtggtcaatgcttttcgatacattgacaaagcctgcatggaggcggagatcacggaggcgctgagtgcagtgcgcaaagccaaagaaaaggagcggtgtattgaggttaatatcgtaggactcggaaccatgccgattctgataaaggacattatctatgtcaatatgaaccgcagaaatatcctgatccacacgcgaaaaggggacttcatcagttcttgtaccatgcacgagatggaggatctggtaaagggctgcggcttttaccggagtcaccgttcctatctgatcaatttagatgagaccatcaattacgagggtatgaatatcatcatgagtgatgggaccaaggcatatctgagcaaggataaacaatccgaatttaaagaaaaactgttggcacgcaaatttgaaatggcaaacggataagatgtgattgcagagattgacgcagaaaacgacaggtttcgcgcatgcagactggagggaaacgagaaaaaatgataaggtttccgtgggttatgaagttgatataaggagactgggcgttatggacaaaattacgattgctatcgcggatgaccaagagatcacagtggagatgctatccaatatcgtggcatcgcaggatgatttcgttttggcaggaactgccggaaatggagaggaagcattggacttggtgcgccggtgcaaaccgcagatcttattgctagatatgatcatgccgctggtggacggaaaagaagtaatgcggcaactgcaatcggatgaaactatatcaccagacaccaaagtgatcgtcgttaccgcggcagacaggcgggcattagcagaagaaatgtttgcgctgggggctctttattatattatcaagccttttgattcggagacgatcattcaaagcattcgtgcggcattgggtcaggaattgatcttggagagttcggaaaatgtaggcacgaaagaaaacacaccgggcaagcccttggagcatcgcattacggaattgatgctcctcttgggggtgccggcgcatttgcgtggataccaatatttacgagaggccatctttatggtggcgaccagaccggataccaggcatcagatggcaaagatcgtctatggacagatagcaaaaaagcatgacgtgtcgaactacacagtagaacgggcgatacgtcatgctattgagatagcctggagcaggggggatatggataccatggatcggatcttcagctataccgtacaggcatccaaaggaagaccgaccaatacggagtacattgctgccgttgcggattatctgatcttggcaaccacataaccgaatttgacccactggtacatatcattgtaatcataactgtcgactgtgatcgtctcaccatacgcggtgatcggttccagacggcagggttctgtttgacgaaatcgccggatatacaaacggcgatttttcttgttgagaaaaagtccggtgtcaccatctcttggaggacgctggcagaccaacaaaatatcgcctgcatgatatgcaggatgcaaatggttggtcgtgacgcgcacaccacaggtaatctcatccccataaaaggcgcggtaaggtgctacattaaaatattccacattggaggtatcgtaatacatgccatcttccatattgccaaggatggtgtaaagcggcaggagttcctccggcgtgtcctttgcctgtgtgatggcctctggtgactgggcagcgatcgcgcgttccattgcaatagaggtacggatcgcctgctgacgctctttgggcagttgccggtaatccatgagaagactcatctcgggtacaatgtcgccacagagttcaaagaaaaatttccctgtcgtctgatagaccagataggcaacataaatagggattttggcagatttgccggatatcatatacttataagaagaatgggacatctgtaacttttccgccatctgtgcttgtgtccatccgagttcttctcttactttttccagattttcgataaaattttgtgtaatttcaatacttgtcatcggcttttatctccccgaagtctaaaatttctacttacgttaccattataattgagtaaagtacaaaaatctaggtgagattttcgactttgggtctgatataatacacaggtgtgaaaaagtccatagggaagatggaatcatggaatgttacttgagtcagtatggatagggtgttaaaatggtagcacgaaaagacgaggtggcataaatgataaaaaataatgcaaaaacgattgcaatcttaatggcaacctgcaatggtgaaaaatatgtagaagagatgttacggtcgctggaaaaacagacagaagatgattttgtctgttatatccatgacgacggttcgacagatcagacgatgcatattctcaaaaagtgggtggaagatcatccgtatcactttatgatccttgagggtcaagcacagggatctgcaaaggataattttttttggatgcttgcgcaggtggaatccgactactatatgttcgctgatcaggatgatgtatggatgccggacaaggtcgagaaaagtttcaaaaagatgaaacagacagagatgctttgtcaggacaaataccaggcattctgtgttttcacggatatgcaggtggtcgatgagaatttgcatgagattgccccgtctttcatccgctatatcggacgggatccttaccgtacgtctatggcagagatcatcatggataacccggcggcaggatgtaccatgctgtttaaccgcccgctgcgtgatgcggcgttagagttgcaggatccgaccaagattgagatgcatgatgtatggatcttggctttggcggcggcatatggcacagaacatgtcggagtagtggatgaggcctgtgcatattacaggcagcatgccaacaatgagatgggagccaggacggagagcaaggcagataagatcaagcgcaatctgatagatttatgcagcggtcgttttatgcagcagaagcgggcttttttgcaaaagggaaggaatctggcagggcagatgtatttggttgatgcccttccggaaaaacaaaagaaaatattggaagaattttccgagatcggaaaattgtccaaatggcagcgtataaaattctacaaaaaatatggttttacgagaaatcagggaaccggatggatgtatctgtggatataggtctgctttttcgtaaacggtgggaaaaggagaacatgaaaaatgaagaagatcagggttggtatagcagacgataacgaactttcgcggcagatgcttcgtgcgatcgcagaaatggacacagatctggagatcgttggcgaagcgatgagcggtgtggaagccctggctttggtaaagagccagaagccggatgtcatgttattggatgttgtcatgcccttaggggatggtttagaggttttgagtcaggtaaaagaggaggaagatattccgaccaagttcattatggtcagcgcacttggggacgagcgtgtggcggctgatgcttttgccaaaggggcagaatattatattgtcaaacctttccacgcggatctgattctgcgcgagatcaagcggagtgtcgaaaaccggatgcaggggcaaaaacagaatgtcttaacgcgtgtctacagtaatccgcagacggatgaggcggcatgtatccgcagggagatcaccagactcctgctggcagtcggtgttccggcacagttgaatggttatcagtatctgcgcgaagccatttttatgactttgcagagtgttgagtatatatcatctgtcacaaagcgcttgtatccgagtctggcagaccagttcggtgtgacggctgctagcgtcgagcgtgcgatccgtcatgcgatcgagacatcctgggcgcgcggaagtgtggagatgatcgattgcattttcggttatacggtggatgactgcaagggaaaaccaaccaattcggagtttattgctatgctggcggatcacatccgcatgggctattgcaagtcggcataagaggtcaggcaagggttttgacactctcttacaaaagtggtaaaatgcattcattctgtagataaatactccctgtaggagggaatggatgagaaaagaagatatatttgatcgggttgtatccgtatcatggcttggctggtttcgtccgatttattacaaatatcgggagatgtggctttatgccttatttggattaggtacagtactcatcaatttatttgtatattccttatttactgagacgatagatcttggtgtattagtggcaaatgcgatcgcttggatctttgccactttgtttgcgttttatacgaaccgccgctgggtatttatttttcaccccaagggcgtgtatgccttttttgtgcagttgggcggattttgcttaggacgtctgctgacacttggcatcgaggagatgatgctatatttctgcatcgaggtttatcatttgccaaacatgttgatcaagatgttggcgcagatcattgtgatcgcactcaattatgtgttcagcaagttgatcgtattccgtgggaaaaagtaggagagtcagatatgacattgatacataaaaaggagaatcgctttgtatgggcggtcttttggatcagcgtgatcgttcgaacggtgctgggatgttactatccccgtaccgttaattgttatccggacgaggctttatatttgtcggcagcagccagtctgtggaaccagcacaaggttttggcattcaatctgccgacagactttggaaagatcggttattcgcttctgatcgcaccggcatttgccttttcaaatctcagggtgcggactatggtcataggctttatcagtgcgctggtcatgtccttgggactttttccggttaatgctctggcaaagaaacttctgaaagaggaaagatttcgcagatggagtctgcttttttatgccctgtctgcgaccatgacctattctatgacctatgccagtgaagtcctctttataccggtcatggtacttttgatctatttgatctatcagttgctgacagatgcctggcatgggaaaaagaagatactcatgctggttgtgacggtgctggtctggctgctggcatatctggtcaaggaactggtacttgtgataccggtggcattggtcttatattttgtgacagaccgcctgctgggctggagacaacggaaagggatggaaaaggacgacgtggcaccgggcaaaaagcagacctggaaattttttctggcactgcttttgatggcggtcgcctgtatcgggatctacctgttttccaatgcgggaacacagtattatcaactgggatttgatttgacgcttttacaggaacgattctggtatcttttatacggaaccctcttttttatcgtgagcacactgatcgcctttttgttcttgccggtactttatccggtcatctttggcagaacgatggagaaaaatgccagaaagttatgtctctttctggtctatgtgatcgtggttacagcggcagttgtgtcctatacgatctatatctatgaggattatccaagcctgaccccacgtgcgcatatccgctatgtggagtatctttttgtgccgtttttgatccttctttttcatctgctggaacaaaaaagaccggtctttgcttttcgccatgttttggcgttagcggcagcccttggcctatgtctggtctcctttgtcggctttaacggacagacgatcgaccataccatgctctttttcgttcaggtattttcgcaggacggacatacttttttgccatacaaggcaaggctttgcgtgctgcttttgatagtaatagtggcaatttttacctatctgttttataataagagcaagttttttatcacattattattgtcgggaattttgatcgtatcacttggcaataatatattatccacatatgtccagtataaaacacatacgcatacgcaggcggaaacgaccgaggcggagcaggtatgtgattttgtgcgggaacatgcggatgtcggtattggggtcatagagccggttacccatgaagaattgctcgacacatttctgatcgattgtgataatgtgcgcaatatcggtattgccgggggctggtattttgccttgacgcaggggaatatcaaaaagtatggtttgtggagtgagggcgaagtagccaagtatgccggctacggggcaccgcagacgctggattatattttggtgtcaaatgatgcctataccatagaggaaactgatgctatgacgcaggtggcggagtatccgaatctgggctatacgctctacaagttaaaggatcctacgcatttgccggtcatgtatggtgggacggtagaatagatacgatctataccagatatgagataggagaggtatcgtaatgacaagaaatgaagcagaagagattttaaaagaacacggacaagaacatgtcctcagacattttgatgacttatccgcggaggcacaggaggaacttctgacccagatctccgaggtgaattgggacgatctggcactggcaggtgtgcaggaaaaggttccggtaggagagatttctccgctcagtgccgtggatattgatgagatcaatgcgcgccgtgcagagttcgaggaagcaggttatgaggcaatccgggcaggcaaggttgcagcgcttttactggcaggcggtatgggaacgcgtctggggctggacaagccaaagggcgagttaaatgtgggcatcaaccgtactttgtacttatttgaaagcctcatccacaatctgatggatgtgacaagtgttgccggtaagagtattccgctttacatcatgaccagtgagaagaacaatgacgagacgatccgctttttcgaggaacacgactatttcggttatccgaaagaggatgtcgccttcttcgtacaggagatggcagcggctgtcgactatgatggcaagttgttattagaggagccgggacgtctggcaacatcaccaaacggtaatggcggctggttctcatctttgaaaaaggctggattgctggaagatgtacataagcgtggggtagcatggatcaacattttcgcggtagataatgtcttgcagcgcatctgtgatcctgcttttgtcggagcaaccattctcagtggcaaggtcagcggcagcaaggtggtccgcaaggtagacgcttatgagaagatgggagttctctgtctggaggatggaaagccatctgttgtggaatactatgaaatgagcaaggaaatggcagagagcaccgatgaaaagggagatctgctctatgcttttggagtgatcttaaattacattttccgtgtagataagttggaagagatcgtgggacgccatcttccggtacatgtggtggagaaaaagatcccatatattgacgaggcgggcaatctgatcaaaccggagtcaccaaatggttacaagtttgaaacactggttgtagatatgatccgtatgatggatgacaatctgccttatgaggtcgtcagagaaaaggaattcgcaccgatcaagaatttacatggtgtggactccctggattcagcaagagaattattggagaggaatggagtagagttatgatgaaagttttcatctgtccggaatgtggatggattcgcacagtatcacgcagaaaagaagttgaatgtcacaaatgcagtggcgtgcagatgctgccatcccgtctgacctttgtagaatactcacagatgagcgacgaacagcgcgaagattacgcgcagtcttggttgtttatccacggcaaggcaaaggcataagagatttttacacgacagagaaaacacgcagggagcatgaaagcatccttgtagggagttatgggcgtacaggaggcatgaatgtaccgagacgaaaaacgtagttggatgaagcatctggattttacgatcttagatatgctcatgatggagttggcgctcattttggcgtatggctggcgctttgagcatgcatggctttttaatcacgaattatatgtgcgtattgcggtgatcgcgcttttgatcgatgtgtgtgtggtctttttttcagaggcatacacgggtatcctgcggcgaaacaagtatcaggaattacgctcgactgtgacgcattgcgccgtggtctggggcggtgttctggtatatatgtatgcgacaaagacctctgttgagtattccagacagatgctctttgtctttttgggactctttatcatcctgtcctattttagcagggtggtcttaaaaagagtcatccgcaagcgcaagttggaagatcagaataaggcatggatgctggttgtggcagatatgcatacggtagaacagtgcttaaatgagatcgcacacgacaagtacacggattttaaggtgtcaggtgtcgttgttattgataaagatatgcgggggcagacgatacaggggatcccggtcgttgccagtgcggatacttttatggagtatctgcggaccaatgtggtggacgaggtctttatcaacggcaataccagatcttcgtctgaggcacttgcggcagagatggtggaacttggcatcacggcacacatcagcctgatcaataccaagcagatggttccaaaccgtcgtattgaaaattatggaagcttcattgtcctgacatccagcatgcacattgccaatgccagacaattatttgtaaaacgcctgatggatattgcaggcggtattgtgggtctggcactgacggcgatcgcttttgttatctttgcacctattatcaagatccagtcaccgggaccggtctttttcaaacaggtgaggatcggcaagaatggcagacgcttcaatttctacaagttccgttccatgtatgtagatgcagaggagcgcaaggcagaattgatgaaagataacgagatgagcggcaatatgttcaagatggaaaatgatccgcgtatcataccgatcggtcattttatgcgaaagtattccattgacgaactgccgcagttctggaatgtcctaaaaggcgatatgagtctggtgggtacgcgtccgccgacagaagatgaatttttaaactatgaatatcaccacaaggcaagactggggatcaaaccggggctgactggtatgtggcaggtcagcggacgaagcgacattacggattttgaagatgtggtcgcattagacacccagtatatttccaactggtccttgggactggatatcatgttgttatttaagaccattggtgttgtacttacgggaaagggatcaaaataatggagatgccgggaatttcagtcattgtttggctgcatgaaacgaaagaagcatattttcgtgatctgctggaatcactggtttcccagacctatgacagatgggaactttatgtgttggatcagaatccggcctatggtttttcttccatggtagccgaatttttcccagaagatgaccgggcacattacagacaattaaagaattctaaggggagagcctatgcgtataacataggctctcattatgtgatggcagactttggcaaaaaaggacgtgacctggaaggtaactacattttctttgtaggacagcacgatagactacagccggatgcccttttgcagatcgccggcgcatacaaccgctttatgcaaaagcaggagaaagcaccggagctgatctatatggatcacgatatgctggtaggacaggatcgcatggaaccgcattttaaaccggaactgaacatggaacttttgcggcattgcaattatattgggcagcatttcctggtttcctgttcggcggcatatgccttgggcgagtttcgccagcaattgtcttatgcctgtgtctacgaatatctgctccggctggtggaaatggggggagcaagtcttcggattcctatgcttttatatcatgagagaatgcgggaaaaactactgcggaaagaggaaaaagtctggcagaaacgttttgcggcagaacacatccttgcggtagaagcatctttgcgacggcagggtatcctgctggacggttcgatcacgccggcagccggtggagcatggtggcagattccttacgatggcaagggtgtggcgacacagcagcgggactatatgtttttgcatgagccatcggtgcgtgccctgacacggtcgaatttgcagaaaatgtacgggcatttgtgccggaaggatgttgctgttgtgggagtacgctttttaaaaggcggatttgccatggaaaactgtggctttttatttgatgcgcagggagatatctacccggcattttacgatacgaagatctatcagacgacatacgataatctggcaggcattccgcgggaggtcagtatggtcgatttccgctattgcatgatcgatgccaaggtttatcgaaaactgggaggactggatccaaaactttccggcagagaccagatgctggatttctgcctgcgtgcaaaaaaagcaggctatcgtacgatcgtagatccggggatcattgtcaaaagtcccggcaaacaggatgagagcagtcgggtttcgcatgaagcaatgctggaaaaatgggcagatctgctggcagagggagatccttactataatccaaatctgccgatgggattactcaattatcgcctggatgcgatcggatccgaagaggagagactggcatagcatctgtgaataatgagtggtatttcttgacgacaaacttgttatggtataaaattctagtttgatatgtgcaattttgtaaagaggattccacaagggagaataaaatggcaaaaaaagagatatacaatatagaaatgccgcaggagacatccgacagaaggcgcagtagtggcagccgtggtggcagccgtggtggctcacgccgcgaccatgaggaagaggtgcgtggcaaaggcaagaagggtaaaaaaatgacccgcagccagaaacggagaaagagaagaaagacaatcctcatcattgaggtaattgttttacttttgctcttggcaggtcttttcctttggttaaaggtcggtctgatcaactgggatgatctgaagaacttaaagacaaataatctggatgaagaaacacaggatcttttggatgactatacgacgattgccctgtttggtgtggacaaccgtgcgaccggtaattatgattccggtaacagtgacagcatcatgatctgcagcattaacaacaacaccaaggaagtaaaactggtatctgtttaccgtgatacctgtctggatgtggatggtgatgagacattccgtaaatgtaattatgcatacaatcatggcggaccgcaggaagccattgagatgctcaaccgcaacctggatctgaacattcaaaaatatgtatccgttgacttctatgcactggctgaggcggtagatgccttgggcggcattgaattggacatcacggatgaagaagcatcttatatgaacggtgtcggcggctacatcgcaatgaccgctgagatcaccggacgaaagggcggcaatgtatccgttggtcatcagacggtcaatggtgtgcaggcagttgcctattgccgtatccgttataccgcaggcggtgacttcggtcgtgcggagagacagagaaccgtcttagagcagatggtggcaaaattagatggcgcaagcctgagtgaactgaacaatctggtagatgccgtatttgatgatatcggcaccaactttaccatgacacagatcatttccatggcaacatccatgaaagattatcagttggcaggaaccgcaggattcccatttgctaagcgaacaggtaactttggttcgcagggaagtctggtcgtaccgtgtacactggaatccaatgtaaaatatctgcatgcatatctgtttggaaatgaggatgcacagttgtctgatgaactggtcaagatcagtgatgatatcgtaaacttcaccggttacacgcaggatgatgcgttggattacggcttctaaatctatagaaaaaaatccgagggaattgccctcggatttttgcgttcctaaagaatgcggattggatgggcgcgtgtgtacagctggggctgaaccaagggggaggcaggggaggatgtatttgagtaaaaattcgtcgtatctctgaaagagactgtttgtttgaaaatgaactgtctcttgcacagcttcgacaggcgctgggaagtgtccgtcagtgacagatattcaggggcgcatctctaatacgctttgcattcatatctgccactggcgaacactatcccgaagcctgtctaactttgcaaagacagttctaaaagataaaaacaaatagtctctttctagagatacagaattttatgacacatcctcccctgcctcccccttggttcagccccagccgtacacgtgcccatccaatccgccgcttcacaagacttcaaaaaatgtcctatctttcatcacaaagttatcacatttaacccctacactaagtgacataagcaaggaaccgaaaggagacgatacaaatgagcgagttcgatcagaatacacaaggcgagaacacgcagaataataatggagaacaggcgagttccgtttattcttatagttactctgacatcaatcagggagaaaatgctacagcagatcagcagaaccggcagacctatacgagcggtgcagggacaggctatcagcagaatgcttatcaagaccagaatacctacaattacaatccctatggcggacagaatgcaggtggtcatgagaagcatcatagaaatggcaatggcaagatcaaacaattcttttccaagggcaactttggcaataagttgctgaaggtcgttgcaatagcccttgtctttggtttggtagcaggcggcacctttagcggtgtgacctacgcagtcagcaagaagactggtgtagatctgacagcggcaacagcaaagacactgacgaccaatgacagtgtggacagtaccgcagtttctacggcaacgacggtatccgatgtttccgacattgtagaaaatgttatgccggcgattgtggcagttaccaatatttcctatacggaatatcgcagcatgtttgggcagaccaagacctacgagagtgaatccgcaggatccggtatcattgtcagtcaggataatgattatctttacattgcaaccaacaatcatgtagtatccggtgcagaatcactgacgatcaccttcaacgatggcagtgcagccccggcaaccataaagggaacagattcttctgtagaccttgcagtcgtagcagttgcgctttctgatgtggaagacagcactatggatgcgatcaaggtggcaacacttggcaattccgatcaggcacaggttggtgaatcctctgttgttatcggtaatgcacttggctatggacagtctgttactaccggtgttatcagtgcactcagccgtgaagttcagttagaggatgagtccggcaacacggtcaccagtaccctgatgcagaccgatgcagccgtaaaccctggtaacagtggtggagcacttctgaatatgaaaggcgaggtcatcggcattgtttctgcaaaatattcagataccaaggtcgagggcatgggctatgccatcccaatctctactgcaaaggatatcatcgagaccatcatcaaccaggaagtagtttccgatgatgaagcatcttactttggcatttcaggtgtggacgttgccagcgatgtatcaaagcagtatgatatgccgaccggtgtgtatgtcacaaaggtagcggccaacagcgcagcaagcaaggctggcatccagaaaggcgacatcattgtatctttcaatggcagagaagtaagttctatggatgagatatccaatgtgatgcagtatttgaaggcaggtaccaaggtggacgttgttgtggcacaggcatccaacaactatgaagaaaagaccatggaagtcacgcttaccaagaaaaaataaggcaggaagaatatgggaggggcgaaaatttctgataaagagattttcgctctttttttgcttgttgcaggcaggctattatgataatatttaacttggtaaagaagtgttattttctttacgaacagtaggatggaggtctagcagatggagaagaaaagaatcgtaattgcattaggtcatgatgctttggggacaacacttccggagcagcagaaggcattggtcaagactgcaaaggcagtggctgaatttatcaaacaggattatcaggtggttatcacccatagcaatggcccacaggtcagtatgatacatacggctatgtctgagttttgcagattatacccggaatacaccgcgacaccgatgtcggtatgttctgcgatgagtcagggatatatcggatatgacttacagaatgcgattcgtagtgaacttctgacccatggaatatacaagacggtttctaccgttctgacgcaggtcatggtagatccttatgatgaagctttttacaaaccgagcaaggtgatcgggcgtgtgatgagcgaggcagaggctgcggaagaagaaaagaaaggcaaccatgtcgttgctgttgaagacggctatcgacgtatcgtggcaacaccaaagccaatggatatcgtggagatcgatgcgatcaaggcactttgcgatgcaggacaggtcgtgatcgcctgcggtggtggcggtatcccggtattgcagcaagataaccacttaaagggcgcaagcgcagtcattgaaaaagatacaattgccggacaactggcagatcagttggatgctgatatgcttgttatcttgaccggtgtagataaggtgtgtctgggctttggcacagatcatgagaaacctctggactatatgagcattcaggatgcgaaaaactacatggcagccggtgagtttgaggaaggcacaatgcttccaaagatccaggcggcagtagattacattggagattctgcgatccgcaaggtgctgatcacaaaactctccgcagaagatgctgcgattggtggcgagaatggcaccatgatcggcaaataagaattgagaatagggataggaaaaggaaatggaacaggtcagaaagacaaagattatttgtacaatgggtccttccacagaaaaggaaggcgtactggaaaagttgatgttggcaggtatgaacgttgcccgttttaacttttcacacggagatcacgaggaacagatgggacgtttgaccaaactgcgtgcaacacgagagaaattaggcttgccggtagcggcacttttggataccaagggaccggagatccgtctccgcgagttcgcagaaggcaaggttatgttagaggcaggacagacctttacgctgacgacagatgagatcatgggtgatgagaaccgtgtctctgtcagttacaaagatctgccaaaggatgtagcaccggggacacatattttgatcgatgatggtctgatcgaaatgacagttacggatgttactgataccgatattatctgtaaagtcatcaacggtggtaaggtgtccaataaaaagggtgtcaatgtaccaaatgtggaactgtctatggattatgtcagcccgaaggactacaaggatatcgtatttgcagtaaaggaagactttgattttatcgctgcttcctttgttagaaccgcagcagatgtcaaggaattacgtgatattttacatgagcatggcggcgacgacatcaagatcattgccaagatcgagaaccatcagggaatccagaatatcgacgagatcattgaagcagccgatggtatcatggttgcccgtggtgacatgggtgttgagattccgattgaggaagtgccgatcatccagaagatgatcattaaaaaggcatatcatgccggtaaagtggttgttacagcgacacagatgcttgactctatgatgagccatccaagaccaaccagagcagaggcgaccgatgttgccaatgcgatctatgacggtacaagtgccatcatgctttccggtgagactgctgccggtgattatccggtggaggcagtcgagactatggtgcgtatcgcactgcgtacagaggcggacatcaattatatttcaagactgcgtgcccgcaagaccaatgaaaagccaagcattactgatgcgatctcgcatactgcttgtctgatggctggcgacttgaatgcgaccagtatcgtgacggtcaccaagtccggacgaactgcccgcatgatctccaagtatcgtccgcagagcccgatcatcggtggctgtatgtcagataaggtctgccgccagttaaatctttcctggggcgtcattcctctgaaagtcgaggaaaagcaggatgcagatgaacttttcgatcatgcacttgagcgctctaaggaagctggtttaatccaggaaggagataccgtggttcttaccgctggagtgccactgggaatcgcaggtacgacgaaccttttgaaagcgcatatagtgtaagaagcatacacggatcatctgtacagttttgtaaacccttgtggggacgcttttcattgctgacaagggaatataatagtgaagaaaccggtataaaatgtgcggttgctatagagcaattgcagggctttcgaggagcgtcggcacttaatgagtgctttgcacgaatttagtgtccgctacgtgacgcagagagcggaagcgtccctgcaatgttctatgcaactgcacatatttttgtacctaaactatatttatcaggaggaacaaaattatgccttgtactacaattttagttggaaaaaatgcatcatatgatggctcgaccatgatcgcccgcaacgacgattccggttccggtcattttactccaaagaaatttattgccatggatccggcaaaacagccaaaggtatatacttcggaactttcccatgtaaagattcaacttccggaagatccgatgcgctatactgccgtaccaaatgccttgaagggcgagggtatctgggcagcctgcggtgtcaatgaggcacatgttgccatgacggcaacagagacgatcacttccaacccgcgtgtcctgggagcagatcctctggtcgtttatcaggaaaagactgaggatactgaggagattgtcggaggtatcggcgaagaagatatcgtctacattgtacttccttatatccgtagtgccagagaaggtgtcaaacgtcttggctctttgctggagcagtacggcacctatgagatgaacggcatcgctttccaggatctggatgagatctggtggctggagacgatcggcggacatcattggatcgccagacgtgtgccggatgatgcttatgtcgttatgccaaatcagttaggcattgactattttgatattgaggatggtttgggtcagcagaaagattttatgtgttctgcggatctggcagaatttatcgagaaaaatcatctggatctttctctggacggcgattttaatccaagagatgcttttggcagccatgatgattctgaccatgtgtataatacgcctcgtgcatggtatatggagcgttatctgaatccgaattctgccaagtgggatggaccggatgcagactttacaccgttttcagatgatatcccatggtgcgtggtaccggagaaaaaggtcacggtagaggatgtcaaatatgtgctttctgcgcatttccaggggacaccttatgatccttatgcagcctacggcgacaaatccctggctggtgcgtatcgttctatcggcatcaaccgcaatgactttttatctgtcgtacagatgcgcccatatgcgacggaggatcagcgcgtcatccagtggattgcctttgcttccaatgcctttaatgtactggtgccgttctacgcagatgtgacagaaacaccggcatatatgtccaatacgaccaaggaggtttcgaccgacaacttctattggaacagccgcatgatcgcagccatggcagatgcttcttatggaaagtctattttccatatcgaaagatatcaggaaaaagtggcagcaaagggacatgagttgattggcagatacgatgccttgatcgaaaaagagcaggatgcggcaaaacgtcgtcagttgcgccatgaagcaaatcaggcgatcgcggatatgctgcagaaagaaacggcagacacactggataaggttctttatgaactgagcaatcagatgaaaaatgcctattccagatcggatgcataaaagcaaaagtcaggtcataagataaaccaagtaaggtcttggggaaacatatggctgattatcaaaaacataaaaacaataaaatcagagcaggcctggtcgtactgggtctgctctgtcttagtatagggctgatcggacaatatcagaccaatgcgctgacaacatcggcgagcgttggcggcagggaactgcccatctactgtgtcgatacggacgaaaagaaggtggcattgtcctttgatgcggcatggggaaatgaggatacggcgcggatactagagattttgaaaaagaatgatgtgcatgtgaccttttttatgaccggaggctgggtcgagtcctacccagatgatgtaaaagccatctatgaagcggggcatgatctgggaaaccatagtgaaaatcataagaatatgtcacaactgtctgtggaagaatgtaaatcggaattgcagcaggtgcatgacaaggtcaaagagatcaccggctatgatatgtttttgttccgtccgccttatggcgattatgacaatgaggtcatcacgacggcgcgtgagatgggctattaccccatccaatgggatgttgacagtctggattggaaaaattacggggtatcttccatcgtgcagacagtcacagagcacaagcatctgggaaatggatctattatcctgatgcacaatggtgcgacctatacggcagatgccctagaaacggtcatcaattccttgcgcgaccagggctatgagatcgtgccgatctcggaactcatccaccgcgacaattaccatatggatcacgagggaaggcagattagcgagcagacggaaaaataaaacagttttgttaaaaaatatttttatttgctttggcttgaaagagcataagttgatacatttcttccggtgtctccggacatccgtcttccagccacatgcgtatcatggcagttagcccggtgtagtaaaagatagcacaataattcgcctgacgcgcagaagtgatgccatggcgggcagcatatttttgaatgccctctgtatgtttgaaggtggcaacaacagacagaaatggtaactgtgatacccgtgtgatatagacctgataaaaggagcggtacttcaaaatatgttcaaagagcgatagtatggaagcatggtggagttcgccctgtgagtccatctttcgaaagtttgcacagtcctcatcccgcagttcgagaaaaagccgttgggctacagcatcaaaaaaatgattcatatcgccaaaatgagaataaaaagtggcgcgtgtaatgccggctttctgacagagcagggaaatggagatgttgtcaaaatcatgcgtttctaacaagtctaaaaaagtagcgcagatgtgagcatctgtttcctgaaattttctgttgtttttcgtgttcatctataatcctcttatcttaaatttgatcaatccgctatctcgcaaggagatagccataaacttatgatgacatcatagcacggattttgcaaaaatggcattaaatttcggaaagtgtgcgaagttttttgttgtgatgcaaggcgaaaatcagcgccagcccaagggcaataaaggtcgcaagcggctgcgcccacacgataccatggaatccgtaaagggaatccagaaggtaaagtgccgggataaagatcacgccctgccgcagaagagatacaaaaagcgcataggatggcttctcggttgattgcaaaaaggtggtacaaagttggtagagaccgataaaaggtccggaaagtgtgccaatgctgatcacgtagacaccaagcggaatgatcgtcgtatcatccaaaaatgccttgacaagagtagtggaaaaaccacggcacaaaagcgtgagcgcaagaccgagaataacggttacaagggaagtttttaagatcgtctcgcgcatacgtttccaatttcttgcaccgtaactgtaggcgatgatcggctggacacccatagcaacgccgatttgcagcatgccaatgatcatggtggcacgtccggcaacggataaggcggctacataatgatcgccgtgtgcgaccagaagattgttttcaaaaatgccggagatactgttgagcagcgtactgacaccggagggaagaccgatggcaagcacaccggtcgcaacgccttgccccagtgtaaaatcgtgcagatgaatggttacgtgtttacattttcttatgatgaaaacgatatagtaaatactactgctggcggtgccgatcaaggttgcgatggcagcacccggaactcccatgccaagcacaagaataaagataggatccaaaatgatgtttaatatggttcccaaaaggtttccgaccatagcagatacagaggcaccttcacaacggatgatctgaccggtcgcagtatttagcatggtaagcggtgcacccagcatgatcagactaaggtaggaggctgcgtagcctctggtattagcactggtgccgatcagatccagaatgggggtctggaatatgagaacgatggcggtaaaaacagcgccgatgaagatggaaaaataaaaagaaaaactggagtagtgtgctaccttggagtcatctccgcgtcccatggcaacggaaatgcaggaagaagcaccggtgccgatcatactgccaagtgcagataagagtgtggtgatcggcatgcaaagggaaagccctgtgaccttgtaggggtcctttaactgtccgataaagtagatgtctgccatgttatagatgaccatgatcagaatggtgataaccgctggcagacacattttgaccatgagtttccagatagattcctttgcaaaaatgtccggattgagtctttgttctttcttcatgtaaaaacctcctattagttaaacaactgtataaataattataagcatttttccaagaagtgcaatagaaaatggaaaaatcatataggaaaccgcttactggaccggaaaatttatgaattttttataaagtcagttggttgacactcgtgttagactgtgctaacatatcagtgtcgttagaaagtgctaaccattgttgctcacatggaacaggcattttcttttttgaccgtgagttagcggatactaacaaaagttttatttgtgcacaaaatgaggaaggtgagtaagatgatgcctttggctatggcaaacaaaggagaagagcaactgatcaaaaaggtcggtggcaaagaagaaacgagattgtttctggaaaaattaggatttgtgccgggatccaaagtcagcgtcgtttcggaggcagatggcaatgtgatcatcaatgtcaaagattcgcgtgtggcgatcggaaaagaaatggcacttaagatcatggtttaaatggtacgcgtaagacgtgctttttaaataaaggaaaaagaatggcaaaggaaaggaagtcacaagatgaaaacattacgtgatgtgaaggtaggccagtccgcagtcgttacaaaattaaacggagagggcgctaccaagagaagaattatggatatgggtatcacaaagggcgtagaagtatatgtgcgcaaggtcgcaccacttggtgatccgattgaagttactgtaagaggatacgaactgtctcttcgcaaagaagatgcagccatgattgatgtgaaggaggactaaaaggtgggagtacgtattgcattagcaggtaatccgaactgtggtaagaccacattgttcaatgccctgaccggagccaaccagtttgtaggaaactggccgggcgttacggtagaaaagaaagaaggaaaatacaaaggagataaggaagttaccatcactgacttaccgggtatttattctttgtccccttatacattggaggaagtcgttgcaagaaattatctgatcgacgagcatccggatgccattttaaatatcgttgatggtaccaacttggaaagaaacctctacctgacaacacagttggtagaacttggaatcccggttgttgttgcgatcaacatgatcgacgttgttgccaagaatggcgaccagatcaattccaagagacttgccgaagaactgggtgttgaggttgtagagatctccgcattaaagggtaccggtgtagaggatgcagcagcaagagccatcgccgctacttctaagaagtctcagaaggctaagcattctttcaatggttctgtagagcatgcatttgctcatatcgaagaactttgcttacataacattgatgatgagaatctgcagcgttggtatgcgatcaagttatttgagcgtgataccaaggtacaggaaaagttaggattatcacaggatatcatcgcacatatcgaaaaagatattgtttcctgtgaagaagaactggatgatgatgcagaatccatcatcacaggtgagagatacaactacattggaagcattatcaatgattgtatcaagaaggcacatgcgggcgcccttaccacttcagataagatcgaccgtatcgtgaccaaccgtattcttggtctgccgatctttgcagcagttatgtggcttgtctattatgtatctatcacaaccgttggtggattcctgactgactggaccaatgatgtactctttggcgagatcattcctccggcaattgagaacttcttagtttctatcaattgtgctgactggttgcagggattgatcttggacggtattgttgccggtgttggtgcagttcttggattcgttccgcagatgttagttctcttcatcttcctgggattcctggagggatgtggatacatggcgcgtgttgctttcgttatggacagaatcttccgtaagtttggtctctccggaaagtccttcattccgatgctgatcggtaccggatgtggtgttcctggaatcatggctagtagaacgatcgaaaatgaccgtgaccgtaagatgactatcatgacaacaacctttatcccatgtggagcaaagttgccgatcatcgctttgatcgcaggtgctttcttcgataacgcaggatgggtttcatggagtgcatatttcgtaggtatggcagcaattatttgttccggtatcatcttgaagaagacaaagatgttctccggcgatcctgctccattcgttatggaacttcctgcttaccactggccaaccgttggcagtgtacttcgtagtatgtgggagcgtggctggtccttcatcaagaaggctggtaccatcatcctcttatccaccatcgtactctggttcctgatgagtttcggatgggcaaatggttccttcggaatgctcgaggcagagcagttggatgcaagtattcttgctaagatcggcactgcgatcgcatggatctttgcaccgcttggatggacacaggcaggtcagggctggaagatggcagttgcagccgtatctggtttgatcgcaaaagaaaacgttgttgctacctttggtatgctttatggatttgcagaagttgcagaagatggttccgaggtatggggcaatctggcacaggttatgacaccgatcgccgcttatggctatctggtattcaaccttctctgtgcaccatgtttcgcagcaatgggtgctatcaagagagagatgaacaatccaaagtggttctggtttgcaatcggatatcagtgtatacttgcttacatcgtagcaatgtgcatctaccagatcggaacactctttacggctggtgtctttgggtttggaaccgttgtagcatttatctttgtgatcggctttatctatctgctcttccgcaaggataagtatgcagcaatcaataaataaaaatgtggctcttttgagccggtttcgaggtgaatgatatgggaacaataattgtattacttgtattgatcgctattgtttcagcaatcttatacagtttgatcaaaaagaaaaaatccgggaaaggcttatgctccggtgactgtggatcgtgcggcggttgtagttcttgtgctccaccggaaaagaaatataaataaaatgtgtgaaaatgccagagggttttgcccgctggcatttttcgttgttggaaataggggcgagccggaagcaagcagaagtgggcaggaccgaaggggcggggaagaacgcgtcgtgaaattctgtatctctagaaagaggctgtttgtttttatttataagaactgtctttgcaaagttaaacaggctctgggatagtgttcgtcggtggcagatatgaatgcaaagcgtattagaggtgctttgaacttgttattaccaggtaatgagggtacacggatgtacccgaaaggagcaaccaaacaggacgtttgtttgctccggttaccacaattttttgtaggtctaatgacaagttcttagcacctcttatgcgcggcgcccctgaatatctgccaccgatggacatatcccgccgcctgtcgaagctgtgcaaagacagttcaatttcaaacaagcagcctctttcagaaatacgacgaatttacactccaatacattcttccccgccccttcggtcctgcccacttctacctgcttccggctcgccccagtacataacggaaagaaagcagtagacgaaagcgcatcctatgcattatgataagaagtagcaaagataaggagtaaaaagatgacaggacagatcaaattttccgtggtgatctcggcatacaatgtagaagaatatctgccgggattgttgcaggatcttttggaacagacctataacaactttgaggtgatcctggtagatgactgtgctacagatcagacgggagcggtcgcggagtcttacttacaggcatttcgcggcaagcaggcagactatgtcgtgatccataagccggagaacgaggggcttagtatggcgcgcaataccgggatctctcatgctgccggagactatattctgtttctggatgcggatgatggcgtggaaaagacccttttggaaaggctctatcatgctttggacgagcagccggcggatatggtcgtctttggctacaccgaggactactatcaaaaaaataccttgtcctatcaggtgcagaagacaccggaattatattatttttcagatcatatccatgatggcgcacaggggtggaaaagaccgcttgcctatgcctatccttatatcatagaactggagcatgagactatgtttggctatgcatggaataaggcataccggctttctttcttacaggaacagaagttgcagtttcagaatatcgtccatattgaggacattttatttaatgtgcaggcagcaggagcattgcaaagtcttttgacgttgccggatgtcttgtaccattatgccaatcgcggacagagccgcctgacggacaagtatctgccggaatattttgccctgcaaaagaccagagtacaggcattccttaatatgcagatgcgaaagatccagacggtgaccgagggcatgaccaaaggagagacaggcggtttggaaaatctggacgttggagcatggcgcatgcgcctgcatgaagtcatggctggggtatatttccggtctttccagtcatccatggtcagaggcatacagcacggcgacagcaagcgcgaggtcatggcaagggcaagggctgaactggaaggtcctttgtatggcagactgcgccgccacttatcggaggatgggcgcgtggcaaagatcctttatgccccattggtgcggggagatatcagcggagcctatcgcagagccaaggagatcgcctgggcgaaagaacatatggcgggagcctatgtaaagttaaaacagaatcggtaaaaagaaagaaactgacgcggaatacttactttccggtcagtttctttttgtaaggagtatgaaaaaaagttgcgttatattttgccacgcatcagataatccatgatgcgcttggagtcatctgcttcatgggcgatgatctccatttccgggatagcggaactggaagaaaaaatggtcgtcagggaaataagttgacacaattttgactttaagttcaaacggtcgccatctgcggtgacgagttctacctgtccttcacaggcatcaatgacttttaaaaattcttccgggttttcaatattcattactttcataaacggcggctccttttgtctgtatttgccaaaggatatgtactttggcaggctttctggcatcatcatacaacatgcaaaaaagcagtgtcaacgaaattgaaaatattaccctatcttcataaaaaaatgaaaagacaggatctggactttgacataagataatcagtaagagagtaatgattacgctaaaatagcgagatataggaaaggagcagacatgttagaaaagaagaattatcagttttggttttgcaccggatcacaggatttgtacggagaggagtgcctggcacatgtggcagaacattcaaagatcatcgttgaggctttgaacagatccggcaacctgccatacgaggtcatctggaagccgaccatgatcacaaatgaagtgatccgcagaacttttaacgaagcaaatacggatgagaattgcgcaggtatcattacctggatgcatacgttttctccggcaaaatcatggatcctgggcttacaggaattgcgcaaaccacttttgcatttacatacccagttcaaccgggagatcccatatgacaccatcgacatggactttatgaatgagaaccaatccgcgcacggtgatcgtgaatatggtcatatcttcagccgtcttggcatggagcgcaaggtcatcgccggctattgggaagatgcggatgtccagaaggagatcggcgcatggatgtgtacggcagtgggcgtgatcgagagcagccatgtccgcgtgatgcgtgtggctgataatatgcgaaatgttgctgttaccgagggcgacaaggtcgaggcacagatcaagttcggctgggaagtagatgcctatccggtcaatgagatcgtagaagccgtgaatgccgtatcacaggcagatattgatactttggtagaggaatattacagcaagtatgacatcctgcttgagggcagagacgaaaaagaattccgtcagcatgtagcagtgcaggcgggcatagagatcggttttgagcgtttcctggaagagagaaattatcaggcgatcgttacacacttcggagatctgggcggactcaaacagttgccgggacttgccatccagcgtctgatggaaaaaggctatggatttggtgctgagggtgactggaagaccgcggctatggtgcgtgtcatgaagatcatgacccagggagtcaaagatgccaagggaacatcttttatggaggactacacatacaatctggtaccgggtaaggaaggcgttctggaagcacatatgctggaggtttgtccgacgatcgcggacggcaggatcgcaatcaaggagcagccactgagtatgggcgagcgtgaggatccggcaagactggtatttacatcaaagaccggacctgctattgcaacatcactggttgatcttggcgaccgcttccgtctgatcatcaacgatgtggattgcaaaaagacagaaaaaccaatgccaaaacttccggttgcaactgcattctggacaccgcagccaaatctcaaagttggcaccgaggcctggattctggcaggaggtgcacatcatactgccttctcctatgatctgagcgcagagcagatgggggattgggctgccaatatgggcattgaggcagtttatattgataaggacaccaacatccgtcagtttaagaatgaaatgaactggaattctatttattacagaaaataaaacaaacatgtgtaatttccatcccggtgtgttatactgtgcttagttgtttttggaggtaggtaaaatgacagagatggggtttttgattttttttgccatactgatcttgtttgttgttatcgttgcagtggttgtggtggtatcggcagtggcaggcgcgagcgcagcggttgccaatacgatcgcagatgacgacgatggcgatgcgtgatggcatgaagatcggaaaaattaaataagtgttttaggaacagccgtcattatttgcagtaatgacggctattttcatatccccttgaacaattcacctgcatagtatgctataatgtaaaaaactatgatttggagaaaattatgcaaacaaagatcatcattgccatgcataagccatacaagataccggcagaatccgtctatctgcccctacaagtgggcgcagagggaaaggacagcatcctaggacttgtgtgtgacaatacaggcgagaatatatcagcaaaaaatccaacttactgcgaactgaccggtctctactgggcttggaaaaatctggatgcagatgccatcggtctggtacattaccgtagatactttacaggaaagagccgctcttatcggaaggcgcatgcaaacgacctgatggattgcgtattgacgacagcagaagccggggatcttatggaggcttatgacatcgtcgtgccgacaaaacgtaagtattatattgaatccctgtattcacactatgcacacacgctggatgccaagcacctggatctggcgcaggagatcattcacagcaaatgcccggaatatgacgcagcatgcaaaaaggtctacgcatcaacctggggatatatgtttaatatgtgcattatgcggcgaacctatctggatgcctactgcaaatggcttttcccgatcctggcagacttagaggatgccatgcaggatgatctgaaaagcatgagcgcctttgaggcgagactctttggacgtgtcagtgagatcctttttaatgtctggctgttaaaagaggaagagagcaaagatgcaccgcgcgtcaaggaagtggcgaccatgcacatggaaccggtcaattggctgaaaaagggcggcgcttttctcaaagcaaagttctttggcagaaaatatggagcaagtttttgatgaaagtaagtattatcactgccttttataagggaaatgcttatatggcagattacaaaaaaatgatccgcgcaaaccagaaaaatctggagagtgcggatgaactggaagccgtgatcataaatgacagtccggaggagagcgttgtcctgccggaagacggtggcgattgcaatatctggatctacgaccagaagcaaaacggcgggatccatgcggcgcgcgtacgcgggctttctctctgcaccggtgactatgtgatctttctggatcaggacgaccgcttgcgggaggatgcagtcgctacctttattgcgactatgaaaaaataccagacggaggcagataaggtgcatgcgacgctggggcaggaattttcccggacaaagatcgcgcagatcatgcgttatccggtactggtctcaaatgctcttatggagcaaaaggacggagaggtcttatggtatcgcacggattaccataaaaagttggtcggtgattacaagacctatcttcgcattggcaaccagatcgtttcaccgggacagtgcctgattccaaaggctatgatccctgctgtctggacacagcatataggaaaaaagaacggatcggacgattatttcctctggttgcttctgctttgccagcggacaccgttttcttttgtagaccagccgctttatgtgcatggttatacggcacagaatttgtctgcggacgccaagaagatggatgactccacctatgagtttattcatgttctggaagaagaaaaggtcatggatcccaaagatatccgacttttgcggcggacgatctcctataaagataagtttcgaggtggcagtgccgggacaaaggcgttttctaccctgcgcaatctagatattttcctgccaaatctgatttttaaatggcggagcaaaacaccctatggatttaaccgggaatgagaaaaaggcagttgatttttcccctgtttccttataagataatatagataagatggtaacataggcaaggagtagatccgcctatgcggaaaggaataatagataaaatgagtaaagaattagcaaagacgtatgacccgagtgggttggaagacagactttacaaaaaatgggaggataatggctattttcacgctgaggtagaccgcagcaagaaaccatttaccatcgtgatgccacctccaaatatcacaggtcagctccacatgggacatgctttagataatactatgcaggacattttgatccgttacaagagaatgcagggatacaatgccctctggcagccggggacagaccatgcagccatcgctacagaggtcaaggtcatcgagcatctgaaaaagcagggcatcaacaaggatgacctgggacgtgacggatttttagacgaatgttggaagtggcgcgaggagtacggcggacgtatcatccgtcagctcaagcgtatgggatcttctgctgactggcagagagaacgttttaccatggatgaaggctgttctaaggcagtcgaggaagtctttgttaaattatataatgagggctatatctataagggcaaccgtatcatcaactggtgtccggtctgccagacctctatttctgatgcagaggtagagcacgtagagcaggcaggacatttctggcatatgaaatacgagatcgttggagagccgggcagatatgtagaatttgctacgacccgtccggagactatgctgggagataccgcagtggctgtcaatccggcagatgatcgttacaaggatatcgtcggcaagaccgttatgcttccgtttatgaaccgtgagattccggttattgcagacgagtatgtagatatggaatttggaaccggtgtcgttaagatcacaccggcacacgacccgaatgactttgaggttggcaagcgtcatgatcttccggtcatcaatatcttaaatgatgatgcgaccatcaatagcaatggtggcgaatttgaaggcatggatcgctatgaggcacgtaaagtcatcgttcagaagatggacgagatgggactgctggttggtattgaagatcatgtccacaatgtcggtacccatgacagatgtaagacgacggttgagcctatggtaaagccgcagtggttcgttgccatggaagaattggcaaagccggcggttgaggcgatcaagacaggcgaattgcagttcgtgccaaagaattatgataagacttatttgcactggttggataatatccgcgactggtgtatttccagacagttgtggtggggacatcgtatcccggcatactactgccaggattgtggagagactgtggttgcacgcgcatccgaagcaccgaccaagtgtccgaagtgtggcggcgtacacatgaaacaggacgaagacacgctggatacctggttctcatctgctctatggccattttcaactctgggctggccggataagaccgaagatctggattatttctatccgaccgatgtacttgtgaccggatatgacattatcttcttctgggttgtccgcatggtattttccggttacgcacacacaggcaagtcacctttccatacggtattgatccatggactcgtgcgcgactcacagggacgcaagatgagcaagtctttgggcaatggtatcgatcctctggaagtcattgataaatacggcgcagacgccctgcgtctgaccttgattaccggtaatgcaccgggcaatgatatgcgtttctattgggagcgtgtagagcagagccgcaattttgcaaataaggtatggaatgcatcacgtttcatcctgatgaacttagaaggtgtagaactgacccagccagaggaagcagatcttgccgttgcagataagtggatcctttcacaggtcaatacactggcaaaagatgtgaccgagaatatggacaagtacgaactgggtattgcggtacaaaaggtctacaactttatctgggatgagttctgtgactggtacattgagatcgttaagcctcgtatgtatcgcaaggatcaggatatggtatctgcaaatgctgcactttggactttaaagaccgtccttaccgatgctctgaaacttttgcatccgttcatgccgtttatcacagaagagatcttctgcaccttgcatccggaggaggagaccattatgctgaccgactggccggtatatgatgagaaccgtcattatccaaaggaagaggctatgattgacagagccaaagatgtcgttcgtggtatgcgaaatctccgtaccgatatggaggtaccgccaagtcgcaaggcaaagattatcatcacatcggatgatgcggcagtgcgggggatctttaccgagatcacagagtcttatcagacacttgccggtgctagtgaggtatgcgtacaggcaggtacagagggcgtaccggaagatgccgtttcggttgttatcccggatgcggtcatgtatattccactcgaggatttggtagattttgagaaggaaaaggaaagactgaccaaggaaaaagaaaaactggaaaaggaacttgcgcgaagcaagggcatgctttccaatgagaagttcctgaataaggctccggcagaaaaggtggctgaggagcgcgcgaagatggataaataccagcagatgatggatgatgtgctcgcacgtctggcacagatgaagtaaggcacattattttaaggaggatatgcaatggatgcagcacaagtaaagcagattcttacaaaggtagatcacacattactgcgtgtagacagtaggtgggaggagatacaagaggttttggatgatgcaatgcgttatgagactgcttccgcctgcatacctccttcttttgtagaaagagcagaagcctatgtggatggcagacttccaatctgtacggtcataggatttccaaatggctacgctacgacggctaccaagtgctttgaggcatccgatgctgtggcaaagggcgcaagcgagattgatatggtcgtcaatgtcggttgggtcaaggaaggacgttttgatgacatcttagatgagatcgatcaggtcaaggcagcgtgccagggaagactcttaaaggtcatcatcgagacctgccttttgacagaccaggagatcatttccatgtgtcaggtggtgtccaagtccaaggcagaatatatcaagacctctaccggcttttcaaaagcaggagcaacaagagaaaatgtatctctgatggcatcgcatgtaacagatggcacactggtcaaggcggcaggtggtatcgcatccttggaggatgcagcagattttattgcactgggagcaagcagacttggtaccagccgcgtggtagcggcggtcaaagaagggagtcgtaaatgacaactccgatgaatccatatgccaagaaaccggtcattcgtgttgacaataaggctatgtttgcgacgatccgttttccggctccggctgagggggaaggtgcgcctcagtatgatgtggatacactggagaacatgcttgcacaagaggggatagtctatggaattgataggaatatgctttcctctttgtgccaggagattctttttgatactgaactcatcgttgctgtgggaaaagagcccatggaagggatcaatggctactacgaatatcattttagtcaggatttctccaagaagccgaccatccgaccggatggatctgcggatttccttagtatcaaggtgatcgaggtcgtgcatgagggtgacctgatcgccacttaccatcctgcggtcatgggtatgccgggcatgaatgtgcgtggcaaagagatcgagccgcgcatgatgcgtgatatgccaccgatcggtggacgtggttttcatcgttcggatgacaatctgtactattatgcggatatggatggtaagatcgtcctaaagaacaatcggatcaatatttctcctgtctatgagatcgaccaggatgcggatatgagcattggcaacattgatttcaagggcgatgtggtgattcatggcggtgtcaaaaacggtatccgtattcatgcgacaggatcgatcacagtggatggtctggtggaattgtgcgacctgcgcgccggacaagatatttatcttttgagcggtgtcaagggtggagaacgtaccacgatccatgcagagggtgcgattacggcagagtttattgagtatgccattgtctcctgtaagggaatgttgcacgcggatgtgcttttcaactgtctggtgaattgtgattccaaggtcatcacgaccgcaggcaagcgttctgctatcatcggcggctatgtgacggcggtgcagggcgtatcttccctggtgatcggcaataagtttgggaccgtgacccatgttatggttgggattgacgaggagcgcatcaaggaaatgtcagatcttgcagacaagatccggtctttggatgccaatattgccaagatcaaacaggcgatcgaggattttgaacttctggcacaaaagaagggaatttcctacaaggaagatccgaggcgtatgcagttgctgcgtatccgtatccgcgatgaagcggtggttgcggaagcccgcgtgcgttttgatgaactgaaagccttgatggaggcaggacgaggagcaacggtgcgtgcctatgataccgtatattccggcgtgacggtgcggatcatggatcagtatgcacaactgacggattttcagaagcgtgtggaatttgtcaagaccatgaccggtatccgtatggatccgctcttggatccggttccggatgaatagagcatctgctgacagattttgacggaatgttcacaaagaatcattatgatagatagaagaaagcagtagtttggaggctgaaatgatagattttgaagaagaactgaaaaagtttgagccaagtatggaagtagaagaagcggaagaagagatccagaagcgagatctgacggatctgacggatatccttcggcagatgacagagcaaaagagagggagatagaagcagacatgaaatgttatatgtgtggcacccttgtggatcatgaaaacgtatgccctcattgtggcagtgatttgaagatctatcgcaccattctggcatcgtccaataccttgtataataccggtctggagcaggcgcaggtacgcgatctgtccggtgcgatcgtttctttgaaaaagagtttaaaatacaacaaatacaatacccaggcgagaaatctcctgggactggtatattttgagttgggcgagactgtcatggcgctgagcgagtgggtcatcagtaagaacttagagccggacaatccattggcagaccgctatctcgacgagatccagaatacacctggcatgcttgataagttaaaccagacaaccaagaaatacaaccaggcacttttgtattgcagacagggcagccgcgatctggcgactatccagttgcgcaaggtattgaacctaaatcctaaatttgttgccggacatcagttgctggctcttttgtatattcaggatggcaagtataatgaggcgcgcaaggagttaaatgcaactaacaagatcgatgtgcgaaataccatcacactgcgttattccagagaggtgcgcgagaaattaaaagaactcaaccagaacaaaaagaagcgtaagaaggatgatctggtttcttttcaggatggcaatgataccatcgttatgccgagcaattccttccgggatatgatcgacagcaccagagccagtgtggtcaatattctggtaggactggtcataggacttttgatctgtttctttttggtcatcccgaccattcgccagcgggcttctgagaatgcggcggcatctttggtcgataccaatgaacagttgaccaatagtgcatccaatgtcagcagcctgaaaaagcaggtggaagacctcaacaaagaactggaacaatataccggaaagtcagatgcggtaggctcctatgaaaaactcatggaggcaaaggaggcttacgacgcatccaatctggatcaggcaggggaggcactttcttccgtcaatcgggatctgcttgaagaaaaagggcaggctatgtatgatctgatccatacggcagtctatgccaaggttttggaagatgcctataatacggcttatcaggcataccagagacaggattatcagactgccaaggatagtttcggtcaggtggtatttatcgaccagacctatcataacggtgatgcgcttttttatctggcagagtgtcagtggaatacctgggagtttgacagtgccatagaaaattaccagaaggtcattgagcaatacccggatacatcccatgcaagaacggcgcaggaacgcatagattcctatgcacaatctaatggcgtggatgataatactaccaataactaagagagaatttcatataagaaagcatacaaaagacgtaaggaaaatatttccctacgtctttttctatttcataaacaggaaaaataggaggacaagcagatggaatacaaatttgaaatggggcagggaaaattgcgtgtggtcgtgccaaaggaacttgaccatcatctggcaacccaactcaaagaggaggcggaccttttgatcgagacttatcatgtgaagaccctgatctttgattttaccaatacggagtttatggacagttccgggattggcgttttgatcggcaggagccggaatttgagtttttccggtggacaggtggtggcgaccaatttgagcccgcgtgtggagcagatctttcgcatttccggtctgcaacggctgatcactgttgtgccgtcagatcaggaaaatcaaaaaagtgaggtgtaggcatggaaaatcatatgacagtaacctttgatgcaatctcagaaaatgaggcgttcgcacgcatggtagtttctgcttttatggtgggggcaaatccgactgtgggggagatggatgatgtaaagacagcggtatccgaggcagtgacgaatgccgtgatccatggctatgacaagaaaacaggtaatgtcatgatgcgttgtagcatgaaggaaaatctgctgaccatctgtgtgcaggattttggtaaggggatcttggatatcaaaaaggcaagggaacccttttatacgaccaaaccggaactggagcggtcgggcatgggttttgccttcatggaaacctttatggatagtgtggatgtgatgtcggttctgggagtcggtacgacggttacgatgacgaaatgcttgcaggatcaggtctagtatggatggaatcacggaaagaatcgaacgtgcgcaaagaggagataagggagaaagagacaggctggttgtggataatatgcccctggtatggagcatggtggggcgcttttcatcttccggtaaggataaggaggaattgtttcaaattggcatgatcggactcatgcaggcgatcgatcgttttgacactacatatggcgtacgcttttccacctatgcggttcccctgatcttaggggaaatccgccgttttttgcgggatgacaaccccatcaaggtgtctcggactatcgcagaacacagaaagcagatccagaccctgcagcaggggcaggaagatatttctgtggatcagatcgtagaaaaaacgggattgaccagagaagatgttgtccttgccatggcaagtgccagaccggtcacctccatctatgagactgcctatgattcgggggaaagtcaggtgcttttggtggaccagttggagggaaaggaaaagccgatggaggaggaagtcttggaagaacagatccttgccttggccatgcaggcattatccgcggaggaaaaaaatctgatacaaatgcgcttttttgagaatatgacacagacagagatcgcgggcaggctgggcatgacccaggtacaggtttctcgcagggaaaagaagatcttacagaaaatgcgagagtttatacttttttaataaaaaatttctgattgcgttcttgaatattccagtttgaacctatagaattgagcatatgcaaaatcgtttgattatggaagttttttacataggaaaagagggagaaataaaaagatgaaatggatcaaggagcataagaaagtatgcatcataatcgcgattgtggcggtcgttgtcatcgcgatcatcatcggcgttgtttccggtggtaagaagcagacggatagcaatgaggagacgacgactgtcgagaagcgtacactgatggaaagtgtttcggcgacaggtacttttgtggcggcagatgaggaaaagatcacttccgatacgaccggcgtggaggttttggccgtcaatgtcgaggtgggagatagggttagcgccggagatgtcatagccgttcttgacagtgcagaccttcaggacaatctcgctgatgccaaggagagtttggcggataccaatgagcagacgcagcgcaccaaggatagtgctaaacgcaatctggaacaggcaggaaagaccagggatgaggatctggcagatgttgataccaatatccaggatgcctatgatgagtggcagagtgcggaaaacaattacaatgaatcagtagcagcctacaatgaggcggtggcgatggcaaacagcattatggataagacaagcactgcatataccaatgccaattcacaggtcaatactttaaagcgtcagatggatacggaccgcaggacggcagacagcagaaagtcctcctacgatcgtctggtctctcagcgtgaggatacgatcaagcggatcaacgacacctatcaggatcaggtggatacttacaacaataccatggattctaccgaggattccggcaagacccagcaggaacgtattgatgacttacaggagcagattgacggaactgtagtaaaagcaacggcaagtggactggtaacggcggtcaatgtggaggtgggcgacacctataatggcagtgtgatcgcagtgatcgacaatgtggattcctttgatatcacgaccgagatcgatgagtacgacattaacagcattgcggtagggcaggaagtcgtcatcaagaccaatgcaaccggagacgaagaactttccggtacggtcaaaaaggtatcaccaatcgcaaccggaagttccagtggcgatctttccggcagtcttggaggactcgatttaggaagtatcatgggcggtagtggctcgtcatcttttagcacaggaagcagcaatgatgacgttacctttacggttaccatagctttaaacacaccgagtgataaactccgtattggtatgaccgcaaaattgaacatcgttttacagaaaaatgcagatgttctttctgtaccatataatgcagtgcagacagatgatgagggaactagttattatgtgcaaaaagtaacaggtacaaacgaagacggcacttacaagaccaagaagatcaaggtagacaagggaatcgagagtgactattatacggagatcatcaattccggtttagaagaaggggatcaagtgatcgttccggcagcagagaagcagaatagtttagaggatatgatcaaccagtcaagttctatgggaggtgtataatgagccgcacgatcatagaactggaagatatctttaagcgtttttatatcggaacaccaaatgaactcgaggtcttgcacggcatatctttaaaggttatggaaggtgaattccttgccatcgtgggtgcatccggctccggaaagtcaacactgatgaacattatcggtgcgctagaccgaccgacagaaggcaaatacattttggatggtgtggacatgattgcggcaaaggatgcagaactttccaagatccgcaaccgcaagatcggttttgttttccagacatacaatctgatctctaaaaccaatgcgatcaaaaacgtggagatgcctatgttatatgcggggattcccggcaaacagcgcattgcccgtgccaaggaattgctggaactggtcggtatggaggaacgtatgaaacatttgccggaggaattatccggcggacaaaagcagcgtgtcgccatagcccgtgccatggcaaatgatccggcgatcattctggcggatgagccgaccggtgccttggattctacgacgggacgtatggtcatggatctttttcacaaactgcatgaggaggcgggcaagaccatcgtgctcattacccattcaccggaactggcagaggagaccgagcgtatcattacgatcaaggatggaaatgtccttggagagaggaagggtacggcaagatgatgatgatttacgaaaatatccgtctggcgctttttagcctcaaagccaataagatgcgggcgcttctgactatgttaggcatcattattggtattggctctgttattgccattatgacggtaggagactccgttaccagtacagtcgcagattccatgagttcgctgggggctaacaatatcactgtaacactggaagagcgaaaagatgatgaagaggcatccgatgccatgtttggcatgaactggggatcttcaaaggatgagaatgccaagcaaccgacacaaaaggattatataacgacgaatatgcttcgccagatgaaggaagcctttggagattcgatcactgcctattccatcacagaacaggtgggaagcggttctatccagcagaatgcagagagtggaaaagccaatgtatccgttatgggaacaagtcttggctattttctggcgaatgatgtgcagttggtacagggatcttattttagcgaggaagagttggaaaatggtgctatggtagccctgctttcggaagaggcgctggatgatcttttccatggagatgcggatgcggctgtcggctctaccatgacagtttctgtcaacgataagtattacaatctcatcatagagggcgtttatgccaaggacgaagatgagactatgagcatgtattccatgtttatgaacagtgatgcaaccaatctctatattccgctaaagacggcacaggatatcaatcatgccagtggttatcagacgttgaccgtggttgtagatccaaatcagaatccggatcaactggcggcagatattgagtcctattttgacaacctctaccgtaataaccgcgattttatcgtgtcggcgaccagtatggcatctatggtatctatcatggaaaccatgatgagtacgatcacaacggcgattgctttgattggtggtattgctcttgtcgtgggcggtatcggggtcatgaatatcatgctggtatccattacggagcgaacgagggaaattggtacccgaaaagcactcggcgcaccgaactcctccatccgcctgcagtttatcatcgagtccattgtgatctgcctgatcgggggcgcgatcggtattgtagtcggttgcgttggcggtattgcagccgctaattatatcggagccagtgcggtaccgtctgtcaagagtatcctgatctcgcttggattttccatggcaatcggtgtctttttcggttattatccggcaaataaggcagccaaactcaacccgatcgacgcattacggtatgaataaaccatgtttgacaaaggagtcaccagtaggcgaagcctttattatgttatacttttggtgtcaaagagttggtttccaaatctgtctgtgatagaataataaagatatatggtggaggaggagagcagttatgcaaagaactaaaattcaatggattgagatgtttcgacaagaagcggagaaaatcatgccagtagcgtctagacttgtaaacagaaataaaaagtcagatgcaatcaataaagcgataaagcagtatttatcagacaatattgagaatgttaagaaggacgcaaagagggatggatggactaatgagcaacttttgaatgaaattttgcttgttacgtatgcatcttatattgtgatgcttgaatatcgtaacaaggtatggccatatgagtatatggcgtttgcaagacgtattggtgagttatgggaacctttttgtaaattaccatttgaatttcctgttaaggatttaaaactaatagaaccacttgattttgaaaaagtacaggaaagtatgagaaaggaggcatcagactatatttctaccttgaacattagcagccaagaaaaaagaatgatgtcttactattatagtattccttggtcgctagttgatagtggtggaataaaactagggcttgatttacattttgaacaaggtggaattcattataattgtgattttaagagtgggtttagttcaaatgaaaagggc

SEQ ID NO: 12489 - DNA, 23030 bp, Unknown
  gut microbiota DNA sequence
ataaataccgcttgccatcatcccaaaaagtcccagcacatataaaagatatcttggcaggctttccctgctctccaactctttacgccgaatgaaaagccaatacaaataagcaaagagcatgccgtagacgatccactgtgggagcaaggctgctgctcccagtagcagacctttccaaccgtagatctttagaaaagacatgaggaaaattccaagccaaatgccacccagtccactggcaatataatataaggcttttcgcattctcgtcagcccacacaaggtcaagagcaagagaagttcacttcttcgtatgaccacataccagaaaaaattcctgctgtcgctgatattggcatccaaccgttccagacagatcctgctccagcctgccacctccgtgatctcctcccacaagaaaaagcgcaccaagaccagggcaataaaaaaagacaaaagaaatacccctctcttgctccgccagcgatgcaggcggatcgtcatcgggaatttcctctgtctgtgatatgcatcataatatgaatactgcttcatttggtttcactccctgtccaaatcatccttattcatcttatgatactgtactcgttttatgctacttatccttgctgtaagaccttgacctgatatgccagaattgccgaaaccgtcttggaatcctgcatacgcccggcatagatctctgtcaaaagatcttccatcttccaagccttgatctcgatggactctgcctcgtccaaatgctgttgtcccggatggagaccggttgccagatagacatcgataaattcatcgcaaaaggcaacggtggtctttaatgagatgagcggctcgatccggtcacaggtgtaacctgtctcctcggtcagttcccttcttgcacagaccatagtatcttccgtcacggaatctctggatcctgccgggatttcccatgtcatacgttttaaggcatggcggtactggtgtaccagtacaatcctaccatccggcagaaccggtacgactgccgccgccccttttctgtggctcacaaaatcccaggcttccttgtgtccgtttggcaggcgcacggtgtctgcatagacatccagaatagagcctttataaaccagttctctcttttccacctctacgtgttccatctttctcactccttctgataaaaagaatgtgccttccgcacattcccgtgccgcgataagtttgtaaaaaaatagtcagctttcgctgactattttttattttgcataatccgttactcttgattcacgaattacatttactttgatctgtccaggataatctaattctgactcaattctcttagaaatatcccgcgccaacaataccatctctgcatcgttgacctgttcaggaactaccattacccgaacctctctacctgcctgaatagcaaaagatttttcgactcccttaaatccatcggtaatctcttctaactgttgtaatctgtttgaatatgcttctaatgtctcgcgtcttgcaccaggtcttgccgcactgatcgtatcagcagcctgtaccaagcatgcgaccaatgattccggttccacatcgccgtggtgcgcttcaaccgcattgataacaatcggtgattccttgtatctcttacaaagttctacaccgagctgtacgtgtgtaccttccatctctcggtcgactgccttaccaatatcatgaagtaacccagcacgctttgcaagtctgacatcctcgccaatctctgcggcaagcagtcctgctaactgtgctacttcaatagaatgctttaagacattctgaccataactggtacgatatctcatcttaccaagaagtttgacaagttccggatgtacgccatgaacaccaacttcaagtgttgcggcctcaccctcttcacggatcaaagtctcaacttccttctgagccttctcaaccatttcctcaattctagccgggtgaatacgaccatctacgatcaacttctctaaggcaattctagccacttcacgtctgaccggatcaaatgcagaaagaataactgcttccggtgtatcatcaataatcagttctacacctgtcaaagtctcaagggtacggatattacgtccctcacgaccaatgattcttcccttcatttcatcattcggaagctgaacaacagagattgttgtctcggcaacatgatctgcggcacacttctggattgcagtaaccacaatgtcctttgccttcttgtttgcttcctcttttgcctgcgcaacggattctttgatcagttttgcagtgtcaagttttacatcttcttcaacagtttttaaaagtatttctttcgcttgttcggaggttaatcctgagattctttctagttcctgtactctttgctgatttaacttcgcaacttcttctttctgcttgttaaccgcacgttccttggcagtatattcagcctcacgcttctcaagagcctctaattttttatccagattctcttccttctgaagcacacgatgttcattgcgctgaatttctgctctacgctcacgaatctctttttcgagttcattcttggtattcatagactcttccttggcctctaaaagagcttcacgcttcttggtctctgcattcttgacagcctcatcaatgatctcacgagccctgtcttctgcactgccaaccttctttgcagatgccttctggtaggaagcatttgcgatggcaagagacaccggaactgcaacgactaacgtaacaaccgctgtgattattatcgtaagcacaggagcacctcccttatttaattttattgtacatacatcatgaaaaattactaatctgcatataaatacaacaattaaattttatactttcttatatggcttgtcaagaatatatccctcaatcccattccgaaaatccgcctcgcaggacacgactgatctcactggatgcgaagcctctctgcataaggaaacgatacattttggcttcttcctgcctcgttgcattctccggagcatagcctttcttctgcaataaaactgcgatcaactccatctgggattgctccaattcttcttccatacaacgatcaatgatctcacgatcgatcccctttttcaaaagatcctgtgtcatgcgcatgcgactgcggctggtctgataaaagcggatgtgggatcttgcaaggcgttcatcatccagatagtggtaacttgttacataggcaatggcactctcgatcgccggttccggatagccgccctcgcgcagtttggtctccaactgtctggtcgaccggtccatcttttccagcaagtgcatagcacggcgcctggctctgggtataaggatctcctctaggacctcttcatacatatcctctgtgatctcgtcattctcctgcaaatgcaactggcgtacttcacccttgtagagtgtaagatccaccccattgctgaggtggatcttacatttattttttcctgttgtgtcaatcgattctatgtacactctgacactcctattcttcttctacagtctctgtcccctctgcttcttccggcttaaagtgtgctctgacctgttgctcgatctcatcacgcacttctggatgttcacgcagataagtcttggcgttttcacgcccctgtccgatcttgtctccattgtaggcataccatgcaccggacttgttgacaatatcaaggtctgccgcaatatctaggatatctccctctttggaaataccctgaccaaacatgatatcaaactctgcctctctaaatggcggtgcgatcttgttctttacgaccttgatacgggtgcggttgccaatgacctccccctgctgcttgatcgcctcgatgcgacgaacatccagacgtacggaagaatagaacttaagcgctctaccaccggtcgtcgtttccggattaccgaacataacaccaactttttcacgtaactgattgataaagataacgatacaatttgacttgctgatcaccgcagtcaacttacggagtgcctgtgacatcagacgcgcctgtaagcccacatgggaatcacccatatcaccgtcaatctctgcctttggaaccaaggcagcaacggaatccacgatcacgatatcaaccgcaccggaacgcaccatggtctctgtgatctccagagcctgctcaccgttgtccggctgggaaatataaagattgtcgatatctaccccgatattcttggcatagacaggatccagcgcatgctctgcatcaataaagcctgcgataccgcctgccttttgtacctctgcgacagcatgtaatgcgactgtcgtcttaccactggactccggtccgtagatctcaataattctgccctttggcagaccgccctgtcccaaggcaatatcaagactgagagaaccggtcggtacggtctcgacctgcatctggttgctggtgtctccgagtttcatgatcgagcccttgccatactgcttttctatctgggaaatcgctgcgtctaacgcctttaacttatcatcatttgccataactaaaaacctccatatcgaacttttgttcgttttcatgttctaatactattatacttccacaaaaaagtcaacctcattttgtgttcctttgttattatcctgtatcatggggattgtaaaacgaaaaaagacagtagcaaatcgctactgccttattatatccagtggtcgtcccatctgtcaagactcatcttggcaccggcctttcctatccggatgaacttaactgcgtccaaactctgataagatcaatccctcgtttcgatccagtgtcatgccaacgctccaagagttgacgaacaaaagaagcggtctgcccttgagatctttgatcttcttcatgtccgaggtaccggagatcttatccagatcaatatcctcattttcgatccagcggatatgctcatatggcagattttccatgcggatctcgacattatattcgttattcagacgatactttaaaacatcaaattgcagaacaccgacaacaccgacaatgatctcctccataccggtattgtattcctggaagatctggatcgcaccttcctgggcgatctggctgatgcccttcatgaactgtttacgtttcatggtatcgacctggcgcacacgggcaaaatgttccggtgcaaatgtcggaataccctcaaaagcaaatctgttttttccgctgacgatggtatcgccaatagaaaagatgcccgggtcaaatacaccgatgatatccccggcatatgccttatccacgatctttctttcctgcgccatcaactgctgaggctgggaaagtttcatcgccttatttccctgcacatgaaagacttccataccggcatcaaactcgccggagcagatacgcataaaggcgatcctatcgcggtgtgccttgttcatatttgcctgaatcttgaagacaaatgcggaaaaatccggtgaaaacggatcgatcacaccctggtcggacattctcggcaatggggatgatgtcatctgtaaaaagtgctgcaaaaaggtctcaacaccaaagttggtaagcgccgaaccaaaaaatacaggggacaactcgcccttggacaccagttccatatcaaattctgcactggcaccgtccagaagttcgatctcatccaataaggtctgtctctgatcttctccgatctcatctacaagtgccggatcatcaatagcgatctctttttcggttccctccttggttccctttaaggtatctgcaaaggtcatgacgcgcttggtatttctgtcatacacgcccttgaagcccttaccggagccgatcggccagttaatcggacaggtcgcaatgcccagttccttttcaatatcatccagaagttcaaaggtgtcgtttgcatcacgatccatcttgttgataaaggtaaaaatcgggatatgtcgcatcacgcataccttgaacaattttcttgtctgtgcctcaacacccttggaggcatcaatgaccatgacggcagaatccgcagccataagggtacgataggtatcttctgagaagtcctgatgtcccggtgtatccaaaatattgatgcaataaccatcataatggaactgcaatacggaagatgtaaccgaaatacctctttccttctcaatctccatccagtcagacaccgcatgtctggcagtcgcttttcccttgacagagcctgctaaattgatggctccaccatataagagaaatttctccgtcagggtcgtcttacctgcatccgggtgagaaataatggcaaatgtccttctcttttcaatctctttcactaaatctgacacagtatgttcctcccatttatcctgcgctcccggtattgccgggatctatatactatctatatcttatctcaaactaattcagtgtatcttacattcacattccttgtcaagtctacgtcgggcatccgcaaggcgtggagaagcaggcggcagggggcaggcgtgacctgttgggcagaaatctgtcgcagaacagggagtctctatgtgagaaagcattgcttgcgcatataaaaactgtctttgcaaagttagacagtcgcctaggatgatgttcgcctgtgacagatatgaatgcaaaacgcattagagactcttataacttgaaagcattccggcaactcgggtacagggatgtacccgagaggcgcaaccgcacacggatgttcgtttgcgccggttgccgactttggatacagcaaaacgtccaagttattagagtctcttatgtgtgacgcctctgaatatctgtcacaggcggacacatcctgtcgcccgtcgaagctgtgcaagagacagtttacggcaagcaatcactttctcacagagactcacctaacctgctccaaagattttctgcccaacaggtcacgcctgccccctgccgcctgcttctccacgccttgcggatgccctcctagttcatggtcgagatcacgatatggtccggtgcaatgccagccttacggttgacaacatcttctacctgcgcccgctgtgcatcggtcacctgactggcatttaaaatgacatctgcattttctcctgcgatggagaccacggcttcctcaaagcccttggatgccagcatcatctcgcaggcagcctccttttctgccacttgagtaagtgccgccaattcttctacggctgcctgtttttccacatccgtcaaagcagcattattgaccacttccatcagcgttgccttactggctgccctggtctgctcccgatccatcttaaggcttgccgcttttgacacctgcacattagtactgtccgtcagtaccgtctcccctgcactgtcatcccccatatcatcactgctcgcctccgtatcggtcaggatctcctcctcgctcagggatgccgtcgcctccgtatcttttgctttttcctccttgctgtcctttgccgccatagtcgcaatatctttttcatcattttcatatgtataattgagataaccggctccggcaatgagaagtgccaaggctgctaccacgatctgattttttcggaatatacgtttcatgttccctcctgtgatcccatttctactattgatatcttatgtgcgtccacggaaaataatgcctgaatcgcctcatagatcgccacttttgtccgattgtccgatgctccctccgccaccacgcagaccccacggatctttggctcaatggtcttggtctcatagggtgcatcctgcgagagtacggtcgtgcggtcagaactcatctcctccttggtcgtctccccctctttggtcgtggatgactggctgctaatgtcctgtgccacgacattctccccctgatcttccaaggtgatcatgacccggaccgctcctacgccatccatctgtcccaacaggtcttccagttctctctccatctgttccacataagaagaactttccgtttccgtggtctgtaccgactcttgcgttccggcatcctgcttcttggaatcgaccggtatggctatgaccaagagcaaaacaccgatcaaaatgcatacgatccatttctgtctgtccatattctttagcattttttctgccaatttcttccagtttttcatcattcctcctgcccatttaccactgcatctatataattctgatccaaataggaatagtcctcggcttccttttttctttgctcccactgcgcataatactgggaaaaagtctgattccactgcttttcgtaatctttttttccgatccctaaaatggaagtcaggcaaaagagtaccaagaccatctccagaaaaaagcgcagatacctgcgatactgcccggaggggagcaggtacaaaaacatggcaaagatcagaaaaagagaaatatacgccttgatccacgcgatcacatcatctgcctcctattaatgtcgtcattgccaccgtgataaagatcagtatggcgcagtttgtcagcagtttaaaaagcataccgcctccctttgccgccacaagtatagcattgctgatccttttatctgccaccggctccacaaaggctgccagaacccggtaaaaaaatgtcatgattcccactttggacaagggtacggcaaccaggatcacaagtacgaccagagccgccgccccgatgccgctgcgtatgacatcgcttgccgccagaaaaagatccgatgccgccgacaaggtcgaaccgatccccggcacaaatgccagcgattttctcagcgtctgtctggcaaaggtatctgtgaccggggcaatggcattcttgatgatatttagcccaagaactacggatgttaagatcttgagtgcccaggaaaccatattttccaaaagatccgtcagtttggaaaatcttccttcctccatgacataattcaaaagccccatgacaacatatatgcggatcaacggcaccagaccgtccgctaagatccactgcaccagatagaccacaagaaaacccagttcataaaatcccatagccgttgcatccccgcccgccaccacaacggtcgtcgcaaagacggggacaaatgccgtcataaaatccagcaccactgcaatggtctgctgcacgacctgatccaatagcagtaccgacttcatcaatagcaccatcaaaagtgcatagaccagtaaaaagcagacatttgatatgtaggactgttcaaagacctgcgcaaaatttttcaaaagggaaaaggcaatcgtcaaaagcaggatatagatcagatactttcggttggtctcccactcgccccaaaaaaattgccagaccatctgccccaagccctgactgatgtcatattccccagagatcagtttttctacaatttgttcaaaccgcagatctccccatccgtcactgccccttaaggcatcttcaataccacttaagtccaatgaggaaaacaggcgatccactgcgcttccttccgtcataaaaatgcctccaccgtcgataagaacgccatcagaaccggcattcccagtgctaagatcgacaacttcgccaatacctggatctgcccggcaatgctggcataacccgcatctttgcagatggcagatgcaaactcagaaatataagtaatgccgatcatttttaagatcacgcccatatacagggcatccacatggatcaggtctgccagactctgtatgtaatccatgacatccctgatctttgccagcacaccaaaaaagataaaaaggcaacaagccaaggaaagcatcatggcaatttccggtttctgctgccggaacaaaagtgccagcaagaccgtcacaatgccagccaccgcaacacctatcaaagtaccgccccctaaagatcaaataatttttgcatcatctcaaagagatctaaaatgtaaggcacaacccagaacaaaacgaccagaagtccgcccagcgagataaaaaaagcctgttcatccctgccactgtgttttaaaacctgatttaagatagtcacgataataccaactgctgcaattttaaataagagttcaatgggcatatccttacagtaacagcaccagaaccagcatgagacccatcccggtcgtagccgccgtcacctttcccctttctttttttgtttgttgctccttctccagtaactttgcaaaagaatcgtaatagataccaaattcctccgcctgtccgggcaggcaggcagaaaataaggagcaaagagcctgtacaaacagacgtctttcctcctctttcgtaagccttcgcatatccggtgtcatttcttgccagagcgtcggttccatatcttcttttttatgcttctgcatttcccttaacactgccgcaaagtaatcggataaccccgggataccgtgcccgctttcctgccttaggatggcatgcatgggcaggtttctctgggctaccgcctgccgtatccgaagcagactcgcctgcatttcctgtaaaaagtaccatctttgtcgggaattataccactgctgtagcaaaagtcccgctccccccaaaagaaaggtggctatgccgattcctttacacataacagttcccccgcttcatcatataagaaaaactgccgtctgccggactttttgtcgatccagagcagacgccggaaatgacatttttccaaaagcggctcccactctcttttctgctgatactccaaaaggcttccggcatgcatggtcgcaaggacgcccaccccacagtgcatggcatagaccagactttccagatcctttttcccaccgatctcgtccaccaccaagatctgcggcgccatggtgcggatcgcctgcatacagcccgcctccttggcgtaaccggaatagacatccgtatgcagtcccacatcattttgcggaatgccaaaattggctgccgccagttcatatctttcgtcgatcaatgccagcccccgacaggtcggacggtcggatagaacccgtaccagatcccgcaaaaaagtagtctttcccatgccaggtgccgccaggatcagtgtatgtaaaaatgtctccccctctatgagccatggctctatccacgccgcgcatcccttcttctcatggggaatgcggatggaaaaatacatgggatattccatgcctatccgtccgtcttcctctgccatatactgcccgcatagtcccagacggatgccgccatccaaggcgagaaatccctgccgcatttgcctggcataggcatagcgggaatactcacaaacataggtcagcatttcccgcaggtcttcctcccccagtgcaagtccgccttttgcctgtgtcatcaggcgcttttcccggggatccagataaaaggatgcctgcgacgtcacaaactgtaccggtctttggatgcggatgcggatctcttctaaatcctcccgataccatgtcacctgcgacaggatctcccgcagcctaaccggaaatattttcattaactcgtccatttgttcttcagccatagtctaatatatgaatgctttaccgttttatgatcattttgcaaattttacttgggcagggctttcctgatcgaataaaattcggatctgtcctgcatccatagtgatataaatatcatcttttcccatcacatcttccaagcgctccaaggtctccttgccgggatgtccgtaagagttattctttccacaggagatcaaggcaatctccggtgccaaggcatccaaaaagtcctcgccactggaatacttcgagccatggtgcgccacttttaaaaaggccagcgtcccattctctccaagcgcgctttgaacctctgccaccaaagacgcttcctgatccatggctatatctccggtaaaaagtccttgaaaatctccacaggtcaataaaagacaaaggctcatggcattgcaatccgcggcaaaatccctgctgatcgcctgagtcggtccgacacattgcagtctcaggtctccgctgatcagccgatctcccacttccatataaaggatctggcttccctgcttttttgccgtctgtatcagtttctccatggcatccccatcttccaccccctccttttgcgccttagcaaagaccaggtgctcgatctcataaccactctccaaacactcctgcaagccgttgatatgatccagatccgtatgggacacaaaccagtagtctatcttgcggatgccatggtattttaagaaaggcaggatccgatacgtgccgaccttggtcacatccgtacttcccccatctataaaaaaatgatcgccggcactactttgcagataaatgccatccccctgtccaacatccagcatgaccatctgattctgcgtctttttgggacagaacaaaaatacaagtccaaacagtccgcaaagcagagcctgcccatatctgcgccccactttttccttcttctttcccttcgtcctgccatttttacccttgagcaaaaaaagtcccagatataaaagcccataatagagaaagatccttccccatgccggagcgcccacgatctgtcttgcccccggcagacgcagggtcagatctgccatccattcgtaaaaatacaggagcacatgacagatcgtaaggatcttgcccgccagtccctgccaaaaaagacctaccaacccaccgatcagtccacagcccagcaaaagccccagcaaaggaagtagtaccagatttaaaacgatactgtatagcgggatttcataataaaaccttgccacaagcggcagggtaaacaactgtagccccagtgaaaagacaaaagcatccactgccttcccttttaccacttccaccagaggtgatgcaaaggaaataacaccaagtacagccacaaaagaaaagataaccccagtatttttcatacaaagcggatcttgcacgaccagaacaatccctgccagcatgagggcattgcccgaatcatagacctccccaaagacatttgccagaagatagatcccatacataaaaacagcacgtttggtcgaacttcccataccgcaaaggatgccataggagaccaccagactccccgcaaggataccggcggtaaagaagcctgtgcccctgcgtcgtaagaaattatagattgccatgccaacgaccgagatatgcagacctgatatggctaaaatatgcgacagtcctgccatctgatataaagacttgacctcggcatccagtccgtcacgctcccccaatgccagcgttttcatgacaccgctctcctcgcccggcagccagttttcatacgagcgcgccatatttccacgcagatcatataagacctgccgcagacaaaaacgcgggactatgctttttatttttgctgtctcttccaactttgcggtgatcccactactctcataataggacaattcatcaaaattgccgtcattacgcgcctgtcgaaattcctgtatccttgcctttcctatataaatgcttcctatgatttcatcatccgatcccggataaagaataactgatgagcaagtcatctgctctttttgatcccgcaggatgacatcccgcagataatagattggctgatccgcctttttctctttcttgtagatctccccttgaaattcgatctcttttgcatctgccaagaaatcctgaatgttcttctgcctttctactgccctcatgccccagatgcttcccaaaagaaatgccatacaccaaaacagcatccgcctctttcgcatgtttaccggcaaatatggtctaagccccagcaaaagccacaggacatagaccgcaaaagccggacaccagtaaaggctgtcatatattttccatccaaccccaaggagaaatgccatgccgatctggcatagatttcttcttaacatgatccccttagtctccttctttcatcaggtcacgctctaccgcctgcatgaccatagatgtatctctttcataagatgttcccagtgaaaattccagagtagaatccgatgtgctctgcgcaccgtctaccaggatctgcaccttattgatgttatccagttccgtcaaagaattgacgatcgcatacaagacaacattgctgttgatcccggttggcgtctttaaaaatgccgaatccagattgacatagcagacaccgtctgtcaccgttacatttaagatctttgtcccggatggaaaaacggacttagcatcatccgaatccggtcccttgagcaaataatccataatcaggcgctctctggctacattcttattgtaataaacatccttttcctgcttgaccaaagactgcccatctgcactggcaaagtacaatgtcagttttgtcttttccaggcttccggtctctgcaccgtagtcattgataaaagtatcatcattcatactgccgaccagcgagccgttggcatccagaagcggatcttcgccaacataaaaggcaacactgtcgattcccttgatctgtaccaaagtctttacaatagctgcccgcatcagaacctccgtataaccggtcaattcctcatattcccggtcaaaatacagactgagcagtccattatccagaacacggtctgtgatcttgatactgtctgagatcgtcttgcgatagtcgacactgtccggatctgtggcaagtgcctgtaaggcttcatcgatcatcgcatccgtctttgtcgcatccatatgataaccgacagcaccgatcccatctcccaaggcattgatataatagatcttcatattctctttttctttggatccgccacatcccgtcagcagaccacatagcataacgagcgccatgagacacccgatccctctttttttcatagaagtgtgctcctcatcacattgcttcctgccttaatcatgtaccatcttatgctgttttctgtttttatggcttccggcactattctgtgggctgatatagttcagcggaatacgcacatcaaacatggttccctcacccaggacgctatgtaccttgatatcgccattgtgcatggtgatggcatttttcgtgatggcaagtcccagaccagtaccaccgatctctctggaatgtgacttatccacacggtaaaatctttcaaaaataaagtccagactctcctgtgggattcccataccggaatcctcgaccttaatgtagcaatactgatggtctgcattcaaggacacatgcacccagcctccctcctggttgtacttgatcccgttttcgaccagattggtgattgcaagggatatcttgacttcatccacctcagccgcaaccggacggaaactctcaaaaacgacctcgacctgctgcttttccgcgatcggtcgtaagcgttttaagatcagttcaatcaactcattcatattgacagcggacacattcaaagatgccgctgcacgatccatcttgaccagacttaaaagatcattgatgatcttggtctcgcggtcgatctcctcgccgatatctgccataaattcccggtagagttccaccggcacattatcctgtccgttcaaggaatctgccagcactttcatggaagtcagcggtgtctttaattcatgtgacacattggatacaaattcctgtcgggactcatctactaccttcatacgggcgatcaggctgtttaattttttggaaacctcagccgactccgtataatcatctacggcgatctcctctccgttatcgctgcccttttcccttgcctcaatggctgtaccaagttttctaaaaggtctggtaaagcggccggaaaaaagaatcgccagtgcgatcacgaccacatataagaccaagagggtaatgatggctaccgactggaaatattccagattggtcgtgatataagtcatggacttattcatcaccagtacccctaagacttcattatcatccttgctcgtagataaaatgggtatggctactaccagataagcattttccttatcataataggatgccgtcttgccggtaaatgccgtgatgacatccgaccagacgatcgtcttgccctcgtccaccccataggtatccttgatgacatttaaagaagaatttacgatcatcattctaccggaataggtcaaagacaaggcactcagttgctcatctacatttttggaatctttttcattcagatagccgctcgacatgatctgcttacctaagatctgtccattggcaaccatgtccgtcacgtcgctctccacggagcgtctcacatataaactggaaaaaagcacagaaaacagcgtagcaggcaggatccccaccaaaaggaccaccactacaatatgtgccctaagacttttgatcatttctttgagtttctgttttttcatgtcctacctctaaacctgctgatagtagtagcctaccccccacttagtgtgcacatactttggttcactggcatttggctcgatcttctcacgcagacgtcggatatgcacatccacggtacgcgcatctcccggatagtcctcgccccagatagcacggagcaactcatccctgctgtagaccttgcccggattggtcactaaaagtaagagcatatcaaattctttggaggtcacattgatctcctgatctaaaataaaaagacggcggttttctgtattgatggtaaaatctccgcttttgatctctgtgatcttttgttccttgacgacctgtggcgtcgttctgcgcatgatggccttgatacgcgccttgacctctaagatattgaaaggcttggtgatataatcatctgcaccatactctaagcctaagatcttatccatatcatccccttttgccgtcagcataacgatcggcatattggaaaattcacggatacgctggcagacttcaaatccatccatctttggcagcatcacatccaaaagtatcatatcatatggtgtcgccatggctttatccagcgcttcctgtccatcataggcacaatccacttccatgccgtcctgctccagactaaagcggatcccctttacgatcaatttttcatcatccaccactaatactttttttgccatttttcaaaacctcaattcactgtaattgcatctgcgatcttttgataggtcgcatcaccgatcccggatactgcttttagatcttccactgccgcaaaggctccgtgctcctgccgataggcgacaatgctttctgccctggtctgtccgattccctttaaacttgtcagttcctccgtggaagccgtattgatgttgacctttccatccgatgtcgaagaactttcctctgtcggtgccagcccctctgccgcttcctctttggtatagacatggatcttctgcccatccgaaagccgctccgcctgattcaaagagacatcatacgcctccggcagcagaccgcccgcagcctcgatcagttcatacacgcggctgtctgcaggaaaagtgtaaacaccgggatctgccactgccccactgatctgcacatagatctctgtctttttctctgtctcttctgttgtgtccgcggaatccgtcgcatcttctgatgtgtcctcactagaaagatcagactgcttttctaaataagatgtagacttgcaagccgtacatcctagcaagataagaactacaataccaagtagtatgatttgttttttcactttacactcctttcaaacaataagaaaagggagcagcaatgtctgctaccccctctggatcgctgaaaggaaacatgaatgctatgcaaatcattttatccaaaagcgtcaattattacaagagttttacgaaattatgtcacaaaccccggtcaaaatttctaccatatgatcgatatcttctttttcgatgaccagtggcggcaaaagtcgcaagacattcccacctgcggagagcacgatcagccctgcctccagtgcctttgtcacaatagaaccaaccgggatacgcgcatcgatcacaatgccctgcatgagtcccatgccacgtctgcctgtcataaagtcatattttgcgaccagaccatccaatgccttttcaaaatatggcgtcagttctttgacatggtcagtaatatggcgtttttccatcatatccagtgtcttatcaactgccgcacataccagcggattgcctccgtaagttgtaccatggtcgcccggtaccaaagagtgctctgccacgcggtcggtgagtgcaaaggcgccgaccggcacgcctgctccaagtgcttttgcgcaggtcatgatgtccggctttacaccgtatttctgccatgcaaacatgtagcctgtcctgcccatgccgcactggatctcgtctaagatcaataagatatcatgcgcatcacacagatcccggacgccctgtaaaaagtccgcttctgccggatacagaccaccctcgccctgcacagtctccatgataatggcacaagtcttgtccgtgatctgtgccttgacactatccagatcgttaaaattggcaaaacgcacgccatccatcagcggtaaaaatggttctctgtagtgctccgtaccggtcacagacaaagatcccactgtcctgccgtggaaagaatgttccatggcaatgatctcatgtccggcaaatccatcgcgcagataagcatatttcttggcagtcttaatggctccttcgatcgcctcggcaccactgttggtaaagaacaccttatccatgccggatacctgacaaagttttttggctgccgagatcattggcggatgatagtagaggttggaggtatgggtaatcttgtcgatctgatccatgagtgcctgtttgtattcgccgtcattgtagccaaatgccataacgccgatcccggatgcaaaatccagatattccttgccatccgtatcatagatatgcacgccttttcccttttcaaatacgaccgggaaacgattgtagacatggaacaaagattcttctgctgtagcaatatattcttctttattcatgattaaactttttctccttatcatctaaaatagccgttccgattcccttattggtaaagatctccaaaagcaggcagtgtgcgatacgcccgtccagaatatgtacccgggaaacccctttttcgatcgcttccatacagttattcagttttggcagcataccgccaccgataaagccgtctgcgatcagttctcttgcttcggatacggtcaattctgagatcagcgttgatttgtccgcaggatctttatagacaccctcgatatccgtcaagaatgccagtttttctgcctgtactgcctgcgcaatggcacaagccgcatcatccgcattgatattgtaagtctcataattggcatccataccgatcgggcagacaatcgggagaaaatcgcgttccagaagatcctctaagatctttggattgacttctgtgatctcacctacatagccgatatcctgaccgtcggaatatttcttttctacacgcagcagtccgccatccttgccactgataccgatggcattgacccccagttcctcgaccatctgtactaaagacttgttgaccttatttaagaccatctctgcgatctccatggtcgcagcatccgtcttgcggagtccgttgacaaattccggctgcatgcctgttttttcaacccagcggctgatctccttaccgccgccatgtacgatgattggcttaaatccgaccagttttaaaagtgtcacatcctgaataacatgtttttttaattctctgtcgatcatggcacttccgccatactttacaacaatgatctttcggttaaaacgctggatgtaaggcaaagcctcgatcagaacctgtgccttttccatgacttcctgcatatttttttcttccacttttgtatcctccttatcgcggatctatgatattcttcattaagaacgataatcggcattgatcttgacataatcataggtcaggtcgcatccccaggcagttgcctcggcatccccctgtttcatatcgcagatggctgtcacagcatctgacgtcaagatctttgtggcttcttcctcactgtaaccggtggccacaccgttttctatgatctttaatctgccattgctgctctcaaagtagagatctaccttttccggatcaaagtccacaccggcataacccagcgcgcaaaggatcctgccccagttggcatcatgaccgtagatcgctgccttggtcagactggatgtaacgacagatttggcgagggtcactgcctctgccttgctggaagcatttatgaccttgacctcgaataaggcggtcgcgccttcaccatcgcccgccatcatcttggcaagtgtcttgttgacttcaaagagtgcttctacaaaagcctggtaatcagcatttttctccgtaatctcagtattgcctgccataccattagcaagcaccagacaggtatcattggtggaagtatcgccatccacagagatcatattgtaagtgtcgtccacaatgctgctgagtgcctcctgcaaaagttcgtgggagattgccagatccgttgtgataaaagcaagcatggtacacatattgggatggatcataccgcttcccttgctcataccgccgaccgtcacggtctttccgtccaccgtaaaggtcactgccgcttccttcttgtgggtatcggtcgtcatgatggcttgtgcggctgcggctgctgcctgccgcgtgtcctctaacttaggcaccattgccccaatgcccgcgcgcagacgatccataggcagctgcatgccgatcacaccggtcgatgcgactaagactgcctgactcgggatcccaagtgcagatcctgccgcgtcagccgtctccttacaatagcccatgccttcctgtccggtacaggcattggcgatcccggcattcatgactaccgcctgaacgaaaggactctcccctaccacctgctgatcccatttgaccggtgcagcctttaccacattgcgggtaaaagtacctgctgcaaccgccggcaccttgctatagatcatagccatgtcgtctctgccctgatatttgatcccggctgcggtgtgcgctgccagaaagccctttgctgcggtaactccgccatctatcatttccatctttgccactcctttatttgttaaatcgtgttatattttcttcatttaaaataaaatcatatacattcaggtcctggcgcaatttccagccttcctcattccagaaggcattgccaagggcattgtccttaaatgccaccagagagatcttattgatgccctcctcctgcagacgccgcatacaggtcgttgccatggcttttccgatgccgtgcttgcggtagccctctgccacgcagacatgatagaagcatccctgtctgccatcgtgcccgcagagaatggatcctacgatcctgccgtccgcctcagccacgatactggtggtcggatttcgcttgataaaacgtaaaacgccttccttggaatcatcgatgctgcgaatggcaaatccgttgatctgcatccacagcgcatgcacctcagcaaaatctccttcttccatagtgcggagttgtactccttccggcaatcgaaaatccttattctgtctcattttttctgtcaatcttttcttctcctgatctactatcacatttctacggaaacataggaaccagttccaatccttcctgctctttaaagccaaacaaaagattcatattctgtacggcttgtcctgctgcgcccttgaccagattgtccagtgcgcccataaggatcacgcggtgcgttctcggatccactttcaggcagacatccacaaaattagaaccttctacccacttggtctccggtgtcatgccagcctctaaaacacgcacaaaatattccttatcataatacttgtgataaacatccagcagcatgtcctcggtcggatagtcaacatgcccatccgggtaagccaccttttttaaggaagcgtatgccgttaccaagatgccacggttcataggcacaagatgcggtgtaaaggaaatggtcacgtcctccccacaggcatagcccaactgttcctcgatctccggggtatggcggtgtgtcgctacaccgtatgccttcatattctcattgacttcacagaaaaggttttgtacctttgcccctctgcccgcgccggatgtaccggactttgcatctacgatcagggtgtgatgatcgatcagtccctctttgacaaatggataggtcgtcagaatagaacaggtcgtataacagcccggattggctaccagacgcacgttctgcatcttgtcgcgattgatctcacacagaccgtaaaccgcttcctctataaactgtgggctcttatgtgtgataccataccacttttcataagtagcgacatctttgatgcggtagtccgcgctcagatctatgatcttaacctgactcaggatctcctctgtcaatatggatgccagatagccctgcggtgttgccgtaaagatcacctccacctgacttgcaagttcctgcagattatcgtccagacaggttgcatccacaatatcaaacatattacgatagacatgtgcatatttctcgtccacataagaacgggaaccataccacacaatctctacttctttatgtcctagcaaaaggcggaccagttcaccgcctgcataaccggttgctccaataattcctgcttttatcatctttcgccctcttttcttaatcgaaaaatctcttttttcatattagtacattctcccctgttcgtaaagaggaaaatgtaagttttttacaattttaatgaatatttatgcatcacgcttttttattctttgtttagtttg

SEQ ID NO: 12490 - DNA, 4429 bp, Unknown
  gut microbiota DNA sequence
tgagaatatagaaaattattttttaactttgatatatgtaatttcttgccctgtttcctcgttggtgtatttcttttggttgcagactttgggatttagttcaacggatttcataaagttttcaacatcatcaagcatgatgttctccacttctgcggtgtcaagatttctgctacataaatagcggtgctttcctttggtggcggtaatcatttcttttgtgatgtacttggttatataactgctcactttctgggtgtcttcaatttttgaaactgttgtaaatccatatctgaaagttttggaattgacattataaatcttcttcccgttcttttttattccactatcttcaagttttaacctatcgcaatttgtaccgataccatgaaaatgaattctcccagatttatggaattctggaacaaagatatatttaaaatctgggttctggtcttttatatttttgagaaattggtgtaatcgtttatagcatttatcataatcaaaactatctacttgctttggatcaaatgtgattgtgaaaaataatccattgctccaatcgttagaaaaagcataattatagattttttgcttggttctgcttaaagatgactgctcgctatgttccttgctttcttttgtgcgttctttcttggttgctttattatactctactccgccgatttcttcatattcaacatgggcggaagtccttttattacccgtttgaaatggtatcttaaaaagtcgatattcttcatggtttaaatactttacatgcttcatattataaaactgcggggtttcaaatatggacttaaatgctctgcttttgtagtatctccaagacgcttcctctttggtaatcttttggcttaatgccaactcttttattttctgttcctctttttgtttctctattatctctaatagtgtcatgtgcgttctccctttctgctactccgccaaaaatgttgcctatgtcaagtaaggcaacaaggctgtttattggtttcattaggaagtatgcaagaccgcttaaacttcaaattgtgctatatagccaaatttcatattttttatgaagggagggattttacatgaatgaagatgatatgacattagaccagataattgcatttcatactttaatgtgtgaagcgcaaaagataattgatagttgggatgccgaggacgatgcagaccaatggggagatgattttgagaagtacaaccgacaaacacccagttacaatgatgatgaaagataatttgagccccacctttgcaaaaggtataggggcttagacctttacaagatttagaagcataggcggtcttgtaaatggtcgcacagagaggaggaattatatggctttattttcgtttcactgccagaactacaaggctggcgcattagttggcattgatggacacaatagacgattgcacaagaaccacaaaagcaacccagatattgataatgaacgctctgccaacaatatagtatatgtagcaccgaaaaagaatgtatatgcggactgcaaagcaatcataaaagaaaaagtaatagacacagggcacagggtaaggaaagacagtaattggatatgtgaatgtatcttctcatatcccgaagaactaccgcccgacagaatggatgactattttgaactaatcattaaatacatgggcgcaagacttggcaaagacaatgtaattgaagcggtggctcactgcgatgaggggggattgaaccatctacatcttgacattttgcttataaccccagagggtcgcttatcttcaaaagcactcatcaccagggaatttatccaatctatacatgataaacttccaatcgttttgcaagcccatggttttgatgtagaacgtggcgcagttggtcatgagggcggactatctgcaaaagaatataaaaagcagatggaaagcgaagcaaaagaaatcagccaaaaaatagatgagatggttgaagaacataaccgcctactagaaattattaaaaggctacgggaaatagcccaacaactagaacttggcaacctagccaaagcacgagatatagtatgccatcatcaaaaggccagataaatcaattaagcaagcacacaaaacgcttgctttttttaatgcccaaatactgaaaaattgatttttatttttggtgcttaaaatgtcaaggaaaaaatgtaacaaaaataaaaaaattatcaatctcaaaacactgattttctttctgtacatccctttctttttcgttttttataagttcattctgcttttttgtgcaatgtgctgttctcaatttttgacctccaaaaatcaattatcgagcatgctacgataaggctgtaacaagaacacgcgcgcgagttcataacttccagacgcttcccagagttgcaaactgcaagcgtttggcttccgaaaaggaggtcgtttatgaattcaaatgtatgtaatatcgatggtgttaaatgcacgaaagaagagttgctagaagcaacagagagagctatgattagtaagaatgatgtgctgaaagaattagaacttatgaaaagagaaaaaattcttttaaagcatactgaaaaatacaaaatctggctcgctgacgatggacgatggaaaaccaaaattccagacggtagcaaatatgggaagttagtagccagagccacaaaagagaaccttgaaaatttcattgttgatttttacaaagcaaaggaagaaacagacaagataacaatggcaactatttaccctaactttcttgaatataagtatttatcttcggaaaaaggcacagccaataaattgcagtgggtttggaacacctattttaaagacagtaccattatcaaagtagaactttcaaaaatgacagtgggggatttatcagattggcttttagaactaatagcaaaacgaaaccttaccaaaaagaaatatgtagaagtcaaagggttaatgaaccaactctatgattattgcattagtcacaatatggtgcagataaatctaccacgccaaattgctatgccttcaaaaaatgttttctttgaagcaaaagcaaagccagaagaagaaattatatattccagcaccaccaaaagcgacgttatcaaagaagcacttgcacaatttgaaaaaacaaaaaacaccgcttatttagcaatctgtttaaatttcaatcttgctctgcgtattggcgaacttgtggcacttcgtgaaagtgatattgacggagatactattcatattagcagaggtgaggtcaaaaactacaccaaagatgaaaatggtaaaattgtccgcaatggctacaaagttgcacaacaccccaaaaccgatgcaggcattagaaccttggttttaacaccagacgccaaaaaatatattaaaatggcacttgatgaaaacaaagccaatgggcgaagtgatgaagattatatttttcttagtaagtctggaaaaagaatgcatgaatatgctgtgaataatgtacttcgtagatgtaatggcgtaagaaatgaaaaagaccgcttcattatctctggtaaacctagcggaaatcacgcaatcagaaaaacctgtatctctgaactgcatgacagccaattattaccagatagaatgatttccgattttgctggtcacaaggatatatcaaccactcaaaaatattatattcactctgttactccactcacagaaaaagcggatgtattcgccaaggttttcgggtcaaaggcaatgtaacaaagtgtaacaaaaatagcaaaagaaaaaagccttgaaaattcaaggctttttattaaaaacgtaatgcggaagatgggacttgaacccacacgttcgcaatgaacacaagatccttagtcttgctcgtctgccagttccgacacttccgcatatcatctcgcgacgacctgattataatatcaaaacacagaaacaatgtcaacccttttttgacttttattttgcatgccaaaaaactacatacgaagaagatatttcatggtaatataaatgtatcaacaggataggagtagatacatggcacaggaaaatgttggcgcattcatgcagaaaatgcgcagagaaaagggcatgacacaaaaagaactcgcagatatcttacatatcagtgacaagacgatctcaaaatgggagacaggagtttcccatagttaaagataccacaccaaatatgatgaacccacgcttatacactaccagctataataagccgtaaggacagcaatttgacactgctgtcctttcttttataaaattgcagtacacagaaaaaagctgtaaaatggaaaatatatttgtccttgtaacaattctcggacatttgcctgttatactatctgcaaaaagaaaagga

SEQ ID NO: 12491 - DNA, 39473 bp, Unknown
  gut microbiota DNA sequence
agattaaaaagttggttttccgcaattggcacaatagagccactctttaaaaacatcggaatactttccagtgtaaccggaatgctgatggtctgtccgccctcataggcttctctcgtctcaaaatcgtaaaagatggtaccctttggcagataaacctcacgctctgtagcacctttttccaccacatttgccaccagaagcgaatcgcccaacataaattccactccttcgttatagcaattctcatcccgctgaaatgcatagaccagcggctccatgatcggcgcgcccgtccttgccgctcttgccatgagcgcatacatataaggagacaggcgatagcggaactggatagcatcgcggatcagatgcttggtgccgctatacatccaaggctccgttaccgtgttgtccgtattggtcgaatgaatagaaaaacgcggctggaaaatgccattttgtacccagcgcacaaaaagttcttcctccggtgccgtgccgtaaaatccgccaatgtcacatccctgatttgccacaccggaaagtcccatgccaagaatggtcgcgatgttgtatttcaggctttcccagcaggtcagattgtcccctgcccaggtctgcgcatagcgctggatgcctgcatgaccggaacggcacacagcaaaggctctggtatttggaaaagtctcatggacggcttcctgggtcaactggcacatgaggttgctcatgaccggcttgacctgcccgatcgtagccccttttccctcaaagaacacgcgggcatccttatccacaagcccttcgtattcgcagttgtcattccagacggaagtcacaccgtaagacaagagattttcctttaaatattgcttccagtcctgacgcacactctccttggtatagtcgatataatttcccataccgccccaccagagtccgactgccggcttatcttcctgagggtctttgacaaacatgcccttttcttccacatcttttttataaggatgggataaaagcattcccggcttcacatttggcgaaaccgtaatcccacgttctgtcatttttttgaaatgatctgccggatccttgaacttgtccttattccaggtgaaggtataacgcttcatgccctccccggcatcaatctcgcaatagccggaggacaactggaaaccatcgattgggatttcttctgcctttgcggtgtcgataaatccgacgatcgcatcatctgcatcctttggcagttccgggtaatacatggaagaacccagataacctaaggctgtctttggcagcataacagactttccggtcagatcggtatagcgtgatacgatctctttcatggacggtcctgcaataaagaaaagatcaatgtcaccgccatctatgcgaacggtgctgtggtgcttggtataattgctgtgggatcttcccatgttaaaatcacattcccaggttgtatgataaaaataaccgactgcctttttcgtcttttcattcagtttcagatagaatgggatgtgcttataaagggcatctgtcttttccgggttatagcccatgcagtctcccggtgccgtctgcataaatgcttctctcttgttgatctgccccgtacgctcgccaaagccatagtaatcatcttctgcttccatgacacaggtatggatacgccgtccgttgctgtcacagagccaaccgcgatatgggatatcctcgtgcaaaagtgttccctcttcatcgtaaatctgcaaaagaaatggatctttttgtaccacaacttttaactttgtcccctgcaataccaccttggatgcatcttctgtcatcacagcatccgctggcgtaattctatgacgatatccttttaaaacctcatccatgcggtcttcccaggctgtcatcacaagcgaatacgattcctccgcaaaatcccctgtaaagcctgcgcgaatacgcacaatatcgtcggtcaaaaacaagatacgcatctctatcacgttggtcgatagtacaaacgtctgcgctcttttttccactccaagcaatctttctacaatcttcatggtaaatccccttctacatattatattaagcctttgtcaatttctttcttatattgtcatactaacaaagaagagacagcaaatctacaccaattctgctgtctctcacttcattcttttacatatcttgctataatatttttttaatatcagctctactgtgcttttttctcagcaatagcatctacgtttgcctgcactgccttctttgacaatggatagaggaatgcaagtgatgctgcaagaaccaggaatccaattgcagggaaaagtgtggtcacatcataaattccattgacaacgtcaggatcaaatgctgttgcactgctatatcctacgatagaaagaagaagacctgttaatccattcgcagcagcctgtcctaattttcttgcaaaagaatatacagagtaaacggttccatcactacgaatatttttctttacttcaatatcatcgattacatcaataatcattgcccagcacatgatgttaaagaatgacattcccgcatatgccaacatataaagtgcgataaatacggctacgctggttgtatgcacaaagtatgcaatgaacatagaacctgcacctataaaagcaccaacaacagccaattctttcttaccaaatttagcagcaagctttgttacgaaagttgacataacaagcacaacaccacaaccaagtagaccactcatagaaagtgcttttgcactgttaaagtagtttggataaatgtagttgttcattccggaaagtgtcatctgcaccaaaaggaaaacaagtgctgatacaacaatacctacgaatgcacggtttgtaaacaatacgccgaagagttcaaatacatttttcttctcttccggtgcttccatctttacacgctccgtagaaagatgatagcagatgaggtataccagaacagccaaaatagagcatacaccggaagccagcattgtcttgcttccacttaacacctgatgtccttctgcatctgtcgtatatacaaccattggcagaattacaacaataacaatctgtgccactgtagcaccaatggttctccagttagaaagcattgctctttcttctggcttgtcgctcattgcagatgccatagaaccatatggaatgtttacaccggtataacatacagaaccccaaaggatataggtaaagaacattcagaataccttaaatcccattggcttatcggcaaagtatggtgcgaaaatcagaaaagatgccactgcaaccggacctgcaaaacgacgtacccatggagcaaattttccctttgcagtatatccggaacggtctactacctgtcccatagctacgtccgtaaaagcatccactacttttgctgccatcatcagtgttcccacaagtgctgcactaacacccatgatatctgtataaaatttcatcataaacagtgctgcgataacaaaagttaaatcgtttgcaaaatcgcctgctgcataaccgattttatctctcagaccaaatggtctttttgcattttcttcaaattgcgccattactgccgcatcatttttgtttttactcattgtttcttttcctcccaattactgtaaaagccagtctaaaatatcctgaatgtacttatcccagaaattccaatcatgaccgcccttgtcctctttgtagatcagatctgcgtgttttgcctccaagacttcttttacatgcagattggactgatacaaaaagtcatctgttccaacagcctgatacagctttggaacacacccctttgccacatcctgatcatacagcgcaaagagatcatagttacttccggctaatttttccggatcaccaaaagaatcttcccatgaaaacggattgttttcattttcttggatggttgaactctgatacaaaccggcaatatcaagtgctcccgacatacttgctgcttttgcataaagatctggtcggcttaagcctaaataccatgcgccataacctcccatggaaaatccggcaacatatgtcttcttgcgatctttgctgacaggaaatactccctgaataaatgttggtaattcttctgtaaaaaatgttttgtattttttaccactcctaagatcctgataaaatgaattctcagctgatgccataacaacaacaatccctcgatcttgtgcatacctgtcaatgttactgtaacgaatccatgaaaaggcatcgccgtaggcaccatggagcagataaagtacaggaagtcctgcttcataatcatatttttctgtatgattgatttctgtaatttcctcactgcttcccggcgttggaacaaatacatttaatgtaatgttgcttcctaatgagaaactataataatgtgtttccatcaatgccatttttttcacctcctctatttttatcgcaatttctttttcttgtctcttgcgtttctgggaaaatggtagcaaaatggcaatagcaaaactacaccatttttgttttatgcgtgacatttttttacaaatcttgttgtttcgcgacagatctgtagataaaactaacaatttttcttatgatgatgccaagtttttgggtaaaaatttgggtaaaaaggaggtcaaaaatgatcgatcgtgccgctatcttaatggaacagggtgcctccattgcctgtcatcgcgtggagggcatgaatgacaatatgtcacattcccattaccatacttactttgaactctattttttagagggaggcgagcgtcaccacgtcatgcaggatcaacagtatgagaccaaggtcggctcttttatgatctttgcaccttatatcatgcattattctttttccgatcatgatgtatctttcaagcggacagtcctctattttaaagatgaggcagtcgcatccccggtgcttctggatcttttaaaaaatggaagcggcttgtatgaaccggagcagaagatctcctcctccattcattttttattaaatgaactgcaaaaagagcaggaaagggatgatcctttgcatgaaacagctatggaaaatctgctcaatactctgctgcttaccatcatgcgcagcacccaggtatcgccaaagccggaaacccagagccgcatggcaaaggtgatctcttatattgagaaaaactatcagcacgaattgcgtttacaagatatcgcggctgaattttatgtgagcgaatattatctctgccatgaattcaagaagtacaccaaccgcaccatcgtccagtacatcaatgccctgcgcatcctgcacgcccagcgcctgatcacagaaagtgacctgaattttaccaagattgccgagcagaccggattttcttccctgacacattttaaccggacctttaaatccgtcgtgggaacctcaccatccgcctaccgcaaggcaaacccaaaacatgaatagatcataagaaaaaggagtgacgcacaatgcacatttggaaaagcaggcggacacagtttcggactgggaaagggacttgccgtagaaggatggctggaagatgctctggcattctggcagtctctgccctcataaatctatggcaaaatagcaagtcaggtattgcatccatttcatatattcattaaaatatacataagtataagttgatccagagaccgtgccaactccacgtttttggtccacaaaggagaataaatatatggaatacgacgaaaacctttttaaagcaaaagcgaatcgacgagcacgcaacatctggcttgttttttctctcttgctgactgccaactatggtgctgatgttgctaacggtctgaacacaccgatctattatctgatgttcttacttctctgctgggtgccatttttatccggtcagatccttatgaaagtaaagggtgccgacaccgacctctatcgctatgatcttgcgatcggttatggcattttttatctctttgttatctgtactacagagtcaccgatcgcctttacctatgcccttccggtgaccagccttttagtactctataaagacaaacaatttatgaaatactgcggtatcatcaataccggcatggtcatcttcagttgcgcatatcattatctgcacggttttaactccgcagcagacaccaagaactaccaattgcagattgcctgcatcatcctctgctatatatgctatgtccgttctatccagcatctgaatgagtcagacggagctatgaccgacagcatcaagtcagatctgcaccgcgttgttaccacagtggacaaggtaaagtctgccagcaactctatcttggacggcgtgacggttgtccgcgaacttgcttccgagaataagcacggcgctgatgtcgttatgctgggcatgaacgaattaaccggcaacaacacacagttgcaggatcgcacgacttcctctatggatatgacgaccgacatcaatgcacaggtacaacatgttgccgccatgatcgaggaaatggtggaactgacccgcgagtccggtgtccatgcacagagcagttcttccgacctggatagtttgatcgagacaacgcaagtcatgtccaacttatcaaacgaagtagaccatatattacatgatttcaaaagtgaatttgagatggtaaaggaagagaccggtaccattgacaatatttccagccagaccaacctgttggctctcaacgcttccatcgaagcagccagagccggagaagcaggcaaaggttttgccgttgttgccgaggagatccgcaagttaagttccgaaaccagcgcatcttccggtcagatccagaatgctctggtccgtctggaagagacctccgccaagatgatgacctccatggaaaagacactggaactcatccagcagaccatggaaaaggtgacacagaccggcgagaatgtcaaaaagatcaacgaagattcttcccagttgggcgatcatatccaggatatcgattctgctatgcgtgaggtcgagacatccaactcacaactggtagagaatatggagcaggtttctgacatcatgagccatatgaccaactgcatcaatgactctgatgagaccagcaagcgtatgctcagtaaatacgaagaaagtgccaacaatatcaattccatcgagtccgtcattgaaagcctcatgtgtgaactcggttttggcggatttatgggaatcgaggatgtggaagccggcatgaaagttctctttaccttagagggagagactgagccgcatcacggcgaattggtagagcagacacaggacggactccttattaagacaagcgagatccttagcctgcatatggttactggttgcgaggttcaggtcgttgtcggcaatgtcctctattgctggaacaaggcaagtctggatccaaataccgaccacaaccgcaattacagcatccgcattaccggtcgcccacgcatcaacaatcgccgtaaatatccgcgtattgatgccagcaacacctgtacgatcaccatggctgacagcggaaagacctattccggcaaactggacaacatcagtgccaatggctttgctttcctgtccagcgatccggtctttaccgatgccaagggacaatcccttaccatcacgatcaatgactttgcactggcatctcacaacgtgttggatggacggatcattcgctgttccgatcacgatggcacctacatcgttggctgtcagatgccagatgataatgtttatattatggaatatatcgaaagccgcctgcgtgatggggctacgagttttcagtaagtcttcagacttcctaaatatcaaaaatgtgctaaaaagtccgggataaccttttttcttacggtcatcccggactttcttatacccaaaacctcttaacaacgtgtttcaaaaggaatagcaggaactcctgctgcattaaacaaattcacctgataccaggcatctcttgcaaaacgaatctgcagagattcttctgtcatttcttccaatctcaaaaccagactgtctccgtctaccaaagcctgataagagatttctctgccattctcaagcactgacaaggcattgatggaatctcctgcgatctcaagcccttcttttgcatatgccatctttatacggatcgtatcaccctcacgttttatcccttccggtctcggtgcctcgcagaggatatcctctccatatagatattttcttgccaaaagcgccaagcgatgtcccaccgtgcgcttatctttcggatgaatatcatgttcttcgccgacatcagcaatagatgccatatataggccatcgactgtttttgctgcttcttcctgacagcgacggattgtcgcataatccagattggtctgcatcatccagtctctccagcccggcaactgcacctcaaaaaacggaagtgcttcgtccttccataatttgcgccaatcactgaccagtcccttcatcatatcggtataaagcgactgcaagcccggcacatcatcgctctcgccctgataccaaagtaccccacgtgcagaaaatggggcaatctgctttaccatatgctcatataaaattcccggcatagttctggcgtctacatattctatacgataggcttccattgtttttgccatcatctcctgcagcgatgcattctcatcgagtcccaatgcctttttctgctctgccagtgcctcaggtgacatactttccagccccttttgtgccatatccatcatggcttttccgatttcttccatggatggtgttctcggaagaaccacctgatcaaaaggactcaggcaaggctttcctgcatcgctctgcggatctgccttcctctccgcccagaactgctccatatccttgccttccactgacttttcccacttttccatccatggttttcctacacgttccacagtatcctggtccatccatgcacaactgtaggtaccgccccagttgcatcctataataccgaccggaacgccgaccttttctctgatctccttggcaaagtaaaaagcaaccgcagaaaaatatcccagattctcctctgatgtggctctgcgccatctgcctactgcactgtaatcaaagtcgctatcctgttcctcataaaacttctttggtacatcaaaaaagcgcaactcatgatcatccagccccatgacctgctcatgatatttttcatagcgcagagggaattccatattagactgtccgccggcaatgtaaacctcaccgattgctatatcttccagagtcattgtctctatcccatcactcacctgcagcatctctgacgcagaagcctcgaggggctcgattttcaggcaaaaatgacctgtttcatctgccattacctcagcgctctttccctgaatctcagcccttaccatctgatttggctgactctctccccagatatatactggtttttgtctctgtaaaaccatcccatttgaaaatacttttgcaagtttcatttcctacctccatctgactctatttgtgtggtatctccaccttaatcatacaatactgatctttacttgttcggaatctgacgcaattgctcatccacctgatcgatcaaatcttgcgacattcccgcataagtaacagcataggataacaaatgtcgcagggtcataagttttaacgcctccatcatggctgctccatctacctgggctgcctgctcctgaccttgtcctgcactcatatgcataattggctcaatgatcttcatcgcttccggctttccggacaaataggccatggtacagtcaacatttaagaatggctcacgatttccattgatactttctgaaaaacgtggctgcttcatctgcccattcgcaaaatctcccataatatccttaagccactcaatcgaatctgccacccagtgtggcacgcgattgcagtattcctccggatttggaactaccgatgtattacatacgctatagccatgcgctccatgggaataaatatgactttcaaacatgatctcatgcttctccagcgcatcaagcaaatgaatagtattcttaaccggtaccacattgtctgttctcgttgcaaacacaaagcaaggacaggtattatcatccacggctgcaataacatccggtgccgtcttctcataaatcttagcacaatctccttcaataacgggatagcccagaatcgccgcatatggacgatgctgactcatcgttgccgcactggccgccagatgtccaccggcggagaacccgattaccacgatcttatccgtcaggactttccactcatctgcccgctcctcaatcaaagccatggcctgctcataatcatctaatggattcggccagacagaatcctctcccaccgaatagcgcaggataaaagcctgatagcctgcctcaagataaggaaaggctaccggatctgcctctctgtcagaacacatagaatagcccccgcccggcaaaatcaacacagcaggccgcttactgatatgattaaattctccttccaccggctgtgtgtatgctgtcagcgtcacatttcttttcccattcaatacgattttttctacgtccattttcttctccttttcgttttataaaatgaattaacattatattaactcgttttacactctgtttcaagatatatttgttttttacacaagaaacgtgttatactaatgtagaattataggaattttatacaaaatcacacattttccaaaagttaaaaggggatattatatatggatcaaactgcttattttgaacagatgcgtcagaaacggcgcagtgaaatcttagaaacggcacgccggatgatactggatcaagggcttttttcattctctatgcagggattggcacagacgctggatgtatctacggtcacattgtataaatattataagaatagtattgcgatcattgaagacctttaccaggcaaccaccggcaccttattccagttcccggatcttttccccacacaaaaaaagccagaagatctggctttggagtatatttccctgatccttgacgacatgatctgccgccgggaggattttcgtctggtcatgacccttggtctctacatctatcctgccgatccggtaacagagattctgccggcagagcctttcttgcaatacctgcaagagactctgccgccggaagtctgcgctctttcgcgtgataattcggactttctctcctttgccacagatgcctgcctatcttttatgcagtctgttgctacccagagcaagccggatctcaggcagatgaaaaggcaattattattgtctttgtcactgtggttttagcgcacaaaggcataactttactgctctttcatttctgcaatattcttctgtacctgaaccatacggtctttgtccagttcgtaaaacttcatggcaacgatattacacaaccaaccgataatcggaagtccaaaacttagaaacattgccatccagaaaacaccacttgtagccttatcgcccatctgcggcatggtattcttataaccgatggctgccacacaaagggtcgcaatggtcgtagcaagtgctgccatcaacttatcaataaaagaatagacaccacctaccactgccggcatatactttccggaacgctccaactcatagtcaacaacatccgaacgcatggcacctgctgtggtcgtcaaaatcatacgcgttgcagtcgttgccaacataaagatacaataaataattgttggcacaacagccacagaaatctgactcataccatcttttcctaaaataatacagaagccacaagtcatagcagcaacgccaatggaaacccatgaccagaaagtagttgacttcttaacaccatgcttggatacatacataccgcccaggaaggcaaatgcaatacctacaatcatagtaaaattattgatcatggtcgttgccttgtaactgccgatcagaataccatttaacaaggtaagaataacagactgacttgctgcggtctgcgccagtttgtccgttgcacaggaaacaatatacatctgtgccggacgattgtcacgaagtacatgccacatgtcgctccacttgatcttgtcgtcctttttcttgctgccaatagattcataagattcctttacatccgcatgacgcagaccaatgatagcaagaagggtcaaaactcctgcaaaagccacaaagaagaaacaagaatttttgagcattgctgcgttgtactggttatcatattttggcaaaattgcaaatgcaattaccgtattgaataccatcggtgtaatataactgtaaacagtaccaataaaacccatcattggccgctgatgtggatcgtttgtaaggatggtcggtccgactgctgcagctgtagaacacaaagtatagcccagcgtgtacatcacataggtaatcgtaaacacgacaattccggcaataccgctaaatttacctacacaccagttgtacaggcaaagcacggcaagcgattcaatgataaatcctgcggcaacacagatccttatctttccatgcgtgcccggcatcttctctatcagtgctgccgccaatgcatctgtaactccatcaaagaccttagtgatggataggatgactccgacagttgcgacagcaatcccatacccttccgttcctatataactcgcatacatgatcaggatgtaaaaacacatctgacctccatttgttgccacactggcaatcatgtcaaataaagatgccttacggtattggaccccatccgtcacactggcatcctgcattttcattttctcttttaaccctctcatacttttcctcctactcttcgttcatttcttgaaataagttttcccaacgttcctcgggaagcattggcaacattcgttttatcgtctgtaatggttccgacaaaagtcctaattcttttggcatttcctctgcatacggcatctgcgctgacgcttttcccatatccattctggcgataacagcatcgatcatcggctgaacttcttccataaatgccttgcccagcggatgtttctgcacatccacgatcggtgtcatcagatcatacttttgtccacttgctatgtactcatcttctaccgtgatctcctgctgcaacaagactgtcgctgcatcctgacagatctcgatcgtataatctccgcccggaacacggaaagcatgcgcgccctcatcccaataagaaaaacatctctgatccaaggtaaatatcacggtcttactctcacccggctgtaaactaaccttttcaaagcgacgaagttcacgcacaggccggttgatagccgtcgcgccctttttacaaccgacatacagctgcaccaaagcctttccggcacgttttccagtattttccactgtaaccctagcctccagcgtttgtccggctacataacgattcctttccacaaacagatcacgataggaaaatgtcgtgtatgacaatccgtgtccaaatgggaatctcactctctgcttccggctgctgtaattgcgatacccaacaaagatgtcctcaccataggtcacctcatttccctcgcccggccaggtcagatatgcagaagagtcttcataacacagtgggaaagattctgccagatgccctgacggattggtctgaccggtaaggactgaccagatagcctcatttactccttctcccgccaaataggcttctacgatagccgggacttcatctgcccatggcatctccacgacaccgccgttttccaataccaccgttatgtttttctgcacagatgcaagttctgtaatcagacgattctgacatcttgggagtttcatggtataacggtcaaacccctcggactccatgattggcggcaatcccgccataaccacaacaacatccgccttctttgctgcatttacggcttcctgcgcctttttttcatcgtaggaatcttccataccaaaaccttccacaaaagaaacatttggacaatttccaacgacttcctgtaaagttggcactttataggcatttacatgggacgaccctgccccttgatatcttgctttctctgcaaaggcaccaactacaagcactttcttatccgcatccaacggaagaagatctccttcgtttttcaaaaggacaagagactcctttgccagttctactgcaagtctgtgtccttcttccatgtcataggaagtttttttacggtttgcctgcgctttcagtgacagcgcaacgatctgctcacaggcctcgtccaaaagtctttcctctaatgccccgcttttgaccgcatccacaatgacatgatcgtgcagagaatctcccggcatagtcagcgcgcagccccctttgacagcagcaatccggtcatgcacagccgcccagtcactgaccaccataccatcaaatccccactctttgcgcaagatatcgacaagatatttccggttttctgtcagataggtgccctctaccttgttataggaagccatgaccgtccaaggctttgcctctttgacaaccttttcaaaagcggacagataaatctcacgcatggcgcgctcagataccttgctattgctggttcttcttcgtgtctcctgattgttcgccacataatgcttaagggatgcgccgattccttctgcctgtaaggctttgacataggcagatcccatactgccagccagataagggtcttctgaaaaatattcaaaatttcgaccacacaaaggacttctcttgatattgatgcccggtcctaagagcacatcaacagactctgcctgacaattttttgcaagtccccgccccagtttctctgctacttccacatcaaaagaactcgccacacagcaggctgccggaaaacaggtcgccgtcacactctcgtttttccccatgaaatcctgctttccttcctgcttacgcagtccgtgcggtccatccgacatgaaaacggacgcaatccccttttcctctaaacagctagttgcaaacatctctgccccggatgtcagtgacgctttttcttccagagtcaacgtttttactatctcttttgcctttgtctcatacaatttttgcctacctcctccttttttctttggtcatattgttgcatgctctgcgccaaaaacaaatgtacactatcacgatgctgtcccatcaccatacatacatgatatatcatcccacaactatacattgcgttcggttcgtgttataatatacgaaaaattcggcactgaatgaacaacatggtttgagaagaaattcatgtgattttaggaggaataaaatggaaaaaggcttacaataccggcgcacagaccgcgccatcatgaatgcatttatcaaattggtcaatcaaggttcttttgaaaaactgacagtacaggagattttggatgaggcacttgtcagccgcaataccttttacgcgcattatcgtgataaatacgacattgcagagcaattatttaaaaaatataaagaagattttctgaaacttctaaaagaatcttatacagatatcggaaaggaatgggcaggcaccagtcagttccaagaattttccgatcttcctgcccgcttgttttttcagttctatcaggaacataaggatctcatttatgcactcaataagatcaaaacagataaagtagatatggatcagtttgtttcccaacttttccgggaacgctatctttgcgccccaagcaaccagaccagacaaaatccggagcgcaacctggaactggaagctgagatctatgcttccgtctacaatgccattgcccattattactctttttccggttcaaacgtcacgctccccatccctcacatggaggaagcactttgtcacgtttttttgtactccataggaattatcgaaaaacactgtgaagaggatgctttttcctatgtcatggatactgcaaaacaagcgaaagaaagaaaagaaaactaccaataaaaagatcgcttaggcttgtttttacaggcttaagcgatcttctttatgctatgcaggatatgctaatctattctgcttgccagaactgcgataccttctttgcccggcattttaacgtcaaatcttccactgacgccggtcatagttacatcgcgcgtcatattccacatatcgataatctctatcttatactgatggtcttccggcagtttccatggggcaataccattacaatgtctgccatagtaaccgatgtaataatcctcacccacgtgaccaaaggcattgtagtctttcatcttagaaacaatgtcatcaacctcattcggattcataaatcgacttatcaggggactattctgtaattcttccatgctctccagatgatgtttttccatgtatgcctgaatatcaaaatcatgatactcctcccatggctcgatcgctcccggaatggcatctacgatctccttcagataggcaatacgctttgggctttctcccttgaggacaccaccctttgcccaccagagcacttcatcatcggataagaatacttcaccatgtgttgcatatgccccttgacagacagccatccaaaaacggtttgccatttcccagccggaaatattaccccaggtcaaaggcaggtttccttcataacagcactcgtcatagcagagcggtttttcaaattccttcatccaatcagccgccttttgtaccaggatggtctgcacgcactggtgggtcacattttttctcttgaagtcataaaaatcaaagcagttgtggttgctgagcagatgatgatatggatcctcttttgcaataaattcctcgattgcataccagtcttccatggttcggctcataatcaggtcatactcgttggtcatgctccaccagatctgcggaatggcagccagacggcggatgagatagtccagataaataaaattctcctccatgctcatgcgagaaaatccccacttatcgtatggatggaaaaggatcagatctgactggatccccatgtctgccagcgcaaagatctgtttttccagatgctcccagaaagcaaaacaaggacggttgacatcccacttgccatcggcatccttttcaaatgcatataattccggatcattgtggttgtaatcataatgtttcgggaatacgcagtggcgcaccttgttaaatggtgcagtcgataaagtttccatggtctgtgcgattctttcttcttcctgatgactcaaagcataaatggtcgttccaaatggtttgaagatctccccgccttcatagacaaaatgtgtcccctcggcacgcacgataccggcctttttatcctcattcggcagacataccagactgccctctgcctgcatcagaccgctcacacgataggtataagtgcctgccagacttgggtaaaagcgcaccttgtagtttccatccccggcataaaagcccttgaccttggtagtctgaccgccgcaggtaaattctgccgtcacatctaccagagcctgcgagccctgtggctcctctcctttgatggtcagttcatacatttcaaattgtttcattgtctcatcctccttttgaaattcattcatatacacatttaccacactactttttaacgcaagactttctccatggcattgcgccagccctgccatttttcctgtcgcttgctttccggcattttaggctcataaacctggcacgctcttaaatcagaaagcaccttgtcatcataaatttcggctttttctcctgacaaaagtgctgctccataagccgatgcctcctgacagacagatacttctacctttttctgtaaaatatcgctctgaaactgcatgagataggcattctctgtggctcctccatcgacccgaagcactgactttgacatacctttatcatactgcattccttccacaatgtctgctatctggagtgcaatagattccaatgccgcacacacgatctcattttttccggttgtacggctcatgccatatagcatcgccttagcatctgctttccaataaggtgcgcccagaccgctgaacgccgggatgagatatgtctcatcggtcggatttgcagcaaatgccatcgcctctgtctcacctgcacttgtgattatccccagattgtcctttaaccaactgaccgttgccccggcataattgatattgccttccaaaacataagatacttttccatccatgccccaggcgatcgatgttaccataccattatccaggacgatcggcttatctcccgcatgcatcatgacagaagaccccgtcccatatgtcgcttttaccagtcccttttcccgacaattctgcccatataaggctccctgcgaatcaccgatcactcccagaatcgggaccggctccgcaaaaaatccttcaaagtccgtctggccataaaaagcattgctgtctcttacttccggaagtgttttggcatccacggaaaaccaaccgcatagttcttcatcccactttaaatccgtgatgttaaaaagttgtgtgcgtgatgcatttgatacatcggttgcaaaggtttctccttttgtcagtttatataccagccaagagtcgatcgtacccagacaaagacgattttcctgtttggcacgcgctacctctggctcattttcctgtagccatgcatattttgccgccggaaaataaggagataactgcatgccggtcttttgtcgaatggcttcgccgacaccaccggatgccttctgctcctgcttggtatccagaataacgttattttctattcgtttacaaatatcctccgcacgcgaacattgccagacgattgctttcgccagcggctcttttgtcttgcgatcccacgcagctgatgtttcacgctggttgctgatgccaagacaggctatttcttcttttgcaatgccagcctctgtcaccacatcttgcacgacctgaagcgtatttcgataaatctcatcgagatcatgggaaacccagcctttttcatttacgatctgctcatgcgcaatatcacgccgacagatcaatcgcccttctgcatcaaacagaatacctttggttccctgtgtactctgatcgattgccaatacatacttttttcctgccatgctattccctctttactcagcaaaaagcgcctgtcttgctgactttgcaataccttcgccatccatgccatagtaggcaaatacctcttgggagttaccggtaatgacaggtgcatccggcaaggcaatgttggtgactttctttgagcattccgcggcaaccacctggctcaccatagatccaagaccgccaaatggcgcatgttcttccacggtaactacaagttttgtattctgtgccgcctcaacgactgcctttttatccagcggtttcacacagtacatatcaatgacacttgcactgataccctcttttgcaaggatttctgctgcatccactgctttttttaccatttcaccacaggcgatcagggtcacatcgcttcccttttgtaaaattacagcctgatccatggtaaaggggcaatttttctcattgtaaatatccccgaccggatttctccctacacgaacataagccggttctttatcctgtaacagatgctccataagtttttttgtctggaaacggtcgctcggcagatagacgcgcatccccgggatagcactcatagcggcaatgtcctgcgcagaatgatgactcatgccaagcgcgccataggaaatgcctccactgatcccaatgagttttacgttggtatgggaagatgccacatcgatcttgcactgctcataggatctggtagaaagaaagcaggcaggcgaaaaagcgtaaggcttctttccacagtgcgccatgccggctgccaccgaaaccagatcctgctccgcgatccccatctccacaaactggtccgggtaggcatccgcaaaaggtgtcatggaagcagagcctctggaatcactgcaaagcaccgtgatctgcttatccatttttgcatgttctaacaatacatcgcaaatgacctttcgatttgccacagtattcttatctgctgtcatttaaaccgcctcctctctcttttttagatctgccatgatcgtcgcatattcttcctgactcggcacatgatgatgccaggatgccttattttccatgaccggcgcccccttgcccttaatggtattggcaatgatgaccgtcggctggttcttggtattttttgcttctataaatgccttttgcaaagcatcaatatcatttccatcggaaacatctatgacatgccagccgaaacttgcgaaacggtcatgcaggttttcatgacccatgacatcttccgtattaccggagatctgcaagtgattacggtcgatgactgcacaaagattgtccagatgatactggtgtgccgccatggctgcttcccagatggagccctctgccagttctccgtcacccatgaccgtgtaaacgcggtagtctctgccatcacgtttccctgccaaagccatgccaacacagaccggaagcccatgtcccagagaaccggaattcatctcaattcccggcaatttgttgttgggatgtccgatatatggagagccgaatttagaaaactgatcttttacctcctgtaaagggaaaaatccctttttcgccagaacactgtaataggcttccactgaatgtcctttgctaaggacaaagagatcccgatccgggtcgttctggttttccggagaaatatgcatctggtcaaagtaaagttccaccagaatttccataatagacatatcgccgccgatatgaccgccgccccctgccataatgatatccacagtatcctgacgcagttcataggcgagtttttttaattctttatttttcattttcctgcccttctttcattccccacgcaagtaggctttgacttcttcctcgattggatcgtacagatccggtttgacgccaatgtatttgcatgcttcataaagcaccggaacaacatccttatgaatacccacgcagtgatggatatatggtccttccaccagttttgcttccagacgcttgatgttatccacctctacccaaagataggtacccataccctttggtccgtcaatgcccttggcatgtccaagtaacaaagaatactgccccagatctccgtcaaaacgcaccagtgagacatctccgtgttttgcctccgcggtaatacttcccggatggtcaaatgccaaaggataggtaatggtcggcttttcgcctgccacagagatcggccatggtccacagtgctgcaagagttctccgttcggacaatctggatgacggatggtccaatccgcaaagaaagaccgcacctgccccatgcctgctgcctctaccagaagtgctgtaatggctccgtgaatgtccgtctcacagaccgttggaataccctcttcgtttaaaagcgcatttgccgcacatggcatgatcccaagttccatctgcaactgattccaacactggatagcaatggcattgcagccatatttttctgcaagatgtttcatggctaccttcatggctgccactttttccagttcatcgtccttgatggcaatattcatattggctctgcaataagtcatgacttcttgtgtctcggcgacatttcccagatttttcctgacctcgtccaccaattcgcccataggaatgggtgccagttggatattgaatttttccagaagttcgccttcattacacatggtcgaccagaaatcaaaaggtctggttgaaatctgtaagatacggatatggcggaaggtcttgactacgttgcagaccgccataaagtcacgaagtccgcgctcaaataccggatcttccagacggcaatttgtcatgtaggtaaatggcacgccaaagcgtcttaatacctttccggttgcaaatagcccgcactgggtatcccgaagtcgtgtaccatccggctccgggtgctcatccaatggtccccataaaagaaccggcacccccagttcctttgccagccttgcacattcgtattccgtcccaaaattgcagtgtggtaaaaacagaccatctattttttctgccttaaacttttcagcgatcttaagcatatcggcatcattataaagaagcccctcctcattgatgtccgtgatatctacaaaatctacgccaagttctgtcagcctctgtgcggtcagtccccggtacttgatcgcgtccggtgcactgaaaatactgcgtctggtcggcgcgtaacccaatttaataggatccataaaaatgctcctttcctccgatttacgattttttctataaaataccttgtctctttctttattgaaatgtaaaataaagtaaatataactttatttttactttatttataaaatcgatcaaagaaggtaaaatatatggggatcacaggaaaagaactggctgaaaaattaaatatctcggctaccgccgtttcaatggctttgaatggaaaaccaggcgtttctaccgagatgcgcaaacgcattatcgcagaggcagaaaaagccggctatgactttagccgactgcaattaaagaaaaatcattcgggagatatctactgcatcatttaccgcgcccacaacgccatcctaaattacacgcctatcttttccgaactgacggaagggatcgaagcagagtgccgccataagggctatggtctgaaaactttgcaggtctatgaaaatacggatgacctgacacaggttgtggaggaactgcgcatttgcggttgtgtcggcataatcctgctcggcaccgaactctcagcaggcatctgccgtcgctttctcgaagcatccctgcctatggtgcttttggacgccagtttcgatgccatcgactgtagcagcgtccttatcaacaatgtgcaggggacttaccttgccaccggctatctgattgaccgttgcaacgaacagcccggtcacctttgctcctcctattcgattgccaatttttccgaacgcaagaccggttttcaaaaggcagtgcgcgaacacggcatgtccgtcagcaagtccctttcccatgaattagccccatccatcgagggtgccttttcggatatgctggagatcattgacagtggcacaccgcttgccaaatgctattttgcggacaatgatctgatcgccatcggcgccatcaaggctctcaaactgcgtggatacaagatcccggatgatattgccattatcggatttgacaatatttccgagggacgtattttagatccttcactgacgaccattgatattccaagacgtttcatgggtcagaccgccgtcgaccagttgatccgccagatggaagatcctgccagtcataccgtcaaattgcagatctccacatcgctcattaagcgtttttcggtgtaggccgctatcgtttctgctttttcctatcaatttaaacaaatttcttatataaaatttatgtaaagtttccaaggatcaatggttctattgcctctctttttatgctaaaatagagcaaggtcgagatgctctggggagggcatcttcttacatttatcaatagggggtattttacatgaacaaaacactcaaaaaggttcttaagaccatcctcatcattcttttggtcttggtagccgcagtcattctttttatcgggtatctgaccatcacggagtacaagccgaaggataccgagtctctggacattgacggatcttcttccgagacactcgccgcaggtgatgactttaccattatgacatggaatatgggctacgccggacttggcgaaaacgctgatttctttatggatggcggtgaacacgtccgctcctgcaccgagtcacaggtcaatgacaatatcgatgctgttgtggcacagatccagaaggagaatgccgatgttgtctttttacaggaggtcgatcgtgattccaagaggtcttacggcattgatgaattagaaaagatcacttcttctctggatggttacaattctacctttgccagaaactacaaggtagcctacgttccttatccgcttcctaccattggcaaggtcgattgtggtatcgccactttatctgcttttagcgtagatgattcccagcgtatctctctgccatgtccgttcaagtacccgatccgccttggcaacctcaagcgttgtctcatggtcgatcgcgttgccattgagggcagtgacaaagaactggtgctggtcaacctgcacctggaggcctatgacgatggcgaaggcaaggctgcacagaccaagcagttgcgcgaactcttacaggaagaagcagaaaagggcaactatgtcattgccggtggtgatttcaaccaggcattctcaaactatgacaacagcgcttatccgcttgtcagcgaagatatgtggacaccgggtgtcattgatgtcgatgaatttggcgacaatctgacttttgtaaccgacaactccacaccgtcctgccgctctctggatcgtccacttgccggcaacgacagtgatccaagcgtattccagtattacatgatcgatggatttatcgtttctgataatcttaccatcaacacagttgagacaagagatcttggatttaagaactctgatcataacccaatcgttatgaacgtaaccgtaaccaaataagaaatgacaaaaaggcgagagcacatttgctcccgcctttttactatggtaacatttcatcttctatattagtttcaaccttcaacatgcgatatccaatccctacgtgggtctgaatataagaatttgaatcatttcccagtttttttctcaaagttgccatgaatactctaagagacgcaacattgctatcccatgcacttccccaaattttctgcgttatatatttgtgtgtaagtactttccctgtattttttgcaagaatacataacaatttatattctatcggcgtaagctttaattcttcatcatctttgtatgcacatcctgccacataatcaattttaagctttccattcgtatatattgaacttttgtttacattattgtctacttgaagtaacgcaattctgcgttgcataactcttagtcttgccaacaactcttcgacagaaaatggttttgtaagatagtcatctgctcctgcatctaaagcctctattttatcttcatcttcactccttgcgctaataacaataataggcatatttgaccattcccgaatcttttttataatttcaactccatccatatcagggagccccaaatccaaaaagacaacatcaggatcatgcgttgatgcctgtataatagcttcttctccattttgcgccagcaaatatttataattatgtgttttcaaggtagttgcaattaaatttctaataggagaatcatcttcaactacaagtatctgaaacttattcatttattattacctctcctttttttaagtaaaaagtaaatatacagccaaatggaatattatcttttacttctatacttccaccatgtgcctctactacagatttacacaatgcaagtcccaggcccatgcttctcttactatcagcaattttattttgtcccgtatagaacatatcaaatacatgttcctttattgtatcatccattcctggtccattatctgatatattaacataaaccatgtcatttttatttccatatgcaatcttaataatcgaacctgcttgtgtatattttattgcattattcacaatatttataacaacctgcataatcaacttcgcatcgatattagcaataatcaactcctctggacgacaaacttctatatcatgctccaccttatttctatcaatgtgttttagtgcctcgtctatgacatcatccataatctctattgattgattcaatttcatttcaccattttcaatgcgagtgacagataaaagattttctacaagttgtatcaaccattccgaatcgtcatatatatccgaaaatatttgtttccttgtttcattatctaacatttcataatggttacacaagttacatgcattacctgatatagaggtaagaggcgttcttaaatcatgtgatatcgtacgcaaaagatttgctctgagcttttccttacgagcaatcatggatgcctcttccttagctttctcattatcaagatttacgaaagccaatgcacattcacccaaaattgataacaacacgctatattcaaaagaactcagcgattcatgttccactaaaatccctaggattccatatacaatgtcattgttccgaactgccagatataaatgtttggcttctgaaaatttttctgttgtagcacctgctctctttttatttttcaacacccactgcaccacttcatcttctgaatcatccatatatatttcactatttccatatacttcttttgcataaatataaccattgtctatccttccatttttaactggataaatgacgatatctttgtccaataacagaatcacctgatttgccatgacttgtaatacatcatcatacgttctacttttctgtaggagttgatttgtgtcaaataatacttttgtccgataagcagcgcgagcagactctcttgcgctgtctttcaggcgatatgccaatgagcctgtgagtaatgcggcaagtaacatgataataaacgtcacataatatcctggttcatatgcatgaaaggtatatctcggctccgtaaaaatataattaaaaagaagtacactacacaacgaactaattaagctgcaaaaatggctttttgttaagacagcattaagcaaaaccccaaagatatacactgtaataatgttagcctctgtaaatccgctacgactaaaacacaatcccaacactgtcgtaaccagcaacagtgttacggtaataaaaatatcctttttggttggtataatatactccgtcagtcttatctttcggttttcctttatgtccatttttgaatccgggataatatagatgtctacattaggagcagtcataatgagttgctcggttaatgtctgcttctcccaaaaataaaatttttttgtgttgcttctaccaatcacaatttttgtgacaccagagattctggcaaattccgctatctgaaatgagatattttcccccataacagtcgtaatttccgctcctttatcctctgcatatcttatgttattttgtaatctctcccgatctacctcattgagtgaattctgccttacatttgatacatataaagctgtaaattctgcatgaaatgcatttgcaagatttgccgcttcatcaataatccttttgttagaaggtgacgatgacagacataccaagatatgttgctgtttttctcttactatactatcattttgactcattcaatttatgctccaattttttcttacatcataccacttttttctattaagataatctcaaaatttatatgatcctttctaaacttgtcaatttccttgtcgatctcctcaagtgacatatttccagataaacgaacgaccaagggcttccttgtttccatttcttttgtcattcttctctcattttctaatagaaaacgatctacagccctcatcacataatatccaaaaacaaagactgccgtaattaccaatactactatgatattttccaatcaaatcgcctcatttcatatgtgaaaacatttttgaattgctttatgttcgccaaccacaagaagtgtttgtccctcgttcaaaatatcatctggagatatcgccaatttcatactccccttctccttaattgccataatattaatcccatatctctgtctgagattgacttctcgtatattctttccaatccaggcatctggcaattccacttcgaaaatcgcataattatcatctagctttacatagtccaaaatgtaatttgatgtataccttattgctgtccactttgcaatttgtttctctggattcactacttcatccgcgccatttcgtaagagaaatttttcctgaacttcacgatttgcccttgaaacaaccatctttccaccaagttcttttaatagcgatgttgtttcaagagaactttgaaaatcatttccaatagtttcaatgcatacatcgtagttattaattcctaaagattccaaaaagttagcattcgtactatctcctatcaacgcatttgttacatatggcaatgcctcgtttactctgctctcgttcttatctatcgccattacttgatgtcccaattcatgaatttgtttcacaatcaacatcccaaaattgccaaggcctattaccaatactgatttcattttttctctccttatcctactgtaatgttttctattggatactttaatgtacttgtatccttatgcgaaaaagctgcatatataattgtcaaacctcccacacgtccaaaaaacataagcaaaatcaatatgatatgcgaggtttgtgaaaggcttgtcgtgattccaagagtaagccctactgtaccaatagctgaaaagctttcaaacatacaatccaatatcggcaagctttcaaccatactgatgataacagcagctgacactgcaaaaaactgatacataaacataatggttgctgcgctttttacaatggaatcatctattcttcttccataaaaatttgcattctgccttctccgaaatactgcaacagcatttgcaaataaaacagcaaccgttgttgttttcattcctcctgctgtagaacccggagaaccacctattaacattagaatcattgtaagcgtttttcctgcatcagacatttttgataaatctgctgtattaaatcccgccgttcttggcgttacagcctgaaagatagacatacaaacacgtttttccaaaggattgtcataaaattctacaaaaaagaataaaatcgcgggtacgaaaatcaatattattgtcgttaccagaattactttcgtctgtattttatattccttaaggcgtgttttcttcgttacaatatccctccatgtaaggaatcccagccctcccagaataatcaaaatacataccaccatatttagatatacatttcctgaaaatgaggttaaagaactaaactttcctgtcttatctcccataagatcaaatcctgcattgcagaacgcagatatagaatgaaagacagatagccatattccttttaccccatattgcggcacgaatactggaagtaacaataatgcgccaatcccctcaattgcaaatgacgtcaaaaaaaggaatcgtgtcagcttgacaacaccaccaacctgtggtgctgagagtgcattttgcatggtctgacgttgcattaaactgatttttcttcctgcaatcatagaaagaaatgaagctacagagataactcctagtccaccaacttgtatcagtattaaaatcactgtttgtccaaaatatgaccaatatgtagccgtatcatataccactagtcctgtaacacacaccgcagacgtggctgtaaataaagcgtttccaaaggtagtaacctcacctgtttgcgacgaaataggcaacatcaataacattgctcctaataaaatcaccccaacaaatcctaatgttataatttgaaaagatgttaacttttcttttattcttacaaggtatgacacctatgcttcctccgttctttctttttctataaatattttatgtcataaaaaataaggtgctataaattgtttttttctgatataaagattgtataaagatgaaaaaagccatccggtttaacccagatgactctttttacatcttaatatatccactgtgtgcgccccggtgccaagcagttccggacgttcacatgttgacaagtgatactcgataaatttcgcaaacatctcttccgacatagcatttaattccctgcgcatatagtctgccggtccatccgcagaaattgtctgcacatgctccagtcctgctgcatcacgcagttctttcatatcttccaaccgcacatagtcgtacaggtctttttccgtggaatgacaatggaagttatcgtccaatcgtccgtcttcgatacacgcaattgcattcccttctttaaaaccataggtgagcacaccatattcgttcatcagataggcgaccagaatataaccccccggtcttgtcacacgttttgcctctgtcagcgcctgcaacttatcctcgaaggaatacaaatggtacatgggtccaaacaaaagcgtcagatcaaaggtatcctcggcaaagcgttttagctttcttgcatcgccctgataagcctgcagcaaaaattccttgccagcctcctgacattcttttttcgccacgttcgcattctgctttaaacgtcctagattatatttcacatactccacagccgtcacatcatagccctcttttgccagttccaccgcatagcgtccggttccggcaccgatatccagaatctgtaatgttgtatcctttgcattttccccttgcagaatctccagatacttatggatatatttcatggaagtaatatactccacctgcccgtgcctgcgcatcaggcgcttatcctcattaaatttattatagtgagccgtcaactcatccatactcagttcatctccaatagtttatctgtcagtttgcgcagtggcacaagaggatcccatttcttcttaaagagcaggatccataggaagatcgttgcaaaaatgccaataagtgtgacgatcatgccctctttaaaatatgcgtaagcgtaatggatccgtgttgttccagccttaaccgtgatcagttcattctttacaccgaatttccggtcagacacaaaattgtcctggtatgctacattggtgcatacatcctggtccgtcttgatcgtcatgccatttgcatcataagtgatcgtcagcggaacgatctcataagaaacattggtatctgcctctttcatggcaaacatcttttccaccagggtccgcaggtctgcctgtgggtcctctgccagcatataaggcaggctcatgcccacgacatgaatattcttgtcgtaggtcgcaaaatatcccagttccaagccatctgtcacaaaattttccatcgtcacgtcatcattgctgctcgtcagatattgggaaacccacttatatggcagatcaaatgtataagtatcatccccataccgccactcggaaacctttgtcaaagtgatatcctgaacctcaataccaaagagatttcctataccataacgattcttcggaatacttctggcatcgatatacacctctgtcccagcatctgccaaagatgtcaacaattcctcgaacttttgttgatcactataggtaaatccggacagatagatctttttgtactgtttgagatcatccagagaatagccatccagatcctcacttgcaccagccacaaaggacggatacatgtaggaaacatacaaggcagacgatccgatcgccagattgtcagccgatatattcacaccgaactgtccgtctaccccctccagatcaaagaggatcacatctgcattttcgtccacaaaggtatagccatatctctttgccgccgctacaatgtcctctgtcgaaaatccctttggcaggatagattttttcaaaagcgcactgtcacagcccaattccagcaattcctggaaagtataatcataatatccatagcgcgctgcctccgtcatatgcacgatccgcacattggtcgtcgcaccctgaatatcccagccctgcacataatccacattcttttccagtacaaaataggaaacataggatttcagcgtactttcatccacaagacccatacggtttgaagtcaggtctgccgcctcgtccaagaggttttccccggataccggctcctcgatctgggtaaaatagaaataggacggcgccgtatctaaaagcaccgcaaccagtgtcagccagatcagccccttcttcttaaattccagaaagccccactcatagcagatcaaaacatagcacatctgcacataacgcagcatccaccatgcctgcggcaaaggcatatgactcaccaatggcaaaaatgcatctgccgataagacaaagaagatcagaccgatgatcgcgcccgcctttcgcttaccaaagatgataatgacaatggcgattgcaaacatcgccagcccaaaggtacaggatgtctcgccctgctgtctggttgtcacacttaaagacaagagcaggttctggctccaatccgacatacggtttgccgtcgaagaagaggatcccgtcacaacgtcacccaaaagcgctggcaggagaacgatcccggaagtcaggattcccagtacaaaagctaaaggtcctaaataccatgttcctttttttgctccggcaaaaatactatacagtgaaaaaataatggcacacatagcagtcaacatgatatgagtcgcaacaaacaaaaataccatgatcactgtcggaatcaaagattttttcttttcgatcagattcgtataaaaataaaagaaaagcggcagcatacccgacataaaggcacgggcaagatttccctcaccaaacatcagacgcacgttatccggcaaaaagaaataacaaatgccgatcacgataaagaaaaaccgttgctcacgattggcaatcagacaaaatccgatataaccaaccgcaaaaatggtcacaaagagcagatagtaagataagagcagactacctgtcagcagatagccgatcgccatcacataataagcaaagatcggccaatagcggaacatctgaaatccattgtaccagtcctctgtatagaggggaaaaagcacaccttttttgatgttttctcctaagaattccaccttatacaagtgtccatagacatcttctcctgccggctgataacctctcagatacaagaacaaaaagatcccgagagaaaccagtatgccgaccaaaatttcaatggcaatatattttttattgtggttctgttctttgtttttttgtttcataagcctctaaactcgttctaattgcttttttccgtgctttcttacaccgatcaataacagtatcgctgccacaagtgctcccgcagacaagagcataccctgcgtaaaatatggataatacaggatgatcgtcgtcgtacctttgttgacataaacctgatgcccattgatgtcataatcgtcagatgcaagcatattatccgtgtcggcaagtgtcgtgttgacattgtcatattgggatgtgatcgtcacttccttattctgcacatctacggtcagcggcacgatcttatgatccggctccttggtcacataagaaccgatcagatcgtctatgatctttttgctgccatcctcatccagtgtccggtaataatgatatgccagactgataccgataaaagtaatattttcattcttggctgttccggcaaacgccatctgtacgccgttttcatacaaataacccttgacgttggtcagaccgttcatacagacggtcttccactctgtctcgtctttcgggaagagttcgcacagaacttcctgatcgttgtaataaaggataggataaccattttcaaacttgacactctgacaatccacacctaaaaattcctggatacccgtgtaggtatcggttggaatactgctggcatcgaccacgactttaacccctgcctttgccagtttcatgaccagattttccgcgctggtctgatcgtcataggtaaaaccggacagatagaccagtttatagtcctttaaatcagcaaaagaataatcgtttaaattatttgatttcccttggatcatatccgcataggaataggtcaaaagtttccccgacgtgccgatactgatagcatcataccggctgacaacaccaaaggtttccggtgtgtcctgatggaaaagataatatttgcccttgctggcaaccagatcatagccacaacttttcgccgccacgatcacatcctccatatcttttgcgagatacttggtcgcatccgtatagatcaacaccgtatcatttccaagtaaaaggagccggtcaaataaataggtgtagtgtctggctccaaccgcttcgttcacatccatgatattctcggatgttgccgcatactgccagccattgcctccgctctgtgccactatgccctgtccgtcatccgctaccgttgccacataggctgcacttgcgccataaatatcaccatccaggaaatacatgcgctgctttgtaatctgtcgtgcctgatccaacaaagtcgtcttttcaaaaacatccaactggtctgtcgcatcatagtatgcctgcccctgatttaccttgatcgatggataggcatctatgacaagcaccgccacacaggcaagataaaagatctttttcaaagatttccaataaacaaaactaagcaggatcatacacagggctatggagatatactctgtcatccagaaatatcgtttgcccggcatattggataaaacaatataggcactgctggtcgttcccagaaagaggataatgcctgccacatagccaacacgtgactttttggaacctgcaagcacgccaaagactgtcagtaaaaaggcagccagcccaaaataataatgctggtcatttccctgcaaacgatagaccggatttaaagactgcaaggcgctctggaagtaatttttcatgactgtgacattgtaggtatccgatccgtccccctgcaaggatggataaagccatacgcccagaagcaggatgccaagcaccatggctgcaactgcaggtaggatacccggcttctttttatacataaaatgtaccaaaatgccaaacagcaggaccgtgatcgccacaaaaatactgtagcgcacactgcatgccacgatcaaaaactggctgacgatcataccagctaaagttctgctctttttgacctccgtaaaaaaccactcataggtaaagccgatcaataccggcaaaaagatcatggcacatgcttctgccaaatttcccaataaaaagagggtatgcatattattgggcataaagaaccaaagcgtgccgaccagaaatccggtcttcaggcgtccgatcttctttccgataaagatccagccgaccgcgcctgcaaaatagagcaatcccacaaaaaggagatagcctgtattggcatcgccgcccacaagagcctgacacgctgctataagatagatcggcagaggctccacataacggagtaactgctccccattaaaccaataaggatcatagagaggaaacccgtttccctcacctatgcctttgagaagcatctttgcacgatagatatattgtaatgtatttgttcctgcgggatagtttccaccgcgataaagcatatatacaagaccaactgcgatcagaacataaagcaccagcataacagcgatcgtgcatatcgtcttacctctttttttcatggtcagtcttcctttttctgcgcgatccggtcaacgactgcatcaatttccgcatccatgctttccttgcgtctgtttctgatcgtttccttgaaatcctcgtcttcctcgaaactgatgatgtaacttctggtcggtgtttcgctgctctccatcttgatcagtttggcatcgccagcctctacaatatcgcggatatctaagataaacttttcggacatgttttccagggttggaatcacagtgtcaaaaggttcaaaattgttcatgattccgttttgatacttggcaaaatactcgctgatagatttctcgtaagtattaaattccacgaactcatcatttttgatcatgatgtcaatggtaaattcccaagtgtggggatgtgtctcgccctccacaccgttgatgatgatataatgattcgcattgagataaaatttaaaacgataggtacggttcaactgtaatgccatgaattaccactccttttcttccgcttccgcgcatgcctctgtaatggtctttttgctttccttaatatcttccatgtggcggatctgatcgaccgctcccacattatggatcacgcgccacgccatttcataggtatagtgacacatgaggagaatgatccttgtgtcatctttcttaaatcgcaggatctcatcatctaatttggtcatagaatctgccaaaaactgtttggtgtccgcctccgttgcaaaacgcagcaccgcaagcactgcctgatccacatttttctcatccaatttgcgggcaaatgcaggaagcactgcctcctgataaagatttaatctcgtatcgtaggcatccctctcctttgcttcgcgctccaagcgctcgatgtgctggttctggatctccagacggctatgcaaaagattgttatcaagttcccgcttctttaccgtcatttctgctcccatggctaccaaaagcatgagtaccataatgatgatgacataaatatacatactgatacgtgttgacaaaaattcgttgttatctaagataacggtctcatcggtcaaaagacacagggtatattgtgtgtcattgtaggaaaagatcacaccggatgccacataacgggatccgtccatcttgatcagttcatgggtcacatggttcaagcgcagggattttacaaattcatctgccgaacttgtgtcataaaacttatccagtgaagtcccctgatatttgtctgtctctgtaacatttttgacaaaaaggatattctcctcttttgacagggtccagtaatgtgtatttccactatccagagtctctataatatcagaaatgatgctttcctcggttccattttcctgtaaattaatctgatccagcaccaactgcacatagttatcctgctgggtcgcataaacattcataattgtagtcgtatagcgcttcatcagataatgtcccatcgccgacatggctgccaccacgaccagggtaaggatcagtatattccggaattttctttccagtttcctgatatctgtctttttattctgccattctgctgtctgtcgcagttctttctttttcaaaatcctgcctccgtttatcatcatatcttacggtcattcgtcttccatccccggcacattgacaaatgcacggaacttctggatggctccccgaataccggatgtattgcctaaaaactcatctttaaatgcctgcttttcttcggtaaaattacgtgttttccatgcactgctggtattgatactgttgatgatccctgcaaagcggatgaaaaataccaaaaggttaaagaatggcaaaaggaacaccacataccactgcttcctataatacttctgcaattccttaaatggctttaggaataccactgtcgaaaagaaatagaaaaatcccacgacaaagtagcccaaaaacaggatcgctatcgaaaacaaaaccatctgcatggagtaattcataaacagcaggcagatcaatgccagataccagatcatgcgcgggaaagcaaaagtatgatcgtagaccagggtgcgcacggtcgggtcagaaaacatgcggttgaccttcaatttgtcctttaagaacatggaagaaacttccagacttccgcgctgccagcgctgtctctgcgtatataacttgttcatatcatcgatcgggtcaacaaaaaagatggcattctcacagatctgcaccttttcttttttattgtagcgcatctggaaagtcagttccgtatcttcacaaatggtgtccgtattatacatatgcgagtttaacacggccgacttacgaaaggcagaaaaagcccccgataaggtatagaccgaatttgtctcggatgcatagtttcgccctgccaaaaatgcctgcgcatattccatgaactctgtcttgcgcaataactttggaaatacccaaggatactcctcgatcaagcgcggctcgatcaaaatagccccggtcatgacctggatctccgggtctgcctcaaacttggcgatcagatttttcaatgccgacctttccaaaataccgtcactgtcaatatttatgatgtatttgcccttgctgttaaaaagcgccatgttcagcgccttggacttaccttgttctgcattgagccactgcatgatcagttccggatacttggactgacaccggcaaaatacctgaaaactgttatccttgccctgattattgatcagatagacattgatgcggtcatttggataatcgctctcatagatcgatcggatgcaggcttccagtgtgcccgcagaattatacacagggatcatcagagtgatctcaggataaaatcccaagttctgctcctctgactcctttgttttttgtttgatacgtttgtgtttgcgaaataatataaagatgttaccaatcgccgggaccatttccatgataaatggaatgatgatccacgcagcccagaaaagaaaggaatttaacacgctatttatcgtgaccatacgcaaatcctcccactttttgccggataatctgtgccttggtaaatacaaagaaatacaatattacagtcagcgcatagaacaccaatctgcccacaatggtatgtgctatatgataggcaccgataccattgaaatagataatggtacagatgacggcaatacgcagtgcattggcaaggataatgtaaaaaatgccaactacacttacaatgatacgttcaaaaatgttgtatgcctcaaaaaagacaagcaatgccagatatgccatgatctccagaataccggaacattcaaagtcgatctggagcgtgatggctccgtcggcggcattgacaaataatacgccatacttgaagaatgccgtatacatacctgtgatatcaccaaaaacaccagccactgcagcaactacttctgccagtggctgggtcatgataggtcttacccataccatcatgatgataaaaagtccgcaggctccccagaaatacttccaggctttgagctgcgctttatgcatcagatagtaaatataaatccaaactccgattaaaacgaatccaatgatatttttcatgctaaccttccggtgcgtttttta

SEQ ID NO: 12492 - DNA, 13772 bp, Unknown
  gut microbiota DNA sequence
acctgtgcgatcacaacaactgccagacacaggagaatacctaagatcggtcctgtagatgtaccgccacaggatatccactgcgatccgatacgaacatagttcacatggaatgtcttcatgtcggactgcttgagattccagtcataagcaccccattgctccggtgccttattcacaacctctaccaaggttggaatatcaatgtagtattccatctgtgccctgccggtcttatcgacatggatataggctctgccatatgtataagtccatggatcattgatgttgctagcagatcctacatatgctgtatcaaaaagataaaattcataatctccgggtccaagattggttgcatccttccactgctgcacattgccattggcatctacgccacgcagggtgaaatacatggtatttctgctgttttgaccgtttacactcaaagtaatgaaattgaatacatcgcggtagtaagcaccataataatctacatagccaaagagaatatcaccgtccgaatacaaagccccggaagcatctgccttggtattgtaaccgatggatgtcttctgatagccttcccaatcagaaaaatcatagtcataggaaatctttttgagcgttcctgtcgtcgtatcatctgtatcaatgcctggtgactggttgacacagccctgtgtgatatagatcggtgtcgtatccgtcataataccgaaattgagggatgtgatcttgtcattaaaaccttgcaggctggataccggcacggcaatctcatactcatgattgctatagcggaagtccaactcacgcaactctttgccggatctgacataggcagctgcattgctgatcatgatattggtcttggtaccatcactcagttcaatgcagtaagtaccattattccatgggcctacctgtgttgcacagccatcccaccagtcctgctcacgcaaatagaggtaaacgtaatctccgatccatacagccgcaccttccttcaaggcgcttgccgggttctgcgttttttgcacattattccaatccgagaaatttccatcgatcgtaatgccgcttgctgtagtcactgccagatcagcatttgcgtcctctgtagtatcttcttcattctcatcaatggcttccacggtctcctctgtggatgcttcggaagaattaccattgccgtagcccgtctcatccttcggcttttccagtacagacgcaccgtcgatcgttgcaatatcactgccggaaacggaaacaccggcataggttaaagtaaagtcctcagatgggaaccaggatcttggaatagcaacttcagcgaaggcagaatctacattgtaatctgtattgccgccctcaaagaccaactgcgccccggatatattgttgttccagccatccttgacaacataagatccactgccgtctgaccagtcttgtacaaattgaatggtgctgtaattggcattgtaaagttgactgtcattgtatgtaaggctcaccttggtattgccgatcgcctcgccatatgccccggtcggattctgcgctgcatataaatacagataactgcccgatacacaggtcttccaatcgctgacagagccatctgcagaaccacggctggcgatactgccccaatccgcgctattgccatcgcatacgacactgtccgatgccagtacatcccttgcctgatccggcaacagacagactgccgatgcaacagccatacttcctgctaataataatgaaattattttcttgcccttcatgcacctcatcctcttatcataaaaaactacactaacatcttttatagtaaaacattatacccactatatgcccatatttcaagaattctgcccctgaaatatatgtcaatcctgtgcgttttatactgaatttatcggcattttcctctcagatttcaaccattatcccaacttcttccaggtatttttggaaagcaggatcatgatcgggaaaatttccagtctgcccgccaacatatcaaagatcaggatgatctttgacagaatgctgaaatcatggtaattgcaagtcggtccgacgccatccaagcccggtccgatattgttaaagcaggcaatgaccgatgtcatggttgttgtcaaactcttaccatccagacaaatcacaaggaaactgacgatggtgatcatcacataggcgatcagataagtgttcagattatccagcaccttctcgctgacgacctgaccattatttcttacaactaagaccttttgcggatttagggtcttttgcagattgcggtgcaggttcttgaacaaaagcaggatacgaccgcacttaaaaccaccgccggtactgcccgcactcgctccacagaacatgaggataatcaggatcgccttggaaaaggtcggccagaggtcaaagtccgtggttgcaaaaccggtcgtcgtgatgatggtcgccacctggaaaaatacctgctgaacagtctctcccagactgtggaacatagatctggtattgatggagatcaggaccacgctggcaaaaataagcccaagatacagtttcagttcttcgtcctttaagacatccttcaccttgcctaaaaggagcatatagtaacaggtaaaattgaccccaaagaggatcataaataccgtacagacattctggatgtagacgctgtaacctgccatactgtcattttttataccgaatccacccgtgccggcggttccgtatgcagtacagatcgcctcaaagggtgacataccgccgaaaagcagaaacacaaaacataagatcgtcaaggccacatacagggtatataagatcgtcgctgtctggcgcatacgtggcaccagtttgccgacatttggtcccggactttctgctcgaagcaaatgcatggtaaagccgttgcccttgccactggcaggaatgaccgccagaagaaagaccataacccccataccgcccagccaatgggtgaaactacgccagtagagcatgccataggacattgcctccacattggtaagaatggatgctcccgttgtggtaaagccggaaaccgtctcaaaatatgcatcaataaatgccgggatctcaccggaaataaaaaacggcatacagccgaccagactcatgatcgcccagcccagacccgcactgaccaatccttctctggcataaaaacgcatctctgccctacgacagagcataaacataagcagtcctacaaggatcgatcctatgatcgttgttgcaaatgccgtaatggaagtcgcctcgccgtggatcagactaatgatccatgccggcaccataaagaccgcttccgtaatgatcacgagggacatgaaacgtcccaccatcttatagttcataccaaacctcgttactctaatttatattatgcaaacatatcatttaatgtgtgaagaaccacatcgccgttcgttacaaccactaaggtatcgccaacgtcgaaggtcgattctccatccgggatgaccggcatctttccacgcgtgatacacgcgatcagcacatttttgcgcaactgcaattcctttaacggcttgccacagtttcttgtcttttcatccacgcgaaattccaaggcttccatctgtccctctgcaaaagaatgtacggataacgccgcacctgtggtattttccatagcacgcacataacgcacgatctggttacagcacaactccttcggacagacaacgcttcccaggttcaagatatcctggatcatggaattctcggtatgatccaccttggtaatcacctgttccacgttacaattttgtgcataaagcgaaatgatcatgttcatctcatcataacttgtcatggtaaccagagcgtcacactgctctaagccttcgctctccaagaatgtctgattgctggcatcgccccagatcacggatacgtccggcagatattttgccagttccacgcaacggtctctgtccttctcgatcaaatgtacatcaataccggcgcgcgacaacatctgtgccagataaaaactgacttttccgccgccacacaggatcacacgttttgccttatgggtgatgatgccaagatttttcaaaaggcttgtcagttccttggctgccgccgttacatagatacggtcgccctcttttaagacgaaattaccatccggtgcactgaccacgccgtttcttcgcacagcacacaccaagaccttactctttacgatcgagttcaggtcattcagtgcaatgttgcaaagtttggaattttcttttatcttcaattctacgatctctgctctgccacgcgcaaaggtgtctcttcgcaggaaacccggataattcaagagacggtcaatctcaagtgcagcctgtctctccggatttaccgtcatagaaagcgcaaaagtatctctcattttatagatctgatctccatactctgggttacgaatacgggcgatcgtatgaatatcaggattcatgccatgtgcagtcatgcaacataagaggttgaactcatcctttcccgcaacagcgatcaaaagatccgcctttcgtatatttgcctgctctaagacctccatagaagcacagtttccctgtacactcataacatcaaaacggtcagaacatacttccatcacctgttgattattatcaatcagcgtgacctcataaccttctgccagcagttttttggtcagcatacagccaacttttccggcaccagcaatgataactttcacttttaactcctcctagcaaatcaaattcgctcatactccaatatagttgtatatcacttgttccaaaaaggcaactgttttatcatgtattcctctgtaaattctataaaaagtgtatcaaaatctgtctccacccttgttaatgcaatgtcactgattttatggatttgtgatatcaagctgatctttttaactgaaaaaaattaaatacttatatatgtaacaaaactcctgctatctcacgtaattcagagacagcaggagttttcttatttataaagtttttgcaggtattatgataaagcaataacctgaccttccgtaatgccattttcattgaaagcatccacgcggacaaagtaattctgtgtggtaacaagtgccttaatctctttctcggtcacgccaaataccatataactatgatataacttgtctgccttatgtccccagaggatgttgtaacctacgacatcatcactaggactctcgatcgtaactttcatgtatctgcggtcagcctcacgttttgctgcaaatgtaggagtctttggcgcctgtccattccccctaccaaagacacgaagtccgctgatgcaggctttctgatcataaggcacttccaaaacagtcagtttcaggtaacgtatctgtaagccatcctctcttaccacaagatcatgtggcaggtttgttgtaacttctgacttatcctcaatcataaagtaatctttgccatccacggatccttccaatgtccagcgtgtgatcagatcgcgctcctcaatataacgctttccggtctgatttccacgaagttctcccggtgttgggatttcgatcttgtcgtctgcaaagttgacctggatcgcatgtacatccatagtctcgcccaggtctacttgtacccattcacccggcttttcgcttgcagcacgccaccatgtacggacattttcctctgtaaccttatccgcaccttttccttcttctgcagaagatgcggtcgcgttctttccataacttaagagcatccactccggattcttccatgggtcctgcttatcaccgctgacagcctgtggccagtcaccatatctctgattacagaataattcgccgtctgcatcaaagcccgccggccagacaccaacacgacgttcaaaattatgattcatactgatgcgcatagtagatgtatgccaaaggttgtcgttttgatcacgcatagtcgaaccatgtcctgctcccggaataaatccgcctggtttgtaagaatacggattattctgtgccaatttgaaaggtcccagcggggaatccgatacataaacaccatccgcatacacattatactgtgcaccagggcaggcatattggagataatatttgccatcatgcttgtccatccatgctccctcgatgtatgggcgaccgctgacataaccctttaacatgatagccatgccctgcatctgcggtggcagattatccggatccattccttgcatctgcatgaatccacgatattttgcttccaaagcatcgtcttccaaaggcaggtcgcaatggtcttctccacagacttcataaccattttcactccaattaccatgcacaagttcaatacgctccgtctttggctgcatggtctccggatccatttccacgccccagattggcgtcatattggcacatccccaataaaaatatacttttccatcatcatctacaaaaaggtttggatcccagaaatcaaacgttcctttgatttcctcataaggaccttcctcaatattctttgtacgataaaaattgcaaggttctcctcttttggatgctgaaaaatatacataatccccgatgactctgacatctggtgcataatcataaaatggcagattatccggcaaacgctttgcttcccaatttgccatatcttcagatacccagacacccagtgtcatagatgcaaagatataatactttcctttaaaataaatcatagatggatctgccgcttcacgcgatacttcgatcgcaccctcacccaatcccggcataacctgctggttgaactggtaacggtaatccacatttaacggattacaaaaatacttcatattccttttcctccttcttatatgcacattccagcgcgaaattatctattcttattttgtatcataaggcagcctttcttttttcgatatcaaaattttgctttttttacaaatttttatatatctttttgcatctgatctttcttggcaaaaaactgatacaaaaaaatcaactactttacatggtaatgcaggtatcttttgctataataaatctaacttggcagaatactgccaaaaaccgatttgacaggaggtatttactttggaaaaacatgtatggggacagacacccgatggagaagatgttgtagtttacgaactgaccggaaccaatggcatgcgggcaagcgtgatgaattacggtgccaatcttttgacactctttgttcctgataaaaatagggattgcaaggacattgtacttggctatgaacatttagaagactattttaccaacgatgctttctttggatgcagcgtcgttccatgcggcaaccgcatcggtgatgccaaatttaccttgaatggcaagacctacgaactggataaaaatgacggtgtcaacaatttacatagcggcttccatcctctttgtcgccgtatctgggatgtcgatgccgtatccgaaaacagcatcactttttcttataagaagaaggatatggatatgggatttccgggaaacgcaacctataccgtgacttatacactgacagaagatagggaactgcgtctggactacaccggactttctgatgcagacacaatcttcaatcctaccaaccactcttactttaaccttgccggacacgatgccggactttccgctatggagcagaagatctggatcaacgccagccgttttacccagacagacgacgcttctatcccagacggcgtacttctcgatgttgcaggcacaccaatggactttacaacacctaagcctatggcaccagagatggatgatgcttacgagcagcttgcatgggcaggcggatacgatcacaacttcgtactcgacaaaccattgggtcaaatgggaattgctgcttccttctatgatccggcatccggtcgcaagatggaagtctacacagatctgccgggcatgcagttatacggcggcaattatatcaatgagggactagtcggcaagggcggctgtacttatggcaaacgctatggcgtagcctttgagacacagtatttcccaaatgccatcaacatcccatctttcccgcagccgctagaaaaggcaggagagacggtcaagacttctaccgtttacaaatttacgacaatataattatctaaaaatccccgggacgactcgataatcagacttctgactatcatgcatcccggggatttttctttttacacgattaatttttcagatattttcgcatggctgccccctgcgcatacttagaaagcggtgcacgatagaccagttttgcgatcagatattccagtcccacaccaaccagcgcacttgcataggcaaagaggatgactagcccgggagatgccggaacaaaagacaagacaaaactgctctcccctacagattgatagcccataacataagatatcggacagatgatcgcgaataacaatatgatcgataaagcataatacttatacaccaaagccgtgtagagatgcaatataatcatgatcagacataagatgacaaaagcacttaagacaactcttgcatggtccggatatacctttacctccacaatcttcaagacaaccagaatactcatggataccagagtggtcacaaggtcgccgagacacgccagtgaagtctgaatctgctttccacgtgggcttgccgcaaccagccccgacatacagatgctatagagggtctgcgtcacaaaaagcggtgacatcatcataaaaaacatgcccagccaataggttccatgcgaaactacttccatgacaagaccgatcacatacatgatgagcatgctgaccagttgtgttttcctctgaaaaccatatttttgaagttcatatatatatttaatcttctcgatcataataactcctttccatccttctaactgccaatctggcttctaggatcgttgcaataatcgccagcagcagggctacgccccattgcaggatcagattaccctcataaagacaaaagacaaggataaccgccagaaccggtgccagataagaaaacagcaagttgctgacatagcctgcaaaaaaccggcttcctatgatggcaaaagtcgcaacggctcccatgatcacgcccgatgccaccgaacacatacaaatgcctgccaggataccaaagtagagacacctgcgaacgccgtctacgatcagcatctgcccatacaatttcatgccgtttgtcgatgccttcactaactcaatcccgcgaaattctttgccatatataccgctaaagttccagctatctgtaaagacttccagcaagatatatccgataagtataccaaaaccgatcacactaaactccggatcagggccatcagatgcagataataccggaatcctgctggtaaagataacaacaagtgggatgagcaaaagtgctgtgatcttgtatatgagtgttgtattattccaatacatttttatcgctttcatcataagcccccttactgtagatgcaccttgctggattttttcatgatcgccacactgatctgggacaaggtcggtgtctgaacggtaacatctaatcctgccagtttatccatatcctctgccagacagataccctcgtaaccatagttgttccttgtcatgctgtacataaatttctcagccatcgcaagatcctctaattcgcccttcacatagacgtatttttccttcaggtcttccacaaagcctctttcgaccacctggccctgctctacgataatggcgtagtccgtcacattttccatatcagcaatgttgtgtgttgagaaaagaacggtcttctgaccggcgccttcctccaaatagccacggatcatatcgcataaaacatcacgcatcaatgggtccagcggagatgccggttcatccaaaagaagcatctgcgtctctctggcaaaaacgccggaaagcataagtttcatacgatttccatccgataaatcgttgacctttttcccgcctcctttgtgatctgtcgtcacaatctgtaactgctgcagatatcgctcaaacttcgtccggtcaaatttgtcatataacaaatctgtaatttcctcgacttgcttcaccgtccattgtggaaggtaataattattcggtccaacatatcctatcatttctttcaccggacaatctgcctcttcacgctccttatcatcccactgtccgaaaaactccatgttgcccttataatcgagccgcacacccgccaacgcgttaagaagcgttgtctttcctgcaccattttctccaatcagggctgtcgcaaacccctgtggaatctttaaacatggtatatcaagtgtaaatcccttaaattttttactaagattgttaactgcaactgctgtttttacctgttccatattctgctcctattcctgcatgttccatagcaaatcaaatgtcttcattacctctgtttttgaaattcctgccatccgcgcagccttgatcgcgtccgtcagactgtcctcgatcctgcgcatgtgctgttcctgcagcatctgtgaatcctgtgcgttgacacagaagcctttgccctgaatggcggtcaccagcccctcctcttcgaggagttcatatgccttcatcgttgtaatgacactgatctttagttcctttgccagaccgcggatcgatggcaggtactccccctgctgcatctttcccgaaagaatgtcactgcggaaagcatctgcgatctgttgataaatcggtattcctgaattttgtattaacttcatagacatcacctacctgttttttaactgttatataactgtttatgtgttatatatacagtatatgcagttatatgtcaagggtttatggaaaatttcttctttcaacgacaaaacagactgtgcgagatcttttcaatctacacacagtctgttctctagtggaagtttcctacttgcgttttatgtaatatttcttggcaaatgccaacggtatcaaggtcagaagcaccagcacagctcctacgatgagcagggtatgggtcggcagatactccgtaaatccataggaatctacgaactttccgctgcgcatgataatcggattggagatcatcggtgcaacgatcatcgggattaggacaaagaatacgatacgaatgccctcaaattgtcctctggcatcctccggatacaactgtttgccccagacggtaatcgcctgtaaaaagagcatataaccaagtcccaaaacaaagatacctaagagaagaaccggattccaaagcgtctgcgtatttacattttccggtcgtacaaaaagccccaacataccaacgccaatgcaatttaaaaataccgcaatctgacaaagtcccggaatttttccctgattgatgatcttcgttgacgggataactgccaacatggcaagcacaagtccaatgccttccatatagcccatcatatccgctgtaaagcccaggtaatagatcatataatttcccaaatgggtaaaatacatgttaaaagcgataaaatagaccgccagtgaccagttgacccagaccagttcttttaactttacatactcttttacattaaagatggaaaagaactgctgtccgaaactgccacgtttactctctttgagtcccggtgcatctttcatggcaaagagacaataaatgccaaacaggatcacaaggatccccatgacaagaaagagccgcatataattgtcatctgcaccgacaagcatacccccgagcactgttcccgcgatcgttcctataaccggctgcgttgcaagcgctccgcctaattgccctctgttatcatcattcatgtgatcgttgatccaggtattgaaaccgacatcatttcccatggatccaaagaaactcatgattgcatccgcgatcacgacagccgttcctgccacgataaggacgcttcccgtgctatttccactgccatccgtcatgtactgggtcagtccaaatacaatggtaaaaatcccccacaaaatatagcccagagcgataaagatctttcgctttcccttacgatccgacacacatccaaacaaaaatgtcgatatggtcgttgcgatcgccgatatggcgaccatccacgaaatgatcgtcgggtctttcgcgatctttgcatagacaaaggtgttgaaccattgattttccatgttccaacagatctgtcctgcaattcccagcccccagactaaaaaccaaaattttgccccctgtttcttttctttcatgccttcccctttccgatgtcttttacacctcaaaatccatgcaagaacgcgtcgccgtgtatggacgcaccttgccgtctgcaactgctacatgcgccggatgcacactatacccctgcaatgcctccgcgctttcaaatgtcgtatccaacatgatatcgacattagaacttggcagactctctgtctgcacatgaatctcaagcaagcccgggatctgccccgcgagaccttccaagccttccttgatccctgccttgatctgctgcttttcttcctctgaaaactcttccttcagtgtccacaaaatcacatgttttaccatttttcctcacctttctttttatcattttctttatcatttttaactaaaatatatttcatgtgccaaaagatagcaagcgtttcacactgctttttctatcgtaactcctgctcacgaaatagtgcatctacagctgcctgatacgcaaccagccgctccgattttttgatctttttcaggtatttatccgcattcgtaaaacaatccccaagataaaaccacaattctttcatacggaataatacattgcgatcgcccgacatgatctgtatataaccttctaagatctcttgatgaaaggcatagaggcggtcttttttctcctgcatatggtcgtgcgccgcatcatccgccgttttcctccctacatcatccgccgtcttactcatttcgatcaaaaaaggattacacaaaagtccccgtcccagcatgacgcgatccaagtccgggaaacgctccttccgatcttgtaaatcctctgccgagcagatgtccccattatagcaaagcctgtgcccgctctcttccatcgcataagaaaaggcatcgagccgcggctttcccttataaaaatccctgcgcactctgggatggatgatgagttcctccaatgggtatttctcatagactgccagaatatccttccactcctcctcatcttccatgccgatccgcgtcttgaccgagatcctgccatcataagcggcaaaaatctcatataaaaaacgatccaaggtctccgggtcttctaaaagacccgcgcctcgtcctttggcaacgactgtccccgacggacatcccacattgagatttaccgtgtcgtatccatattgtgtgagttctccagcgacagcaagaaaatgctcacttcgatttgtcaaaatctgcggtatcacacacttgccctcgttattctccggcaaaatatctctacgttcgccactactcatctttttatttgcaagaaaaggggtaaaatatcgatccatcggataaaaaaacttgtgataggcattacgatacacataacccgtcagtccttccatgggtgccatataat

SEQ ID NO: 12493 - DNA, 46951 bp, Unknown
  gut microbiota DNA sequence
cattggatatattgacaatgtatgaacatatgaatataattacatatgaacagatgataaagagaaaaaatacaaaagataaagataaagaagggaggatttcaggtggcagagcagaagtcagaatttttggcggcacacgaagatttggtagagcaggtactccaaaaccagccggaggatgaatacctgtatgatctggcagaacttttcaaggtctttggcgattcgaccaggatcaagatcttatatgccttgtttgaaagtgaactttgtgtcagtgatatcgcacagatcttaaatctgaaccaatccgcagtcagtcaccagctccgcattttaaaggatgccaagttggtcaagttcaaacggagcggcaagagtattttttactcgctggatgatgatcatgtgcgcacgatcctatccatgggtatggatcacgtagaggagtaaagacagatggatcaccatcttgtatgataaagaataaaaaagaaaaaggagaacaaaattatgaaaaagacatatgatgtagaggttgattgcgcaaactgtgcagcaaagatggaggaagccgtaaagaatacagagggcgtaaagaatgcaactttgagtttcatgaccttaaagttaaaggttgaatttgaagaaggcgcagatgtggacgctgttatgcagcaggcatacaagaactgcaaagtcgtagaagacgattgcgagatctttttataagaagaaccgcgtttcggggctgtgccacggaggcggtgggagtcgtaaaggagaagatagatgagtaaaaaacagcaaaaagtactgaaacgcattgttgttgccctgcttttattaatagcagtatccattttggatgctttggtagagatgccgtggatccttcgtctggcattgtatctggtgccatatctggtaattggctatgacattttaaaaaaagcgggaaaaggtatcctaaagagacaggtctttgacgagaattttttgatggcagtggcgaccattggagcggtctgcttgggagagttcaaggaaggcgctgcggttatgcttttttatcagatcggcgaacttttccagagcatagcggtaggaaagagccgtaagaacatcgcagcccttatggatatccgaccggattatgccaatatgatggtggatggcaaactggaaaaggtcgatccggatgatgtggagattggttccgagatcatcatcaacccgggcgaaaaagtgccgatcgatggcgtgatcacagaggggaatacgaccttaaataccagtgcgcttacgggagaaagcctgccgagagacgtatcctgcggtgatgagatcatcagtggatgcatcaatatgaccggtatgatcaaggtaaagacgaccaagaagtttggagattctaccgtatccaagatcttagatctggtggaaaattcagccatgaagaaatccagatccgagaactttatcacaaagtttgccaagtattacacaccggcagtctgttacggtgctctggcgcttgctattttaccgccggtcgtgcgcctgtttatgggaaccagtccaatgtggggcgagtggatcatccgagccctgactttcctggtaatctcttgtccgtgtgctttggttatttccattccgctatcattcttcggaggtatcggttgtgcctccagcaatggtattctggtcaagggatccaattatctggaagcattgtctgcaaccaagtatattgtctttgacaagacaggaacgttgaccaagggagtatttgaggtgaccgcctcttacccggaaaatggatttgataaagaaaccttacttggtatggctgcctatgccgaaagttcatcttcccatccgatcagcctgagtctgaaaaaggcatatggacaggaactggatctttcccgtgtctctgacattgaggagatcgccggacatggtgtgtgtgcccgggtggacggcaggaaggtctatgttggaaacatgcgcctgatgcagcgtgaaaatctgacggttacgaccgagcacaaagagggaacggtctgctacgttgccgtggatggcacctatgcaggatgtatcgtgatctccgatgtggtaaaaccgaccacgaaggatgcgatcgccggactgaagaagaacggcatcaaaaagaccatcatgcttaccggggatgccaatgagacggcacagcgtgtggcagcagagattggtattgatgaagtccacagtgaactgcttccggcagataaggtcgcacaggtcgagcacattttaaatgccaagggagaaaaggaaaacttagcctttgtcggtgacggcatcaacgacgcaccggtcttatcccgcgcagacattggtattgccatgggagccatgggatcggatgcagcgatcgaggcagccgatgtggtccttatggacgatgatccggcaaagatcgcgctggctatgaagatctctgtacgaaccttaaagatcgtgcgggaaaacattgtctttgcacttgcgattaaggcagtctgcctgatcttgggagcacttggtattgccaatatgtgggtagccattttcgccgatgtcggtgtcatggtgctggcagtcttgaatgcaacaagagctttgaagataagagcataataagaatttaaaaggaaggactctgctgtgtcgcagggttcttttttcttggctggataaacagtgaaaagaccgcaaaggtgtgatacaatgagcccaaaggtgtaaagaaggtgtgcgtatgaagcagttatatacaagttggggagaaaaattaaaagaggagatgaaagtgggcaaggaagatcttgcagtacttacagaatatccgcgcccatccatgatgcgcgattcttatgagaatctcaatggttggtgggattatgccatcacaaaacagttggatggggagaaaatcccggatatttataatgggaaaatccttgtgccatactcaccggaagccgcactttccggtgtggagcatcagttgcaaccggatgaatatctctggtatcatagagaacttgtactggatagaaaaaaactggatcaagggatgcgtctgctcttacattttggtgcggtggatcagacagcatatgtctatgtggacggaaaagaagtgatgacacatgttggcggatatctcccatttacccttgacctgacaccatatgcaagggagagccgggcggacgcactggatcttgtcgtgaaggtgaaggatgtcagcgacacttcttatcatgcgaggggaaagcaaaagttacagcgtggcggtatgtattacacggcacaaagtggtatctggcagacggtctggatggaatatgtaccggctcttgcaatcgcagaagtaaatgtggtggcagatagtgatcatggaaaagtgtgttttactattcttgcacagggaaaaaatgaaacgaatgaattaacagatatttgtgaaaatttcacgacaaatgcaggcttacctgtaacgatacggatttttgcatcatctcatgcgcgagcaaatattgaaacaccgcatgctaaaatacaggaaataagtggaaaaacagtcatagcagagtacaaggatagcaccatcataagaaaaaagctggaaagttcggataatccggaaaattctaatctatatctggaagatattgtgctggagataccggaagcagaccgcaagttctggagcgtggaaacaccttatttatatgattatgaaatcttgctgggggaggatgttatttacggctactttgcactgcgcacgttcacaaaggaaaaagataaagatggaatctggcgcatctgtttaaatcatcatccgatatttatggaaggtgttttggatcagggctattggccggatggactcatgacaccgcctgcggatgcggcatatatttttgatatcatgggaatgaaggagaccggatttcatatgatacgtaagcatatcaagattgaaccggagcgattttatttccattgtgacaggctggggatgatcgtatggcaggatatggtaaatggcggtaggtcttacaaggattggtatgttacatatctggctaccgtactttcgtttttacagatcaaaagcaatgacaggcatcgaaaactgctttcgcgtgaggacgaggctggacaacgtgaatggcagcaggagatgttagagacgatcgccttattaaagaaacacccctgcatcagtacctgggtgatctttaacgagggatggggacaattttcaacaaaagatatggttacacttgcaaggcgggcggatgacagcaggctgatcgatgcggcaagcggctggtatgatcagggctgtggagatatgaactcttttcacaattacttttttccactggtcattccacgtgacccaaaaaagaatgagcgtgtggctgtattgtcagagtatggaggttattcctatggcatcccggaacataccacaacagaagctatctatggatatggaacttataaagatacggagagccttaaggcggcatatgaaaagcggcgtcaggaggcgatgagattgattccacaggggttgtgtgcaagtgtctacacacaggtatctgatatcgaggacgaggtcaatggtatctatacctatgatcggaaagtgaagaaaatataataatcatgcaatattattttaaggtgtaagtcgaaaatgacttacatcttttttgattacagaaactctgcatttctgatggtaagaagaaaaatccaatggcaggaagaaaaaaccagtggaaaaatccagcaaaatgtggtaagttaaagcgaacctatgttatgaatgaaaaaccacggtacacatcaactaatcaaaacgaaagtatatttcatagatacagggaaggagaacatacatatgatgatgaacaaacggctcatcgccatggtgggcgagagcaaaaaatacatagccggcaatgtcatctttcagtggcttggcatgcttgccaacatcctgatgatgtatagcattaccggatttttaggaactttactgccggacagcggcaggggaggcgacttttatcagaacatcaaaagactggtcttggttgttgtattctgtatcctggcacgtttcctttgcacccttctttccaaccgcatgagttttctttcggcaaagaccgtaaaaaagaccctgcgacaaaagatctatgagaaactcctggcactgggttcttcctatcaaaaatacgttgccagttccgaagtcgtacagatcgccgtggagggcgtagaccagttggagacttactttggcgcttacctgccacagttcttctatgccatgttggcacccctgaccttatttatcgtcctttgctttgtcaatgtcccggcagcgatcgtacttttggtctgcgtgcctatgatcccgatggcgatcgtctttgtccagaagtgggcaaagaaacttttgtcaaaatactggggacaatatacggctttgggcgacacctttttggaagacctgcaagggcttacgaccttgaagatctatcaggcagatggctataagagtgaaaagatggacgaggaagccgaaaagttccgaaagatcaccatgaaggtcctgaccatgcagttaaattccattaccattatggatattgttgcttatggcggtgcggcacttggcatgatcgttgccatccttcagtatcgcgcaggtcataccgatcttaccggcacactttttatcatcctgctttcggctgacttctttattcctatgcgccaactgggaagtttttttcatgttgccatgaatggtatggcagccagtgacaagatctttgcccttttggatgtcaaaaaggaagagacaggggagatcgcagatgaggtaccacaaacaaacgatctttgtatgcaggacctgtctttttcctatgatgagagccgtcagatcttagtccatatcaacctgttagtaaaatccgggcagtttgttgccctggtcggagccagcggctgcggcaaatcaacgatcgcatccttatttatgggaagaaatacggctgaccaggggcagatcaccttgggaggactgccattggcagccatcccggaagatgtgcgtatgcagaagatcacctatgtcagccacgatgcctatctctttaagggaagcgtgcgcgataatcttttgatggcaaaggaagacaccacggaaggggaaatgtggaaggtcttagagcagaccaaactggcagaatttttacggcaagaggaggggctggataccaaattactggaaaaggcatccaatttgtccggcggacagcggcagcgtctggcattggcgcgtgctctcttgcatgacagcccgatctatatttttgatgaggcaacctccaatattgatgtcgagagtgaaaatgatatcatggagcagatcattgctttggctaagacaaagaccgtgcttctgatctcccaccgtttggcaaatgtggtcggagcagatcagatctatgtattggaaaaaggtcagatcgttgaagtggggcagcatgaaagccttttgcaagagcaaaaaacttacgcgtcactctggcaggcgcagcaggaattggaaaattacggaaagtctgagaaaggaggagcacaggcatgaaaaagagatcgaatttagagatcatggcaaaactgatcggcatggtacgtccgcttctgggctatatgctccttgccattacattaggtctgatcggacatttattggcatcctttatcactatttttgccggttatgcggcattgaaggtctggggatctccaatcgcccactcctttgctttcttctttgtctgcatggtggtctttgccatcgccagaggatttgcccgctatacggagcagtcctgcaaccattacattgcattcaaactcttagcactgatccgcgcaaaagcatttgcagccctgcgcaggctctgcccggcaaaacttgagggcagggacaagggagatctgatatccgtcattacttcagatattgaacttttggaagttttttacgcacacacgatctcgccgattgcgatcgctacgatctactcggtcatcctgagtcttttcatcggacatatccactggggactgggactgctggcattggcggcatatgtgaccgtgggcgtcatcgtaccggtcattgcttccaaaacgagtggcgatctgggattggagttccgcaatcagtcaggtagtctgagtgcatttgtgctggattctttgcgcggtctgccggagaccatgcagtatggcaatggcaaaaaacgtatgcagcagatgaatgagcgcaccgatcggatgaatgactgtcaggaaaaaatgaagcgtgtgactgggcttaatatggcggtgaccaatacggcaatcctggtctttgacttccttatgctgcttagcgcatcttatttatataaagaagggatcattgcctttgacgggatcgtgatcgcgactctggcacttatgtcctcctttggaccggtggtggcactggcaaatctgggaacgaccttacagaatacctttgcctcaggcaaccgtgtcttagacattttagaggaagaaccacaggtcgctgagatcacaggtgcagaccagacaacttacggacaggtgacgatcgaggatgtgatctttgcatatgaaaaggagacgatcttagatggagtgtctttggatgtgccaaagcagggcattcttggtattgtcggaaagagcggcagcggtaaatcaaccctcttaaaacttttgatgcgtttctgggatgttgattcaggaaaacttgcaatcgcagaccgggagatcggaaagatcaatacggaagatctgcgccggatgcagggctatatgatccaggagacccatcttttctgtgactctatcgcagaaaatatccgcattgcaaaactggatgcgaccagagaggagatcgaggaagcctgcaaaaaagcctccatccatgactttatcctgtccttaccgcagggctatgacacaccggtgggcgagttgggtgataccttatccggcggagagcgtcagcgtatcgggctggcgcgtgcctttttacacgacgcgccgatgatgcttttggatgaaccgaccagcaatctggattccttgaatgaaagtgtcattttgcgttctttgcgcgaggagcgaggagataaactgatcctcttggtctcacacagggattctaccatgcgcattgccgatcaggtctatcaaatgaaggaaggacgcgtcagttaggagaagatgatggaagaaaatttgaccagtcaggaacttatagaaaaaagagaacgggaaaaaactatggtttcggatatgatccgtgtctactgcaagggaaatcatgcggcttatgataagaaaaacaagtgtctctgcaaagagtgtcaggcactggatgattatgcgagaatgcgcagtgacaagtgcccttttatggagacaaagactttttgttccaactgcaaggtgcattgctacaagcccgagatgcgccagcgcatcaaagaagtgatgcactatagcggaccgcggatgctctttgtgcatcccgtcgcctgcatccgccatctcgtagagacgcggcgggagaaaaagcgactggaaactacatagagatccagccaaaagcattggcaatggatgaaatgaggatgatgatggcaaagatcggacagagatacttgatcataaactggaagatcttttttcgacggaatggttttcctccgtctgtcacttcatcctctattttttgtgtgccgaccacccgggagacgagcagacaggtcgcaagggcagccagcggcatcatgactgagtttgtcaggaagtcaaagaaatccaaaaactgcatgccgatcagggttacatttgccagtggaccatagcccagagaggaaagagtgccgagcgcgatcatgatgataccgacgataacggtcgcctttttccttctccagccaagttcgtcctcaaaggtggaaaccgcactttccgtcagtgcgatggaacttgtcatagcggcaaagagtaccagcacaaagaaaaggatgccgacgcccgtgccaagccccatgctgtcaaagactttcgggatcgtgatgaacatgagggacggacctgcctgtaaggtgtccggatctccgccagaaaaagcaaagaccgccggaatgatcatcagaccagccataatggcgatcgctgtgtcaaagatctctacattcttggtagagtcctcgatggagacatcctttttcatgtaagaaccaaaggtcactaagatgcccatggcgatcgacagggaataaaacatctgtcccatggcggcaacgacggtcatccaggagaagttttccgggtttggcaccagaaaatatttgacaccggcaagggcacctggtctggttacagaatagatggtaataatgacggacagtacgaccaggatgggcatcatgatcttggatacgcgttcaatgccgtttcgtacgcccgcaaagatgatgccaagcgtcagcagggcaaagaccagaaaacagagttctgtggatgccccgtcagagataaaggtgctgaaatagccgtcctgggcgagtgcagaaccctttccagagagatagccaatgagatatttgagtacccagccgccaatgacggagtagtaaggtacgatcaggatgggtatgatggcgttgagccagccgccgacagacagccatttggatctgccgaaggaatggtaggctccgaccggacttttcttggtcatacgaccgagtgatgtctctgccatgatcatggtataaccaaaggtcagggcaaggatgatatagatcaatagaaaaataccgccgccgtatttggcagcaaggtatggaaaacgccagatatttccaagcccgacagaagcaccggctgcagacaggacaaagccgatcttaccggaaaaggaactgcgctttttgtttggatcatgcatgataaaatttccccctcaagattatttcctattaaatgcatttttgcatacataatgtgggaagtttagcataaatactgaaaatttgcaatgtcgtatagaaaataaaggttgtcttgcaagatgaagggtattacaatatggatgtgagacgaggtccgagcgcagacagatgggcgtcgcctttcgtataggaaaaatagcatatgacgggatatatttccccaggggatgaagatggagaaacaagagacagccaagacgatagcaggacatgatgtgaaacgggtacatgagaaaatttcagattatcttgtcagaagtgagtatgactatatttgtgtcatcaacacccagacagggatgctttatgtagatacagatgaattgcatgcagattgggactggacaggcgaggagcatgactattatgatgcgcgcgcccttttggtagagacttttttggatgataacgacggtaaggactttatgcactgctcggagatcccatacatcgtaaagcagttggaagaacaaaaagtttacagttttatgttccattttagtacaccggaacacaaccgccacaagaaacaatggaagttttcttatctggatcaggaagatggtttgatccttacgaccttaaaggatgtgacaaaactcctagaacaggatcatctgaccggagagttgaaccgatatggctttatccgaaaggcaagaactgttctgcgggatcctgccgtagaccatgatcttgccattatgtatatcaacctcaagggcttcaaggcaatcaatgagttgttcggtacggagggcggagatctggcactgcgtgaggtcgtgcgtgtcattcacagatctaacctgcatccttatgctgtgggacgtatcgaggcagatcattttgtctgtctggtggatccagccaatatcaattatgaacacttaaagcaattcttacatcagaccctggtatttgatcagagatccttagatgtttacggtgtctgcggtatctatatgatacctgcggaggagcgtttggacagtgtcagcaatatgtgtgatcgcgcccgcatggcaaaggattatatcgaggatgaatatgtacagccatatgccatttttgatcaaaagatgggcaattcttatatggagagaaacgatgcactgcgggatatcagcaatgctctggaaaagcatgagtttcaggtttattaccagccggtctatgatgccttttccggtgagatagcatccgccgaggcgctggtgcgctggaaaaaggcagatggagaaatggtatcgccgggcatctttgtacctgccttagaggacagcggacgtatctcccagatggatcttttcgtggaacgcagtgtgctttcctttatggaggaacgctacaaaaagggacagtttatcgtgccggtttccatgaatatgtcccagatggatttctttgataaagatatgatggcatcggttcttctggatgtttccaataccgacctgccgatggattatacacgttttgaggtgacggagacggcatactcgaccgttgccagcaacaaccgcaatgtgcttttggatatgaagcggatcggcgtcaagttctatttggatgactttggcagtggctactcgtcctttagtaccatccgtgattatgattttgatattgttaaattagatatgggatttgtgcaaaagatcggcacgacggcaaaggcaaatgccgtcattcaagccattatcgacatggcgcatgccatcggttccaaggtcgtagctgaaggggcagagaccagagaacaggtagacgctctgcgggagatgggatgcgattatattcagggcttctatttctccaagcctttgccgcaggaggaatttgaggcactcttaaatgcccagtacagagaggactagccgtgatactgggaaggggataccccatattctttttgaaaaagatttgagaaataagattgcgaacaaaaatgcagtgcttctgctacctgggtcacattcatgtgctcggtagtcaggagcacttttgctgccgctagtttttctttttggacatactggttgaccgtgatgcccagttcttctttgaatttgtgggacagataatagtcgctgtaaccggtaaagtgtgacaggtctttgatcgtgatcttgtcgcggatatgcaggttgatgtagtcaatgcaggcgcggatgggcgcagagatatcctcgttttgcttggcatcgtgcacacgggtgatgtagtcggcaaagatggtgtcgttgatatagcggatatcatttacatttgcacagttgtcgatggcgagggtgtaggtatccatcaaagaataggagatggaggcagacagaccgccccggatggctgcgcggctgcagagggtcaaaagggagatggatccgtacttgcagcgctgcagatcattttccaactggatcttgatgccgttggagacctttccaccttccttgatcaggtctaaaagtcccatatttccctgctcgactgcagcgaccagttgctgctcaaaaccggaaaccccggcatggtcgcgggacagatcttcgtttaatttataagaagtctgctgtaagtggcggatggaggcatcgttgcccttataatcttctaaggcttgcataaatgccttggtggctatgttggtctccgggacggcagccgtctttttggtatggtaaaagttcttgcgccggatggcaggaaaatccagacattcatcgcagatggcattgtggagcatgagcaggtattgctcaaagatattaatggggatgatgggatagtccttgaactgctcgtacatatatttacgggcggacacggaaagatcatggatctccagatcatccagcaggcgttttagagaccggtcattggcaaaggtcggtcccagtaaaaggacacggtcggttcttttatcctctttggaaaatacacagcctatgataatgcccagatcgtctgaaaattcatagggagggcagacatcttctttggcatatgcgatcagaaagtctttcataccatttaaagaaatgagccggtccataaactctgcctgtccatcatgattcgaaagcagttccatggcaggggaatactcccagaactgcaggggatagcatgtggataagatttttatggtcatctcacaggtctctttagaaaacatactgacatactccttatttgctttgtttgtatccagtatagcgcaaaaatattaaatttctataaaaatcacgaaaaaaataatataaacatgaatttatgtacgatgctttgatcctactcgtgctaatgtatagttaaacgaaggggacgaaatattcgtttcaacaatagaggaggactttttatgagtaaagaggtaagtgttacaggcatgaaataccgcagcgccaagttatgggagatgatcatggctccggcgtgtgctggtaacaacatttgtatgtacatgtgtatggtttatgcttcttatgccggcagtgaaggctacggtatcgcaactgcggttgtgggtgttatcatcaccttatccagaatcctggatgcagtaacagatacagcgattgcatatgtatttgagaaattccctaccaagtatggtaagtgtcgcccattcctgctcattggctggattatcgaggcagttgcagtctatctgatgtatggagcaggtgcaaaccacttcaagggtgtggcaggactggttatgttcattctgatctacattatttacatcatcggttataccgtaaataacgtagcaggttctgttatggcatctgttcttaccaacgatcctaagcagcgcccgatgttcaactttgtatctaccattttttcttatggtgtaccgatccttttgagcaatgtcgtaacattcaacatcttgccaaaatatgacaatcagtacaatatgccaatgttaaaggaaatgactttgttttacatcgcagtttcttttgtctgctgtattgtttccatgattggtatcgcaagagcagataacgatgaggtttggaaagaggcgagcgctaaggtatccggaaagcaggagaagattggtattaaacagatgtgggaagtgctttccaaaaacaaggatgtacagcgttatatcgtaacatgcgctaccgataagtttgcacagacaacagcaacgcaatcggtaatcatgaacctggtatccggtgtactgatcggatcctattctgcaacacaggtagcaaacaactatgcatctgctattggtctggtatttgcctttggcggtggtatcatcatcggaaagatcggtgccaagaagggaacggtatggttctcatggtttgctattgcaatttctgttatccagcttgctgtatgtatcatcttaggaccaagcggtatgcgtgagatcggcaccacaggctcttgggcattccttctttgggtagcatgtacggttggtatgaccgcaggcagaatgcttctttccgttgcagcaggaaccatgcgtgcagatgttacggatggtgaggaacatcgttccggcaacttcatgccatctgttatcgcaggcgtttactctttgttcgataagggtatgtcatctatctgtgctatgatagcaaccgcagcaatttctttgatcggttatgtcaacacagtaccacagatgggggatgaggttacaagcggtgtattctggatgggaatcggactgtcctttgtccttccgatcattggattcctctgcaatatttttgccatgaagaactacacgctggatgtggaaacgctcgcacaggtgcaggcagacaatcaggcaaaacgtgatgcagcagcagaacagttacatcaggcagaagcataaagtgtaattggtcttacataaaaatgacgatgggggtcggcaaagatgctgacctctatttttttatctgcgcttgtgttatactcgagcttgaacgtttgaagaagtatttcggacaagagaatgtactataaataagaggagagaaaaagtcatggaagagacaagcatgcagatcatcggacatgtgcatacggatttcccgaccaagtttggtttgcccagacagagcggtctgatagaggaactggtcgggcgcatcgaattggagccggaatttcgccgtactgaagccttccgcggcattgaggaattttcccatctttggatcctatggcagttttctctcagtcaaaaagagcattggtcggcgacggtaaaaccgccacgcctgggaggaaaaaagcgtatgggagtctttgccacgcgctcaccctttcgccccaatcccattgggctatcctgcgttaaattattaggcgtcgactatgcttgtgccaaggcaccggtactttatgtggcaggggtagatatggtggatggcacgcccatttatgatatcaagccttatctgccttatgcggatgcaagagcagatgccaaagggggatttgccgatgcggtcttttcccatgcactaaaggtggactttccgcaggaattgctggataaacttcccaaagaaaagcaaaaggcggcgatcgcctttttaaagcaggatcccagaccgccttatcacaatcatgccgatcaggtctataagatcgcctttgaccgctgggacatccactttaccgtggagggggacagagccagtgtttgcgctgtgcattgcatccggggcgcagaaaggtgaaaaaggagaaagaatataagatgacacagtcgaatacagacaatcgcataaaatttggcttggataaggcagtccttggtatgctgcttaccctggcatggcctacgatcttagaaaatctcttggagaccatcttacaatatgtagatactgccatggtgggacatctgggcgcacaggcaacggcaacggtatctctgaccgctacctatacctggctgatccagagcgtgatcggtgcccttggcgtgggcttcctttcctatattgcaagggcagtgggagaaaaagatcaaagtaagatccgcaaggcatccagactcgccatgatcgtggcactgcttgccgggggcatccttatggcaatcactctttggatggcaccccatgtgccggtctggatgggggcagaaaaggcgattcatgcagatgccacacgctattttatctttatcaatctgcctatgatctttcgtgcggcgaccattatatttgcctctgccatccgggcgacaggcgataccaagacacctatgatcgtcaatgtctgggtcaatgttatcaatatcgggctcaactatgtttttatctatcttttgggaaagggggctgtgggagccggtatggcgaccatggtatcttatacgatcgggggtcttttgatgacggtcgtattcctacgcaatccgagtctggatgtgctggggaaggggggatccccggcgcaggggaaagaagataagccgcttgtaacagaaaaagcgcaagacattttgccggttacgacccgacaggttctgacggctgtccttgccattagccttccggttgtcctaacacgcctggcatcctgcctgggacatgtggtctttaccagttttgtctcatctatggatacgatcacctatgcggcacatgccattgccattacgtcggaggagatcttttatattccgggctatggcatgatggcggcgacttctaccttgatcggtcacgccatcggtgagaagaataaaaagaaagaaaaggatgttaagatcgtgtcgatcgctctgatctttggactcatgtgcatcacaggtatcctgctctttgtcggcgcccatgccatgatgtctgtttttacaaaagatccgcaggtgatcgctatcgggacgcgtctgcttcggatggtggcctttacggaaccggtctttggcacatcggcagtcatggaaggtatttataatggtatgggacgcacccgctatcctctggtggtggaactgatcagtatgtggggtgtgcgtgtggtcggcacatatctctgcgtgcgcgtctttggactggggatcacggctgtctggatcatgatgatctgtaacaacatcttaaaagccatcctgcttgccttaggcttgctttccatggggcgaaaaaatgcacaaaagtaggctaaggggtttattttgcaaaatttcctccgatatagaagataagaaacgttgaaaaggatttcgacattgcattattgatcaaggaggacaagattatgagtatgaatccggtaggaacgactacgaccgatagcgtttacaaccgctacggaaagacttcttctgccaagacttccaaagaggctgaaaaaacaagtgccactgagggaaaagaggcggtttatgagaagggaacaacagaaaagaaagcaacttattccatcaacaagatgagttcatccgatcgtgcagcactggtgcagcagttgaagcaggatcaggagaacaggcagcagagtttgatctcactggtacaggatatgatgaacggacaggcaaagtcctacagtcaggcaaccggtgatgattctatctggaaattcttagccagcggcaactttactgtggatgcagcaaccaaggcacaggcgcaggcagatatcgcagatgacggatactggggtgtttcccagacctcacagcgcttgtttgattttgcaagtgcacttgcaggggatgatgtagaaaagatgcagaagatgcaggaagccatgcaaaaaggtttcaagcaggcgacagcagcatggggcaaatcgcttccaagcatcagccagcagaccatggatgcagccaacaaattgtttgatgattattacaaatccaaaggtgtagaggcctaaagaaaggcataagaaaaggacggatgggctccgtccttttttgatgggaaaatattatagtgctatgtgtgcagcaaacttcttttgcagttttttatgcacatggaagaaggccgggatgaggaatacatccgccatgatccaggcaaagggactggcaaagcaggcacccagaaagccaatcgccggtaccagggtaaaggcaacaatgcttcgcgccagcatttccataacgcctgcaagaatggcaaagatggaaaagcccatgccctgaatgagaaaacgtacgatgttgaccagagccagcggaaaataaaagcaggactggatcagcaggaaagtccgtgcatctgcgatgatggctgtctcatttgcggacaggaacaaaagcaggagatattttccggcaaagagcaggacaaaaaaggcgatgatcgcatagcaaagaccaaggatggtcgcagattttaagccttctttgacacgccccagttccatggcaccgacattttgtccgccgtaagttgccatggtagaacccaaggcatcaaacggacatacgatgaacatggagatacggttggctgcggtgatggaggcaacggcattggaccctaagttgttgacggcagcctgcaagatgacagagccgatcgctgtgatagaatactgtaagcccataggtacgcccatatgacagagagtagcaacacagtgtccgttccaagcccattcgcccggctgcatttttaagatcgggaactttgccttcatatagatgaggcaggagatcccggagataaactgggagatcacggttgcataaccggcgccttcgacacccatgccgatctgtgtgataaagaccagatccagtacgatgttgatcccggatgccagcaaaaggaaatagaccggagtcttggagtcaccgagagaccgcatgataccggaagtgatattatataggtaagtaaccggaatacccacaaaaatgataaagatataggagtatgcctgatctatgatattggacggtgtctgcatgagttccaggatctgccggcaaaagacggagacgatcagagtcatgacagcagaaaaaatgaggcagagccagacactgttggcaacgtatttgcgcaggctttcataatcaccggcaccaaaacgctgggcgaccgggatggcaaagccactgcacacgcccatgcagaaaccgatgatgagaaagttgatggctccggtggagccgacggcggcgagggcatccacacccagaaactttccaacgatgatggtatctaccagactgtagaactgctgaaagagcatacccaccaaaagaggcagggagaaaccaaggatcagtgacataggttttcctgtcgttaatctttttgttgtatcttttgccataattgcattcctttccttatatatcaaaattcgctttagatataatagcacgaaaaatttttttaacaatactttcctaataaactttcttattgtataatgtatttatcttcatacacagggcagttgaggggaaaactgtacacttgtagagtaaacgagggggataagacgatggactataatgacgtcattcgtaacaaaaacagaatattagcgatcacactcttgatctgtattgtgcttcgctgtatcgtaaatgcattttttaccgggatcgtacaggtcatcccgatgggtatcggaggactgatctttacagcgctcctgttacttttgaacaaaaaggtacatccggtggtcatgatgtatgccatggtggtactcatgtcggcgatcagcatcattctgatgatagcctttccttgcacgaccaattatctgatgtttttcttgtcgatcttttttgttgtgatctatgaggacatccgaccgatcatcatgcagtcggcgatcagtgcggctgctatggtatatttctatttccgctatacacaggaattgcgagattcctggtcgacggatgccatgtcaatgtgcgttgtttatattgtcagtggcatgctggtatatatttctctttgccgcctgaccaaagaacagttccaccaactgcgcaagacccacaaggcaagcgaaaaggagcgtaaaaaggcagaacaactcttagcagagatcggtaagtctgttggtgtcttagatacgaccagtggcaagttaaatgacaatattactatgaccggcacgatctctgatcagatcgcagaggctaccgaggacattgcgcgcaggacagtggcagaggtcggagatattgagcagatcaagggcatggtacaaaacggggtttcccagatcaaggatatcgcggacagcagtacccgcatggcgggggcttccaacgagaccaacacccaggtacagacaggcggtcagttggtaggagacctgtcttcccagatgcaggatctcaacaagcgcatggaaacggttgcttcctccatccagtctttatccgaggaaaatgccaagattatcgagatcttagcgacactggatcagatcacctcccagaccaatcttttgtctttgaatgcttccatcgaggctgccagagccggagagcatggcaagggctttgctgttgttgcaacggagatccgtcagttatctgatgactccgccaagttcacagagcagatccatggcatcttaaacggtgtcgaggagcagaccgcacaggtacaaaaggagatcttaacaggacagaagtctgtggagacctgtacgcagaatgccaatgatgtcaactactcattccaggagatcgccgagaatacttcccaggtattgcaccgtgccaatgtgatcgagaagcaggcacaggaactggaaagcctgatgaacacgactttggagaatgtcaacaatatcaacgacaatatcgagtcaacatccgcagccatggaggagatctccgcaagtatcaacaatctccacagtaacatcggcaatgtggtagacggttatcatgacatcaatgagatcaccgaggctttggtacaggcatccgagccggaagcagaggaggaagatgacgatttgccaaagaagaaattgaaaaaagtcaagattgatttatcttaaaatcgtatagacaggatagaaaaagatacatactaagaggtagaaaagagataggagataccacttagtatgtattttttgttggaaaaaaaggatggctgcggttatatccatccttatacatgggaggaggaaaaagaggatctgatcgatcctgaggccattcactcctgtctggtagaaaagaaagatcacgaccttttggtacagatgcaggtgcccttgcaggaggagaaaaaagtagaggggaaaaagcagactgtgccgctgttgggacagggacatgccttttccaagtttgcctttgtcgtatgggaggacgggatctgttttgcggattttgacggttatttgcaggggatcatggaccgtctgcgtaaggaaaatgggaaaaagacaccggaagccatgctctaccggctgtttcagatccttgttgaaaatgatattcatgtgctggatgtcatatacaaacaactggcaactttggaagaagagatccccaaggataatgcccgctttttcctgcaaaaaatgtataccatgaaacacagcatttatcagttgttccgttactatcagcaactgacggaactggcggatgatctgatggagtgggagggcggctttttagatccgggagaaatggagtgcttttcacgcttcatcacaaggacaaaacggctggcagatgatatggagatcatgcgggagtatgccatggagatctgggagatctaccagtcgcagatctctatccgacagaatgatattatgaagatcctgacaattgtaacaactatttttctgccgctcagccttttggcaggctggtatggcatgaattttgaatatatgccggaactgcactggcgttatggttatgtgggggttctggtggcagcagtcctgatcgtgaccttttctatgatcctctttcgtagaaaacgctattggtagattgactttgaggggctgacagtgttatattatacaatatatatgtatatttataaattttaggcgaaagcgaagacggaagaaaggaagaaaattatgaagttaaaaagaggtttagcagccgttctggtggctgcccttgcggtaggtatgatgacaggctgtggaagcaagagcagtgacaagcaggctgcaagtgataaaaaggaaactttggtcatggcgaccaatgcgactttcccaccatatgaatatgtggacggacaggattatgcaggaatcgacgtggaagtggcacaggcgatcgcagatgaacttggcatggaattacagatccaggacgtagagttcggttctatcatttccggtgtgcagagcggtaagtttgatatcggtatggctggtatcactgttacagaggacagaaaaaagagcgttaatttcaccaacacttatgcgacagcaaagcaggtcatcattgtaaaagatggcagtgccatccagacagtagacgatctgtcttccgataccaagatcggtgtgcagcaggataccacaggtgatatctacactacagatgattacggcgaagatgcggtgacccgatacaacaagggcgcagatgcggtacaggcactgctgaccggcaaggttgactgcgttgtcatcgacagcgagccggcaaaggaatttgttgcggcaaatgacggactcaggatcttagacacagagtacgtggaagaagaatatgctatctgtgtagcaaaggacaatgatgaacttttgaatcagatcaacgatgtacttgacaagttgaagagtaatggtaaaattgacgagatcgtaaataaatatatttcagcagaataaaagccagagcaaaaagggtcagacccaggtgtctgaccctttttcaggctatgggtatagtagaaaggaagaggacaaatgagtaatggatggaatacttttgtgacagatttccggtttgtctttatacaggacgacagatggaaatccctgtttcaaggtttagggaatacgcttgtgatcacattttttgcggtcatgatcggtattgtcttaggggcgatcgttgcaaccgtgcgcacgacttatgacaagaacaacggagatatgaaaaagagaaatccggtcggattttacatattaagcattgctaatgtcatctgtaagttatatctgacagtgatccgtggaacgccggtggttgtgcagcttatgatcgcatactttatcatatttgccacttccaacaattctacggctgtggctgtctttgctttcggtatcaattccggtgcttacgtggcagagatcatccgtggaggtatcatgtcgatcgacgagggacagttcgaggcaggacgttcccttggctttaattacggacagaccatgatctatatcatcatcccgcaggtattcaaggtggtacttcctaccttatgtaatgagtttatcgtacttttgaaagagacttcggttgcaggttatgtgggtatcatggatctgaccaaggcgggcgacatcatccgcggcagaactttctccgcatttttgccattgctgggcgtggcagcaatctatcttgttatggtcgttattttgactgccttagtgggatgtctggaaaggagtttgcgtaagaatgagcgataagaatgtattgatccaggtcacagacttaaaaaaacattataacaaaggggagatcaaggcactcgacggtgtatctttagagattgaccagggcgaggttgttgtcatcataggtccaagcggaagcggaaaatctaccttgcttagatccttaaaccttttggaggaaccaaccagcggacagatccttgtggatggcgtggatatcaccgatccaaaggtagacatcaatgtgcacagacagaagatgggcatggtcttccagcattttaatcttttccccaatatgacagtgcttcgcaatatgaccatcgcaccgatgaaacttttgcacaagtcaaagggtgagattgaggcaaaggcgatggaactgcttcgtatggtaggcttagaagatcgtgccgatgcctatccgagccagttgtccggcggacagaaacagcgtattgctatcgtgcgtgctctttgcatggaaccggagatccttttgtttgacgagccgacttctgccttagacccggaaatggtcggagaagtcttggatgttatgaaaaatctggcaaaggaaggcatgaccatggcggtcgttacccatgagatgggatttgccagagaagtggcaagccgcgtagtctttatggatgcgggaaccattgtggagcagaatacaccgcaggagatctttgaacacccgcagagtgaacgtttacagaacttcctggcaaaggttctctaaaaataaaaaaagtataaacgaattcgaaaattatcgtaaaaggcacccgggtagtattgcttttgccatttaggtcaaatataatggatgaggtaatacctacgcgagtggaggataaaatgaacgaaaacaacaatggttcacagcagggtggaccgaataacaataataacaacaaaaaacgacagccgatcatgctctttgtgctctttgcactgatcgccatgtttatcaccagccttctatatagcagtgcaggctccagtacgacagaggcgatcacctattccaagttcctggatctggtagagaaggatcaggtcaagtcggttgtctttgacggcgatcagatcaacatcaaactggtagatggtgccaaggtgggatcagattctcagaccgcgtccatccaggcacagttatataaggagagtacagggcaggatctgacgatcacctattacaccgcttatatctctgatgcagacctccttcctttattaaaggaacatgatgtggagatcgacggagagatctcagactctacggcagtgatcatttacaatgtcctgagttttgttatcccgatcgtactcttatggatactcatgtccttccttatgaagcgcatgggcggcggagccatgggtgttggcaagtccaatgccaaggtctatgtggagaagtctaccggtgtgaccttcaaggatgttgccggacaggatgaggcaaaggaatccttgcaggaagtagtagatttcctgcacaatcctcagaaatatacctcgatcggtgccaaattgccaaagggcgcacttttggtcggacctcccggaaccggtaagactttgcttgctaaggcagtagccggagaagcgggcgtgccgttcttctctctggcaggatccgatttcgtggaaatgttcgtcggtgtcggtgcttcccgcgtccgtgatctttttaaagaggcacagaaggctgcaccgtgtatcatctttatcgatgagatcgatgccatcggtaagagccgtgattcccgctatggcggtggcaatgacgagcgtgagcagactctgaatcagttattagcagaaatggatggatttgatacttctaagggacttttgatcttagcggctaccaaccgtccggaagttctggataaggcattgcttcgtccgggacgttttgaccgacgcatcatcgtagaccgtccggatcaaaaaggacgtctggagaccttaaaggtacatgccaaggatgtggctatggatgagacggtagatctggatgcattggcactggcatctgccggactggtaggatccgatcttgccaatatcatcaatgaggctgccatcatcgccgtaaagcatgaccgtaagtttgtcaaccagagcgacttgtttgaggcatttgaattagttgctgtcggcggtaaagagaaaaaagaccgcgtcatgagtgacaaggagcgcaagatcgtttcttatcatgaagtagggcatgcgcttgtttccgctttgcagaagaacaccgagccagtacaaaagatcacgatcgtaccgcgtaccatgggtgctttgggctataccttacagactccggaggaggagaagttcttagagaccaaggatgaactgcttgccaagatcaccacctttatgggtgggcgtgcagcagaacaactcgtatttgagtctccgaccagtggtgcttccaacgatattgagaatgcgaccagcattgccagaaacatggtgacacgttttggtatgtctgataagtttggcatgatgggattggcaacggtggagaaccagtatctggaaggcagagcctccatgacttgtggcgagcgtaccgcggcagaggtggatcaggaagtccttcgtatcgtgaccgagtgttacgacaaggcgaccggtcttttggaagaaaaccgcgagatcttagataagatctcagactatctctacgagcatgagaccatcaccggtaaggaatttatgaagatcttccgtgacctgaagggactggatgacccggaggaaaagaaagaggatacttctgctgagacagtagaagagatcgacgacaaagatttatttgtggaagagtaaagaatatggatttttcgattgaagaagaattagcaaaactcccggattctccgggagtttatattatgcatgatgccaaagaagccatcatctatattggcaaggcaaagtctctgcgccatcgcgtgcaccagtatttccagcccagccatgatgagggtatcaagaaacagcgcatggtgcagcagatagcctattttgaatatattgtgacggattcggaattggaggcactggtcttagagtgcaatctgatcaaggagcatcgcccaaagtataatactatgcttcgtgacgataagacctatccgtatatcaaagtgacgctgggagaagcttaccccagagtccttttttcgcgtcaactgaaaaaggacaaggcaaaatatttcggaccttttaccagcgcggcggctgtcaaggataccattgatctggtgcagaagatctaccatctgcgcacctgcaaccaaaagttcccggataatttcggtaagcgcagaccttgtctgaattaccatatgaagcagtgcccgggtgtctgtaccggcaaggtttcggaggaggaatatcaaaaaagcgtccagggagccattgactttttgaacggctcctatggcgaggttgagaagatgctgaccgagaagatgcaaaaagcggcagcagatatggaatttgaaaaggcggcagaataccgtgatctgctggggagtgtccgtgcctgcgtgcagaagcagaagattaccaatgcaagtgagatggatgacaaggacatcgttgcactggcaaagcagggggaggatgccgtcgtacaggtattctttgtgcggtcgggcaaactgatcggacgcgagcatttctttatgaatgtgcgcatggatgaagcagacggggaagttgtaacacgtttcatccaacaattttatgccggtacgccgatcattccacgcgagatctttttacaggaagagatcgaggatgcccgggtgatcgagcaatggctgacggagaaaaaaggacagcgtgtctacttgcgtgtaccgcaaaagggcatgaagaataagatggtggaactggcagaaaagaatgctgccatggtcttagcccaggatcgggagcggatcaagaaagaggaaggtcgtaccatcggtgccttaaaagagatcgcgggactgcttggcatggagcatctaaaccgcatggaagcctacgatatttccaatatcaacggctttcagacggttggctccatggtggttttcgaaaagggaaaacctctgcgcagtgattatcgaaagttcaaactcaagactatcacgggaccggatgactatggctccatgcgggaagttctgaccagacgtttttctcacggtctacaggaacgggaagaactgcgtgccaagggagcggatgaatcgctgggcagttttacgcgtttcccagatgttatcatgatggatggcggacgcggtcaggtcaatatctgtgaggaggtcttggcagacctgcatctgtccataccggtctgcggtatggtaaaggatgaccaccacaggaccagaggtttatatttccataatgagcttatcccaatcgaccggacatcggagggctttcatctgatcacgcgattgcaggacgaagcccatcgttttgctatcgagtatcaccggtctttgcgcagcaagtcacaggtgcacagtttcctggatgatgtggagggcatcggaccggcaaggcgcaaggctctgatgaaacgctatgccagtgcggatgagatgcgaaatgccagtattgaggaacttgccgataccccatccatggatatgcgtgcagcagaaaaactctaccggtattttcacggaagtgaggctgaccctactgtacaaaaatgaaaaagttggttacaataacaggagtggttatattgtgatttgacgataaaggagaaggattatggaaccaatacaggcaaaactttccatcgttgcagacaaactgcatttaaagaattttacagaagacctcaatctggaggaacatttcgtatgcgttgcggatgtcaaccgtccggcattacagttgaatggattttatgagcacttcgaggcagacaggatccagatgatcggtatggtagagcatgcatatatgaataataagaccgcagaggaacgtgcggagatctaccgcaaactgctttcctacgacataccgtgtgtgatcttttgccgtggtttcgtaccggagcagtctttgatggatattgcacatgagcgcaagatcccgatcctgggaaccgagcgcgggacatccgagttcatgtccgagttgatctttgaactcaatgtacttttggcaccgtgcacgaccattcatggtgtattggtcgatgtctatggtgaaggacttctgatcacaggagaaagcggtatcggaaagagcgaggctgctctggagttgatccgcagaggacatcgtctggtggcagatgacgtggtcgagatccgaaagactaacgcccacactcttctgggacgtgccccgaagatcaccaagcatctgatcgaactgcgtggtatcggtatcatcgatgttaagagtctttttggtgttgagagtatcaaggagagccagaagatcgattttgtcatcaaattggaagactggaaaaaggaaaacgattatgaccgcctgggtcttgaggatgagcatatgaacatcttgggtattgatgtggtatgtcattccctgccgatccgtccgggacgtaatcttgccgtgatctgtgagacggcagccgtcaaccatcgtcaaaagaagatgggctacaatgccgcacaagaactctaccgtcgtgtccaggacaatatcagtcagggacaggagtagtttttcgttaggcatgaagtcttagattttgcatatattataaaagataggagtgttttattttggaaagagcaaatgcatggaaaaagtatcaggaagaggacaagcgtcaggctgtctatgattttgcagacggctatcgcaagttcttgtcagaacacaagactgaaagagagtgcgcagcattctttgaggcagaagcaaagcaggcaggctttgaaaatctggatgagatcatcgcttccggcaagaccttaaaggcaggagataaggtctatgccatcaacaagaaaaagatggtggctgcttttgtgatcggcaagcgtccgctttccgatggtatgcgtattttaggagcacatattgattctccgcgtctggatctcaagcagaatccattatacgaagataccgatatggcacttttagatacccattattacggtggcgtcaagaaatatcagtgggtgaccctgccactggctttacatggtgtgatcgtcaaaaaagacggcagtgtcatcaatgtatgcatcggtgaaaaggacgaagatccggtattcggagtcagcgatcttttgatccatctctctgcagagcagatggagaaaaaggcatccaaggtgatcgagggagaagacctcaatgtgctggtgggaagtatcccggtagagagcaaagaagaaaaagaatgtgtcaaggcaaatgtccttcgtattttaacagagcagtacgacattgaggaagaagatttcttatccgctgagattgaagtggttccggcaggaaaggctagagactacggctttgatcgttctatgatcatgggctatggtcatgacgacagagtctgcgcttacccatcttttaaggcgatcgcagaggtgatggacgtagagtacaccagcgtctgtcttttggtagacaaggaagagatcggatctgtcggtgcaaccggtatggaatcacgcttttttgaaaatacggttgcagaggtcatggcactgaccggtcagacttctgagttgttgctgcgccgtgcactgcgcaattccaaggtattatcttccgatgtcagcgcagcctacgatccaaactatccgtctgttatggaaaagaaaaatgcggcttacttcggcagaggtcttgtctttaataagtatacaggttcacgcggcaagtccggttccaacgatgcaagcgcagaatatatggctgaaatgcgcaaagtcatggatgacgcagatgtgtccttccagaccgcagaactcggtaaggtagatgcaggtggcggcggaacaatcgcttacattctgggcaatctggatatgcaggtcatcgacagtggtgtggcagtgctcaacatgcatgcaccatgggagatcatcagcaaggtggatctctacgaagcatacaagggatatgtagcatttttacacaactaatatctgacggtttattatttgaccatggaggaaaataaacaatggaaatcaaaaaggaatttccacatatcaactttttagaaaaagagcctatgagccgccataccacttttcggattggcggcccagcagggctttttgcgtctgtacaggttgcggatgtggcgccattggtatcgtattgcaagactcatgacatcccggtcaccatcttaggcaatggcagcaatgtcttagtgggagatcaggggatcgagggactggtcttatcctttggcaaagaggcgtctgctatcacggtcgagggcaatcagattcgggcagaagcgggagcgctcctgtcccaggtggctaatgcggcactggagcacggattgggtggactggcttttgcggcagggatccctggcacgatcggcggagccgtatgcatgaatgccggcgcttatggcggagaaatgaaggatgtcctgcaagaggtcagagtcctgcgcgcagacggcaggatcgagaactggcatgcagaagatctggatctttcttaccggcacagccgcatgatggaagaaggtgccatcgtattgtctgctaccatgaaactgcacccgcaggagacagggcagatcaaggcagagatggatgattaccgaatccgacgacaggcaaagcagccgctggaatacccaagcgcagggtctacctttaagcgcccggagggctatttcgcaggcaaactcatcatggatgcaggactggcgggctaccgtgtcggtgatgccgcagtttctgacaagcattgtggatttgtagtcaatctgggaaaggcgacggcaacagatgtgcgggggcttatgcatgacgtatcagaccgggtctatgcacaatttggcgttcacttagagccggaagtacgatttgtgggtaacttttaagaatcgcatgcaggaggcgataaagtatgaaattattgatattaacggggatgtccggggcgggaaagtcaacggcattcaagatgttggaggatctgggctactactgtgtagataacctgccgatcccgcttcttaagagttttatcgatctgtcggagcagccttccgccaaggagcagaaactggtcgtcggcatcgatatccgaagcggcgagtccttacatcttttacaatcggtcttatccgaactgcggcaggatggcaagaaatacagcattctctttttggatgctgaggatgaggtactggtcaagcgttataaggagaccagacggaatcacccactgtccgggacggagcgtattcaggcaggcatcatcaaggagcgggcagcgatcggatttttgaaagaggaagcagactatatcattgatacctcacaccttctgacgcgcgagttaaaggaggaactgcaaaagatctttgtgcaggaagaagacttccgcagcctttttgtgacggtcatgtcctttggctttaagtacggcataccggcggacgcagacctagtctttgatgtgcgttttctgccaaatccatactatatcgcggaactcagacccaagaccggcaatgacattgagatccagaagtttgtgatgggctacgaggagtcccatatctttttggacaaactggtagacatgatcgagtttctgatcccgaattacataaaagagggcaagaaccaactggtgatcgcgatcggctgtaccggtggcaagcaccgttcggtcacactggcaaacaaattgcacgagcgcttactggatgaagatgcgatcggcgtcaagatcgagcaccgcgacatcggtaaagatgccttgcgcggaaagtaggaggttccaatgtccttttcagcagaagtaaaaaaggaattgagccagcatatcgacggaagcaggcattgcagactggcggaattggcggcaattctcagtcatgaaggaaaacttttgacccaggggaaaaagacgatcctttccatggaatcggaaaacccgctggtgcaaaaaaagtactttactttattagataaaacaactaatatatctgaatatggggctcatttggatgagcaggatgcaaaagatgtcctgaccatggtaaagatgtataaagagagggaggatggcgtatccatccgcatggacgtggtagatgggctgttgttacagcagacctgttgtcgtcgcgcctttatacgcggtgcctttctggcagccggatccatcagcgaccccaacaagaattaccactttgaaatcgtttgtaagacaagcccacaggcactgcaactgcaggagattatgaagggttttgcagtggatgcaaagatagtagagcgaaagagacattacgtagtttacttgaaagaaggcgctcagattgttgacatgttaaatgtcatgggagcccatgtggctttgatggatctggaaaatgtccggatcctgaaagaaatgagaaattctgttaatcgaaaggtgaattgcgagacggcgaatatcacaaagacagtcagtgcggctgtcagacaggtggaagatatccagtggatcgaacagaccagaggacttggttctttgccggacagtctcagagagatcgcagaggtacgtttggaacatccggatatgccgctcaaggatctggggcagttgctggatccgccactgggaaagtcgggcgtcaatcaccgcctgcgacgcattagcgagatcgcagacaggcataggggataggaggaacaatcgtgagaaaaaacgtaacaatcaatatgacagacagtatggagtccacaccgatcgctcatctggtacagttggcaaaccagttttccagcagtatctattttgagatggacacgaaaaaggtcaatgccaagagtattatgggtatgatgagtttagtccttactgcgggcgatgtcgttacgatcgacgctgagggcgaggatgatgcaaaggcagtcgatgagatcgagaagtttttgacaaagtaggatttttagcatgagcaaacgagttttatttttgtttaacccgcgttccggcaaagggaagataaaagagaatctcgcagacatcattgatgtgatggtcaaagccggatatgaagtgatggtctatacaacacagtctgcaggcgatgccgtgcaaaaagcgcgcacggaggcaggcaactatgacaggatcatctgtagtggcggagacggcacactggatgaggttgtcaccggtgttatggcatctggcatttcggtgccgatcggttatattcctgccggaagtaccaatgattttggtaattccctggggatcggatcagatatggtacaggcagcgcatattgctgcggagggaaagcctttcccttgtgatgtaggcaaatttaatgaagattattttgtctacgtcgcagccttcggtatctttaccgaggtgagttaccagaccagtcaggatctgaagaatatgttggggcatgctgcctatatcttagagggagccaagcagatctgggatatcccgtcttatcgtatgcaggtagagtatgacggcaatgtcttatatgatgagtttatctatggcatggtgacgaattccatgtctgtaggtggatttaaggggatcattccgggcaatatcgcgctggatgatggtgtgtttgaagtgactttaatcaagaccccgaaaaacccgatcgaactcaatgatatcgtttgctttttgacagggatttccaaggattccaatcaggtctactctttccagaccaacttcttaaaactgaccagcagtgaagatgtgtcatggactttggacggtgagtacggtgggaatcatcatcttgttgccatcagcaactgtaaacaggaaatggaaattattgttgaatagatttataaattgagctataatgactcatggagtgaaattatatagaagaatggaggaaccgctatgttggtatctgcaaaagaaatgttggacaaggctaaggctggacattacgcagtaggtcagttcaatatcaataacttagaatggacaaaggctgtattgttgactgctcaggagttgaactctcctgtcatcttaggtgtgtctgaaggtgccggaaagtacatgaccggatacaagacagttgcagcaatggtaaaggcaatgatcgaggaattgaatatcacagtcccggttgcattgcatttggatcatggtagttatgaaggatgtttgaagtgtgttgaggcaggcttctcatctattatgtttgatggttctcattatgcaatcgatgagaatgttgcaaagacaacagagttggttgctcttgcacatagcaagggaatgtctatcgaagccgaggtaggatctatcggtggagaggaagacggcgttatcggcatgggagaatgtgctgatcctaaggaatgtaaagcgatcgctgatcttggcgttgatatgcttgcagcaggtatcggtaatatccatggtaagtaccctgcaaactgggctgggcttagttttgagactttggatgctatccagcagttgacaggagatatgccactggttcttcatggtggtacaggtattccggatgacatgatcaagaaggcaatctcgcttggtgttgccaagatcaatgtaaacacagagtgtcagttatcttttgcagcagcaacaagagaatatatcgaggctggcaaggatctggaaggcaagggctttgatcctagaaaacttctcttacctggaacagaagcaatcaaggcaacggtaaaagagaagatggaactgtttggttctgtaaatagagcttaatatttttgatggtacaaaggtgttccgtatgtgtttttcatagcggggcacctttttgcttataaatagtatgatttatcagatttttatgatatatttgatagagttgtgctacaagtgaaagaaacgaggaaggaaaagtattatgaaagaacaggaatatttcaacgttgctgatatctttggcgagaatgtctttaatgattctgtgatgcgtgagcgtttgccaaagaaaacctatcagaagatgaaagaggtcatcagtcagggcagagaactggacccggaaacagcagatgttgttgctcatgaaatgaaggaatgggcgatcgaaaagggagcaacccactatacacattggttccagccgcttaccggtgtgacggcagaaaagcatgattcttttatcactgccccgatgtccaatggtaaggtacttatgagtttttccggcaaggaactcatcaagggcgaaccggatgcttcttcattcccgtccggcggtctgcgtgcaacgtttgaggcgcgtggttatacagcatgggattgtacttctccggcttttgtcagacaggatgccgcaggtgcaacactttgcatcccgactgcattttgttcttatacaggtgaggcattggatcagaagacaccgcttctgcgttccatggaagccgtctccaagcagtctgtccgcctgctccgtttatttggcaataccacttcacagagagttatgccatcagtcggtgcagagcaggaatactttatcgtagaccgtgccaagtacttacagcgtaaggatctggtctacaccggacgtactctttttggtgctatgccgccaaagggacaggaaatggatgaccattattttggcgcgatccgtgagaggattgcagcatatatgcgcgatgtcaatattgagttgtggaaactgggcgtatcttccaagacacagcacaatgaggtggcaccggctcagcatgaactggcaccgatctatgcagaggcaaatgtggcagttgaccacaaccagttgattatggagactttgaaaaaggtagccggacgtaatggtttgcagtgtctgctccatgagaagccatttgcaggcgtcaatggttccggtaagcacaataactggtcactggttaccgatgatggtatcaaccttttggaaccgggcaagacaccacatgacaatatccagttcttactggttctggcatgtattctgcgcgcggtagatgaacatgcagaccttttgcgcgagtcagcagcagatgtgggaaatgatcacagattgggcgcaaacgaggcacctcctgccattatctctgtatatctgggcgagcagttgcaggacgtattgacacagctcattgataccggagcagcgacacattcgatctccggtgccaagttggagaccggcgttaagactttgccggatttcatgaaagatgctacggatcgtaaccgtacatcaccgtttgccttcacaggaaataaatttgagttccgtatggttggttctcaggattctgtcggcgagccgaatatcgtactgaataccatcgttgcagaggcatttgcggatgtctgcgatatcttagagaaggcggaggattttgatcttgccgtgcatgatctgatcaagcagttggtgacagaccatcagcgcatcgtctttaacggcaatggttattctgacgcatgggtagaggaagccgaaagacgtggacttccgaatatcaagtctatggtggaggcaatccctgcacttaccacagacaagtccattgccttgtttgagcgttttggcgtatttactaaggcagaattggaatcccgtgcagaagttgagtacgaactttatgcaaaggagatcaatatcgaggctaagaccatgatcgatattgccggcaagcagatcattccggcagtcatcaagtatgcgacagaactcggtacttcgatcaacacgatcaaggctgcctgcgatgcggatgtcagcgtgcagaccgaacttctggtagaggtatctgacttattggctgatacaaaggtagcacttgccaagttgcaggaagtggttgcagaggggcttaccatggaagagaacgagtccagagccaaattctatcacgatgaagtatttaaggcaatggaagagttgcgtgctccggtcgatacattggaaatgctggtagacaaggaagcatggccaatgccttcctatggagatctgatctttgaggtataaatgatcttatagaaaaagaaagacggacagagaggaatatggttattccaatctgagccgtctttttcattgcacatttaaaaaatgaaaataaaaaaagaacttcataaagaagttcttgaaactggcccacaaggattcgaaccttgaaatgacggagtcagagtccgttgccttaccatttggcgatgggccattatgccttgtgtgagcgacttgtctaacagcaactcaacaatgaacattatatagaaggcgaaaagaaaaatcaagtctttttttcaaaaattataattttttctgcatcgtagccgtagcgcacgtaatcaccccaggaaagcagggcatttccgctggttacgttggcaatctcggtcggcagactgtcgtaaagatcggcatcgatgacgacatccagacggacatcagcgccaaattcacttgccgaaacgggcacggcatgttcgcgtagcagatagtcgatcttgccataggcattgtagtcactggtgatggtgagttcccgaccaagacgctgctcaaccaggacactggcatccagtccagccttggttgctccctgataggcgcgtaccaagcctccggtaccaagtaagacgccgccgaaatatcgggtcacaatgacaacgatattgtagacggaagcggacaggaggacatcgagcataggccgtcctgcggtctgcgccggttcgccgtcatcggagcaacgcataatttcctgtttgctgccaatgatataagcatagcagttatgccgcgcatcccagtattcctttttcttggctgcgatgaagtccagtgcctcctgttctgttgcaacaggtgcgacactggcgataaagcgggatttcttttcgacgatctcgcccacgccgccctgatatagtattttcgtgcattctgccatgcctgtctctcccacacatttttctttattatatatgaagtttttggtataataaagtagatttgtttaaattctgaccaatacccatgcctgtatatcttttgggcaggcatggtaagtaaaggagaacgatatgaactacggtaaaaaaagtgcacaaaagcaaagtgctaaactttcgagcaaacgtgccaaaaataaaaagagattcggcattacctttattaagaccattttggtatgcattctctgcatcatcgctgtcggacttgtggcaggcggtctgtatgcagtcaagttgatcaaagagtgcccggatatttcagaggtcaatatttccccgaatggattttccacgacagtcttggattcagcgggaaatgagatcgagacgctggcagcctccggctccaaccgtacttatgtgacaatcgatgagatccccaaggacttgcagcatgcctttgtagcgatcgaggacgagcgattttacaagcacaatggtattgatctgcgtggtattatccgtgcaggctttaccggtatcatcagtggcggtgagaagatgcagggtgcatcgaccatcacccagcaattgctgaaaaacaactattttacaacgtggacaaaggaagccacactcttagacagtgtcaaccgtaagatccaggagcagtatctggcagtccagttagaaaaggtagaagataaggatacgatcctggaaaattatctgaatacgatcaacttaggacagaatacccttggagttgaggcagcatcggagcgttatttcaataagtctgtctccgaactgaccttgtccgaggatgcggcgatcgcagcaatcacgcagaatccgtccaagtacaatccaatcaccaacccgaaggacaatgcgtccagacgtaaaaaagtcctcaaaaagatgttggatctgggctatatcaaccagtcggaatatgatgaagccttagaggacaacctttacgatcgtatccagatcgtgaatgcgcagaatgaatccagtgcaagcacttcttattttgtagatgcgctgacggatgaagtggtaaatgatctggtagaccaaaaaggctatacagaggcgcaggcttatcagatgctttatagtggcggtctgaccatcaactctacgcaggatagcaatatccagaccatctgtgaggaagaagtcaacaacaatgcaaactattcagatcatgtgctttattctttctcttaccgtttgacggtgacgaagaaggacggcacttatcagaattacagtgagcagaccatgctgacctactatcaggcgcagaatccgaattatgatattaacttctcttcacaggaagaatgtgatcaggcgattgaacagtacaagtctgagatcatggaagaaggcgatacgatcgccgagggtggcgagacgatcacttatactttacagccacaggctgccatttccgtgatcgaccaggcaaccggacatgtggttgctttggtaggtggtcgtggcgacaagacagccagcaagacgctgaaccgtgcaaccaacattacacgtcagccgggatcctgcttcaagatcatcggttgttatgcggcagcattggatgccggcggattgacccttgccagcgtgcaggatgatgcaccaaccagttatgcaaatggtacgccgcttcacaactacgacaatcgctatcgtggctttaccacgatccgtgatgcgatcatatcttccatgaatgtcgtgacggtcaagaacctgacccagatcggtaccggacttggctttgaatatgcagaagcccttggtatttctactttggaaccgggagacaacaaccagaccttatgtctgggcggtctgacccatggtgttacggatctggaacttacggcatcttatgcaacgatcgcaaatggcggagactacaacaagccggtattctatacacaggttttggatcataacggcaatgtgatcctggacaatacacaaaatacttccaaggaagtgttaaaggatacgacggcgtggcttttgaccaatgccatgcaggatgttatcacatccggtacaggttccggtgcgggactttccaatatgccgacggcggcaaagaccggtacgacgaccaagaaccgtgatacggtatttgcaggctacacgccatattatacagcggcagtctggggcggctatgatgacaatacggagcagacttacaccgcatatgccaaactgatctggcattcagtcatgcagcgtatccatgagaatctgcctcgtaaggagtttacacagccatctggtattgtgacggcgcaggtatgtaagaagtcaggtaaactggcgatcgagggtgtctgcgatgcggatccgagaggctctatggtctataccgagtatttcgataaggattctgtaccgacagagacttgtgaccatcatgtcaagttagacatctgctctgcctccggtcagatcgccggagagtattgcccagctgaaaatcgtgtaccgacggtattcatcatcggtggtacggcggagacagaagacggaccatatctgatcacggaagaagcattgaatacggtatgcagcgtgcatacatcttccggcagcacaagcgatggttccacaagtgatggaagcgtcaagccgacggttgagggaaccattactgacaataaatcacagactgacacttcgggaggggacagcagttccggcagcagttcgggcggttcctccggtggctcgtcaggtgacggtagcacaacgccgagtacaacaccataaaaaagaaagaacgccagcagcggtatagcgaatatgccgtttctggcgctttttgtgggtgattgtccgtgactcaaaaaagatacatttaccttatctctattttgtgttattttataatggactagaaaaatgatgagagggcgaaaacaatgtatgcattacatagccgtgtaagatatagtgaggcagatgaaaaaggcagattgtctgtatcgggcattatgaattacttgcaggattgctgtaccatgcaggcggaagatctgggcgtgggcttatcctatctggcagagcatcatattggctggtttgtgacatcctatcagatcaaattattaaaggaaatgccgatggtgggtgagtcgatcgtggtcaagacttggccgtatcgttttcgcggtatgctgggatatcgtaattttacgatcgaggatcaggcgggacgggtctatgtccaagccgattccttgtggattttgatggatctggataaattatcgccggtacgtctgccacaggaaatgctggatgcttatacgattgatccgcagttagggggtgaatggaacctgcgcaagcgtaaattgccggatactatgaccagagtctatgactttactgtgaccaagttgcatctggataccaaccatcatatgaacaatgcccattatgttgaggcggcgagagagtgcctgccgagaggacaaaagataagccagatttatgtggagtttcgcaaatcagcagtcttatcagatcaggttatctgctacagtgtgcaagaggaaaatcagcgtgtggttgctttagaaaacgaggaaaaagaattgcttgcggttgttgaatttacaatcaacaacaaataagaaaggaaatacaatgaaattaggatgtatgcagaccttacgggtcataaaaaaagtagattttggtgtctatctggcagataaggatcaggcgaaggcagaggagagagtcctacttcccaagaagcaggttccggaccagaccatagtcggtgacgagatcgaggtctttctttaccgggattccaaagatcgtatgatcgcgacaacgacgcatccatttatcaccttaaatgagatcgcggttcttacagtgaaagaagtgggacgtatcggtgcttttttggattggggcttggaaaaagacttactgcttccgtataaggagcagaccagaaaggtgcatgagggtgacgagatcttggtacgcctttatattgataagagcaatcgtttatgcgccagcacgcgcggtatctatgaaggcctgtccaccaatccaccgtatcagatcggtgatgaagtggagggacgtgtttatgagttcggtcatgattttggtacatttttggcaatcgatgacaaatattcagccatgatcccgaaacatgaagacacatcacatctgcaattaggagatgtgatcacggtggaggtgaccggcatcaaggaagacggcaaactggatgtatctatgcgtaagaaagcctatatgcagatggatgatgatgcggaaaggatcatggatctgatcgagtcctatgcaggcgttctgccgtttacggaaaaggcaacaccggaaatcattttccgtgagacaggacttagcaaggctgcattcaaacgcgcggtaggacgcttatataaggaaagaagaattcagatcacggacggtaagatccgtaaagcggactaagtttttctataccataggataggagtatgctataatagcaaaagacgtaaaaaaggagaacctgcacctgacaggtagtccattagaaatagaaaggaagcagtacattatgaaaaaagtaatcgcaacagataaggcaccggcagcaatcggaccatattcacaggcaatcgaagtaaacggtatggtttatacatcaggtatcatcccggtagatcctgctacaggcaatatcccggagggatccgtagcacaggcagagcaggcattcttaaatatgaaaaatctgctggaggcagccggtacagacatcagccaggtagtaaagacaaccgtattcattaaggaaatgaatgattttggagcgatcaacgaagtttatgcaaaatacttcacagagccatatccaagccgcagttgtgtagaagtggcaagactgccaaaggatgttatgcttgaaatcgaagccattgccttgaaataagagaagtttataattgcagaaggaaaaaagaaaagaacccttagcggttcttttcttacacttgttatagaattgtaaggatccgatcagacgcgcagatcgatgttctgaccgataccatttatagaagcctctgaaacaggggttggcatagaagacagagaagcggcaagaagatcaccggtagatgtggcagtatccagttgcttgcttaacatggcaatgccgatctgttgtaaggcgccggtatctgatatcataccggaagaaacaggtgtaatattcatgacaattcctcctttctatgcgatagaccatgtatatctatggaatattctgtcatacttaattgtagtatgacacatcaggaagaaaatgacaagaggagataaaaggagaagaaaaatgtatgacgtaattataataggaagtggtccggcgggactggcagcggctatttatgcaaaacgtgcggcactcgagactttggttctggaaaagacacctctgagcggaggacagatcatcaatacctatgaggttgataattacccgggactaccggggatcagtggcatggaattgggacaaaagatgcgtggacatgtcgatgcggaagaagcagaggtcaagactgcgacggtgactgccattgaagacaagcaggatcataaagttgtccataccaatcaaggagactttgagacaaggacggtcgtgcttgccatgggagcatcccatagacagttgggagttcccggagaggaagatctttgcggtatgggcgtatcttactgtgcaacctgcgatggggctttctttaagaaccgggatgtagctgtggtcggtggcggcgatgtggcactcgaggatgcactttttctggcaaggggctgtcgcaaggtatacttaatccacagacgcgatgcttttcgcggagcaaaagtcttgcagcagcaggtgcaggcgaaggaaaatattgtctgcctgatggattcggttgtggatcagatccttggtcaggatatggtggaaaaactgcatatttccaataccaagacaaaggaggcgacagatctgccggtgcagggcattttcattgctgttggcatcaagccgaatacagataccatacaggggctgccaaagcgtgatgaggcaggttatatccttgcagccgaagatggcgtgacggatataccgggtatttttgttgcaggggattgcaggacaaaacaactgcgtcaggtgatcacggcggcggcagacggtgccaatgcgatcacatccgtggaacattatttgtgcgagacacactaatgtcgcaatttagtaagggcgtggacttgacaggttgcgaaccctttgctataatggcaaaagtgatgtaacaatttcgtaacaaatgtttcacatggaggtttacgataacatgagaaaagatggaaagatcaagatttcatatgcggtagcagcaggtgtgcttttaggcagtgtgtctatgacatctcttgcttctccggttgccggtgttgtaggtatggcatctacagacagcgcaacggtcgcatctaattcatattctaccttgtcaggtgtatcattgactttggcgaacattttatccgatgcttcagcagcagccaataacaccagtgatgtggcaagtaatgacacaactacagttgagcagacgcagcagtctgaatatgccaatgtagccattgcacaggtagacaattacgttaatatccgtagcaccccaagcgaggatggcgatgttgtcggcaagttatacaacaagtcagccgctaccgtacttgctactgagggagactggtatcagatcacatccggcaactgtaccggatatgttaagtgtgagttcgttgttgtcggtgatgaggaactggcaaaatccgtttctaccagacttgcaacggttaccacacagactttatatgtcagagaacagccgacaacggagtcttctgttgagggtatggttccggaaggagacgacttggttgtaacagatgagtctatggctgatacaggttgggtaaaggtatccttattagattatgaaggctatgtatccttagagtttgtaactttgtcaactgactatgtaacagcagagtccaaggaagaagaagaagcaagacttgccaaggaagaggcagagcgtaaggcagccgcagccgctgcagctgcatcttcaagaaaatcatccggtggatcttactacacaggtggatcatcttcctatgcatccccaagtggttccggcggatcagcagttgtaggttatgcgtcccagttcgttggcaatccgtatgtttatggtggatctagtctgacaaacggaacagactgctctggttttgttatgagtgtatattctgcttttggtgtaggacttcctcattcttccagtgctatgcgtagcgttggttatggtgtagatgtgaattctatgcaggctggtgatatcgtatgttacagtggacatgttggaatttacacaggtaatggtacgatcgtaaatgctttgaatagcagttccggtatcacatacaccaatgtaaactacagcccgatccttgcagttcgtagaatttactaatttgcatattaagttggatttaagcctcaggcaaatgcctggggctttttattgtcgtgtatgccgagcaaaatgttcagtatatatggagggggataggacttaccgtggatggggcgctggagtgtgtgatagggagcggggaggcggactacgagagaatacattggaacaggttgggacaatttcttatgagggcaatttgctggggatgaactgtctctt

SEQ ID NO: 12494 - DNA, 14692 bp, Unknown
  gut microbiota DNA sequence
atatggaatttcataaaaagatattacagaccggacctgcgccttttgatgtcctgcgggatgccctgcttggaacatcataaaagcgcctgataaatatcgcgcttgctgacgccacggtctttggctacggctttcatggcgtcctttttgctgtagtcctgatccagatagatctgcatatgctcctcaatgctcaaatcttcccagcggctctgctcctcctgcatgacctcttctttggacttaccggcaatgacaaggacatattcaccgcgcgggtcattttccctgtaataatccacagcctgcgccagcgtcattttcttcttttcctcataacgcttggtcagttcccggcagagcgtgatgctgcggtcgccgagtgcctgataaagttcctgcaaggtcgcacgcagatgatgcggtgcctcataaacgatcatggtgcgtgtctcctgctgcatctctgccaatacacgcgcgcgctcctttttgtcttttggcaaaaatgcctcaaaactaaaacgccgacacgcctgtccggaactcgtcaccgcagtgatacaggcagccgcacccggaacggcattgacctcgatgtcttcctcataacacattgccaccagttcctcgcccggatcggaaatgcccggtgtcccggcatctgtgataacggcaatatttttgccctcttttaaggctgccagtaatgtatgcgccttttcgatcttattaaactcatgataacttgtcatgggcgtgtcgatctcaaagtggttcaaaagttttatggaatttcgcgtatcctcagcagcgatcagatccacttcttttaaaatgcggacacagcgataggtcatatcctccagatttccgatcggtgtcgcacacaaatataagatacctgccatactccggcactcctttccgttatctttgctctacttttatcccgcaagcatttaataaccgtaaatatcgtagatctccggcatataaacgcccggactctgatatacgatcagaggtttttctaccgtgatcctggactttccgtcccgcatcccctcgatcagaaccatattgggttccttatccacatagggatagaccagctgcatccgctttggctcaaccttgtaacggctcattgtggataagatctccaccaggcggaaaggtctgtgcacaaagtaacatctgccgcccggacgaaggagttttgccgtctgtgataccacatcctccagattacagagcacttcatgtctggcgatggtcttggcatcgccgtcattcttgatgccatgctggtcagtcatatagggtggattgcaggtcacaacatcaaaagaagatgccccaaaaatatttgttgcatctttgatatctcctgtgacaatggaaacgcggtcctccaagtgattgtaagccacactccttgccgccatgtcagcactctccggctggatctccagaccggtaaaatgctgcccctctgttttggcttctaaaaggatgggaatgatcccggttcccgtgccaagatccagcacttcctctccgcgctttaccttggcaaaaccggacaaaagcacagcatccataccaaaacaaaaacgcttgggatcctggatgatcttgtaaccgttgcgttgcagttcatccagccgctcaccctcatgtaaaaatgatcctgccattatttattatcctcgagttttgccaactcttttaattcttcttttgtgaccttgatattcttgcgctttgccttgaatttgaggtctcctactgcatagtcgcgctcttccttggtatcattctgctcgatcaacaccttgacacgctgacgaaggacgctgaccgccttaacctgtccgcggatcccttccggtgtcgtcacatagtccccgatattcggcaactggctgttcagatactcgtaagtctcctgctcatttttcagacagcacataagtctgccgcagaccccggagatcttagtcgggttcagggaaagattttgctcttttgccatcttgatggaaaccggaacaaagtctgtcagataagaactacagcagagtggtctgccgcagatgccgatcccgcccataatcttggtctcgtcacgcacaccgatctggcgcaactcgatcctggtacggaataccgatgccagatcctttaccagttcacggaaatcgatcctgccgtctgccgtgaagtaaaagagcagtttattgttgtcaaaggtgtactctgcgtccaccagtttcatttccagtttgtgctttttgatcttttcctgacagatcttgaaagcctctttttctttttccttgttcttctccgcccgtttaaagtcttcctcggtcgcgatacgctggacagtctttagcggctggacaacctcatcatccggcacttcctttggcgctacggcaactgttcccatctcgacaccacgcgcagtctcaacgatcacgcggtcaccgatctttaattctaagttcttgggtccaaaataatatactttacctgcggtgcgaaaacgcacaccaacaatctttatcatgcaatattctcctttattgaaagcaacatgagttccactgccaaattgtaattgccattgcaggcgatccgccgccttgcggtattctctgcctgaatgatggtattcagcccgtgataagaacactcacttgcctgtctttttatgatcatcttttcatcctgaaaagtaatctttctctcatcacctgtcgccttatataataacacatctcgaaaccagatgttcatcaaatccaaataatcaccgatcttaggcttgtattcctccaattccttgacggcttgggaaataccaaagacatccatcttttccatacgacgcatcagagaggtcatatgggatttcatttcgttaaattcctcggaagatgccaatttgatggcttttcccagattcccctgggcaaactgggcacagacatctgcctgataatccggcatgttgtgatgctccatcaactcttttcggatgatatccgcagagatcggctttaattccaaggtcacacaacgggataaaatagtcggcaaaaatcctgctgcattggtcgtcagcaaaaagataatagcataatgcggtggttcctcgatggtctttaacagggcattctgcgccgccttgttcatcttttccgcctcatccataatatagatcttgtattcgctcgcataaggcttgatgacaatgtcgttattgatctgctgtcggatgtcctccaccgaaatggtatttggcttttcatgcgaaacatagcggatatccgggtggttgtggctctggcactgcttgcaggaatgacaatttccgcaggcatccttgccccggtcctgacacaaaagagtctgggcaaatgcctccgccaacatcatcttgccggcatccttctccccgctgataatataagcgtgggacgttttgcctaaagcgatcgcgttctgcaaatgctctttgatatcctcttgtccttttatgtctgcaaacttcattttaaactactccgttttaggtggaaatatccagaagcaatccccggatctcatcgacttttccaagaatggcaagatggtctttttcttccttgaccagttctccagccagatcatccagatttttatccactaattttaccaaaccatagacgcggtgacgtccccggcgatccaaaaagttctctctggaaaacttgtgggaacgattgacgacttcattcatgaaatccttgaccagaccgcggtattttttcatatcccggatatccatgtgctccgagatcttctttccctgctccgtgatctcatccatcagccccgacagtttttcctttaattccgcatcatcgatggcactcgccagggtgaacttaaatccgtcatccgtaggctttgtttgattcacttcctgtgtctgcgtcacgcccgacacatcatttacctttaaatccataggctagccttcctcactcatcatgacttcgcgcataaagcatacgatgtcctcttccgtgcgctccaagtcctcgttatagaaaatcctgtggatgcctgcctcctgcaatttctccttggaaaaatctgcggcatctgccaaaaatcgtcggcacatttcctcatactttggatgcttctggcaccgctcacgatccagtgctctttgcaggcgcacgccgtcctctacttctatatatatcggaagaaccgcatcctgactaaagtaatcccgcaacttgacaaaggactcgatcgttccgatcaccagatagtcatatctgctcagatcaatgttgccatcgtcaacggtaaaatagtcccagatgccgtgacaggtattataactgcggatctccacgaccttgccggatgccagcagcctgtctttttcctcatgtgtgcaaaaatggtattcgatcccatccacttcacctgcgcggatgggtctggtcgtataagacacgatctggcgcagggcaagatcatgccgtcccaaaatgcgctgatataaggtatcttttcctgttgaactttttcctatgatacaaaaaatctttcccatgttccttactctgcctgtctatagaatgcgcttaccatctagtataatatagtccacctcaaatgacaacgaaaagcccatgatccacaagcccggtgatggtcagcccttgcttttgggctagatttaagaggtcaatccgctcctgatcgatccgctcacccggtacgatcaaaggtacacccggcggatagatggcgaccgatgacgctgcgatcctgccctctgcctgatcaagagcacagcgttctttcgctttttccattgcctcatgatattccatgaccttttgcccgcgcccgtataagacctgccccgtccggcagggatcgtctgtatctcttgcactggcttcccgatcgatctcttttagtgcctcaaaaagacggacaaatccctcttcactatccatgacacttgtcatggcaagtccataggaaaaagaagacatttccagaaccagatgatatttttgcaagaggatctcttccagcgcatgcccggaaagccaggtctttgatacgtcgatcacgatcttgcccggatcctgccccgggaaagaagagacacggatcttttccagacttttacactttttataaaagtcctgcaaacgagaggcatataccccaaatgccgctttttcttcttccagaaagcggatgcactgacatatggaagccatcaggacgtaagacggcgaactggtctcaaatacatccagataggtctcgatctgcctttccgaaacaagtgaattttcattgacgtgaagcaccgccgtctgggtcagcgcaggcagggtcttgtgcaggctcatgatgacaaggtctgccccgctttccagcggagactttgggaaatagggatcaaagcccagatgcgcgccgtgtgccgcatccacaatgaccgggatcccccttgcatgtgccagtgccacgatctcatccagaggttcgatcatcccttcatatgtcggcgatgtcaccacgatggctccgatatccgggttgacttgcaaagcctgctcatattctgcgatcgacgttccctcgatcatgccgatctgccctaccttgggataggtatagacgatccggcactgccgcagccaagcagcatgataaatacttttgtggctgccccgtcccatgaggatgcatcccttttgcggcagagcggaaaagactgctgtcaggttgccacaagtcgatcctccgaccagaagataggacttttttgcatgataaagccctgccatacgttccatggcttctaagataagcccctgtggatcatgcagattgtcaaatcctgggatctccgtaatatcaatggcatatgggtcttccagcccggtctgctgtctcttatgtcccggcatatgaaacggataaaagtccgaatctgccagttctcttaatttatgatctaacatttttcttttctttttccctctatcatcttataatagtatctacatgaaaaaacgcggatggcttttcgcgtgtttgttggaggttacaatgagtcaggctttggtcattttatgtggtggtgacagttcccgcatgggaaccgataaggcactgctgccattcggtgatgaatgcttattagaatatatggtgcacaagtttgcgccccactttgaccgcatctacctgtctgtcaaccagcgtggtgactacggacatctggatctggatgtcacggagatacctgacatctatctcaatgccggtcccataggggcgatcttgagcagccttaccatgatcgttgaaaaccgtgctttttttgtaaccatcgatacaccttttatccagccgtcactctgcaagcacctgcttgcggcatccgaaaactacgatgcctgttcgctggctctgcgcgatcactatgtcgacaccatcgcctgcgtgtattccaaggcgtgtattcctgcctttggcaagtccatccttttgaacaaccgcaccaacagccagatccaagccaagtgctatatcaactatgtgccgatttcggatgttgcgctctgctcgaccatgccttttgaagaccaattttatcgtctgagcgaccgcgattcctattactatgcccttttccaccagttacaggacatcagcagcatccgccattagtccaaaaatctgcccagttgcggcatccaatcgccaaaaaagatctgatcttccatcagtttttcccagataggctctaagaacctacagatcagcccgtgcacttcctgccaggctggctcttttttcttcaccttacgcaaaaggcttttccatttcttttccatataagtgtatgtaccgtatccgctcagactttcccataccaagggactgcattttacatggtctttgcggcacaaggcccttaaactttcctgtaccttgcgtccctccaaagggtatttgctcaggatctcgtatagtttttggtagtgctccatgtcctgcaacaattccaactgctttacgatggacagcagatgctccgccgcgatctgctctaccgggtatgcgtatataccgatcgtcttgttattctccaaaaaaagccgcagattttcttcctttggaaaaatatgctctccgccaaaaggcagaagactgacgagaaaaggcacatacatgccgcagacttccatggaaaagttcatccgaaatccctgaccttctttttcctcggaaaccagttctacgccaaatccttctttttcatatgcctgcaataaatcttgtcggatccgctctttgatctccttgaaggctttgccaccggtataatagtagcggaccttctctgagaccgatttcttataaacatccagccccagcctgtcactgtcctccagccagaagtctttggcatccgccaattctgcaaagatgcgcaccgttgtctccaggacataggcacttaaaatatgggaaaaaggaatatccagttcctgactctttgtcttgatccatgcttcgtttatcatgctatgctcctacaaccagattccaatcatgttttgcactttctttaagaccttgcgctccttggcatactccatcagcgccgcaacgtccttatcctcatcaccgatataggtaaggatggctttcttgaaatcgtttcgatccattttatcctgatacttgaggcagtcgcagaccagacggtctttggtatagatctgcatgggctcgcctgccagttttatggtcgtcacgcccatacccagcacctttggttccgtgtaatatggctgcagattcgggtaatccatcttaaagcgggacttggaaacattcttgctgacagcaatgtgccatgcataaggacgctgttccagataaccgtgataaaaaagagcggattccatggtaagcactccatccgagaacatgcgcgccaccatactttcttccgatccgtcaaaatacttggtcgtataataaccgcttttgacccgcttgagataaccttccttcagaaattgcaaaatgcgtcggtagtcaatccccatggcgagaatatccgctgtctttgccatgccttgatttttttgcaccagggcatcgatctgctccagatcataggctttcttttcttcgcggctcagatttgttaattccattttccccactccttgatcttacattaggtagtttcatacattccttgcctttattataagaatatgtatatttgatgtcaattctatatacctgtcctttctttctcttttttgtcttgcatttccatgatttttgtcgtatattgatgaaagacaaatatttttgtcttttggtaatgcaaaagacagtagggagatagattatgccggaaatggaaagaagacttcgcaagaacccatcccgtaaagaatgtgaggatatcatccgccgcatccttatgaccgagatgctggaaaaaggaaagaacgaacattttaagactgccaccgatttcatgaaatactttgaatcactctacccagccagcgacagtctgaccaagcaggtacagcgtgccatcaagtcccttgatatgccaaaggatccaaacggctacttcatcatcaataagactgccgaacagctggatcaggatcaggaactttccttcatgctgcaaaaaagcaaggcacatgtgacttccctggaggactatgagacactctttctggcaacagatcctaactacaagtcctatctcttacagttgatccgggaatccaagacctgtcacggcaaatatatcacgatcttagatacaacagacggacttttattctatacggaaaatgcatcccaactccgtatcctcttggaaagcctcatgcaacattcctaatattatctgacaataaatatcatatacgctaaatatccgacattatatggtgcagatacaaatgtctgcaaatagcaaaacgacaatatacaaattgtatattgtcgttttttatatcttaaccatatattatagtctaattcagattatcttgtcctttttgaccgttttgtatttctatggataggcttgccggaagtccggttaggctgtcgccttgtagccgtgcttctgcttgacgctgcacggcttgctgccgcttttcgtttgcgcctcttattacggctgatctgacgataacggcttctcttctttcggtcttcgttctttctgtgatggctcaaaaggatctgtcctgacatgacattccatacataaactgccaataaaaagatcaggataatgccgatcaccagaagaatggtcttaaaatcaatgcggaaatactttactttggatccgcctttatctgcggaaatattgtggaaaggataggttgcctttgtgttcttctcataaataacattggctcctcccacctgctttccggcataggtataggagatctttgcaacggctcccttatcggcatttttatctgtcggtgtgaccgtcgcctgtgcatcggtaaaagatgctgtatttggaagaacgaccacgccgtcctcatcaacacggatcagatcgatcttatcactgagtgatcccagtgccgcctgatcgctcatatccgacaggttgacattgtccgctaccgaatataaggaaaagttctgaaaacaatattcaaacagattttccgtatcattataatgcgccggattattgctgtctaagatcacacaaaggagggtcataccatttttctgtgcataggtaacgagggtatttcccgctacatccgtataaccggtcttaccgcctagcgcatattcatacaggttactgcttcccctgtgattactgatcataccatgggtattgttacaattatatgcctcttttttgttgtctgccgggatcgtgtatgccctggtagaactgatcttgcgaaattctggatactggtaagccgcacgcgcgatcaaagccatgtctctcgccgtcacataatgatccgggttgggaagtccgttcggattggcaaaatgtgtaccggtacagcccaattcctttgccttggcattcatcatttccacgaacttgtccatactgccgccgcccacatgctcgccgatcgcccaggcacattcgttggcagactctaacatcataccgtaaagacagttctccagcgtcatttcttccccgacttctctggcaatatgagaggtatctccctcattgccatagactgcttcctctgaaaaagtgactatctcgtccagctcacaattttccagtgccaaaagtgcggtcatgaccttggtgatactcgccggataatgggaggtatccgcattcttttcatagaggacagttcctgtctccatctctacgacgattgcagctcccgatgtcacgctgacattgtccggccaatactccgctgcctgtgtatttatggcactgccaagcgacgatactgccgtgatcgctcccgcaagacataatgctatccacttctttattctattcatttgcttctcttttctatctcttttcttttatactgcccatatctgtgcttctttttgcacatacagtaatagtataatcgcatcgtttttcatctgcaacagatttctaccacgaaagtcctattttatgatataatcgttttgctaaattttaaaataatttgagatggagatcctatatgagattaagaaatattccgggcgcagacgaagtgatcgccagcagcccttattgtgtgcaggatgccgcttcccttgcaggaaactggcaatctatttttccgcagaaacagccactccatatcgagatcggtatgggaaaaggtcagtttatcatggacatggcaaaggcacaccccgacatcaactatcttggcattgagaaatacaccagcgtccttttacgcgcggtgcaaaagatggaagccgaggaaagcccgatcgactccttacgctttctctgctttaacgcagaggacattgcagagatctttgctccgggagaagttgaccgaatctatctgaatttcagtgatccctggccaaaggaccggcatgccaagcgccgcctgacatcttctgcctttttagaccgctatgacaagatcctgaaaaagggcggtcacatcgagtttaagaccgacaaccgcgaccttttcgacttttctgtagaagagatcgaaaattccagcatctggcagatcgatgcaaagacctatgatctgcatcaggatgcgtccatgaacgccggtaacatcatgactgagtacgaggaaaagttctcctccaagggcaacccgatctgcaaactgatcgccagccgcatagacgactaagataaatatttatcaatattttcctcgaccaaatcctgcccgatcacgatcacgacatcctgtcctgccccgatcagcgcaaaacggatctggtcttttgtcgcgttgagttcgacccacttcttattctgatccaaaaagaatcccttgatccgaaagaccctgccgcaggatacatctgcaaatacctgctttaccagaacttccagccgatcacgatcaaaggctttattcatataatataaagaagaaaactcgccgctgtcatccacaaagcgtttctcataactctcgatacgatatccacaattagcgatcttctcaaaatctttatccacaaattgcaaaacgctctttcggataacttcctctgaaaatctgcgtttgcactgaatgccctccatggctgcattcagatgtgcaatggtctcatccatctgtaccggatccgcctcatctgcatgggaaagcaggatacagcctgcatttgccgcttcacttgccaagaggtaatcggctgtctccgacaggtctttttccagttttgcatccacgatcgtgatcacattgccgatctcataccactggtctaaaggatcctcacgcagggcatcaaaaaattcatccacatcataaatcccggacggctctacgatcacccggtcataaccgcacatacccatggcgatcagtttggtgcgaaagcgcctgcggtgacagtctgcgtcacatcctccggcgatcatttccaactcacacttttccccttccagatcctgcaaaagcatcatatcgacattgatggcaccatagtcattttccagaataccgatatttaagccctgacgcataaggtatctggcatattctttgataaaggttgttttcccggatcccagaaatccggtgatgagatcgatttttaccataacttctcctttttctgcttgctgcgatgatacttaaagagcacataaataaccatgagcacggcacccagcacaaaggatgtcggataggtcagatacacgcccatcacaccgtcgatacgcgatgtcatggtccagatccagatcacacggaaaagacagagcgagatcaggatgatcgccatcggtcccatggtatctccggttccacgcaaagcccctgctaaggagtgaatcacgcccaaaacactgtaaaatggggcaagtgcccagatgcacataacaccggatgtaatgacttccggctccttggaaaaggcggaaataatctgggtatcaaagcctaacataatggctgtcatcatcagtgtatagcataaattgatgacaaagatcatggctgcaccctggaaagcccgcttgcgcttgcctgcaccgatattttgtccgacaaaagtcgtcgcagccatggaaaaactgaggatcggcaggatattgaagccgtctaccttcatataggcggaaaatcctgcaacaacattggttccgtaagcattgacacctgtctggatcaaaatgttggaaaaactgatgactgcattctggatggcagccggaagtccgatacggacaacgcgcatcgcccaatatttatccaggctgatgtcacggaatactacgcgataaggcgcatccacttttgccagatagcggaatgccagaatactgctgacgccctgactgatgaccgtcgcgatcgcagccccttccacgcccatgccaaatccgcagatcagcagaaaatccagagcaatattgacaagggatgaaaccacaagatactgaagcgattttgtggaatttccgacagcatttaagatggctgccaacatattataaaaggtcatgaagatcatgccgccaaaataaatgcgcagatacagaaccgcctccggcatcatatcttccggtgttcccatggcacgcaataactgcggacaaaaggcaacgccaaccactgtcgataccagtcccagtaccacggcaatccccaacatattgtggatcacatggtggagttcatcgtaacttttggcaccatagaactgggagatcaaaataccgcctccggcggatgcccccagacaaaaggcgatcagaaaataggtcaactgcccgctggcgccgaccgccgcaagtgctgtcgctcctacataattaccaaccacgaaagaatcgaccgtgctatacaactgctgcatgaaatttcccaatatcaaggggatcgcatatatgataatggatttaataattttaccttctgtcatgatttcctactctaattctgtatattccagtccgatctgcttacggacccggtctaaaatgtgcattacatcggatgtcgcctgcagtggcaccatcttactttccagcctgcctgcccggatatcctctgccacggcgtcaaattcatccagataagaattgatgcgcggtcccggacccttaaacacttctttatgaaagatgttctttttataagtaacttgattggtcgcatgataaaaagacgcttgaatcttacccttttctccgctgatggtcatcttttccagccccttcatatccacgatagacgcggagatcctggcagtcagtccattttcaaaggtcagcatcacatcctcgccataatcgataccattctcgatcgtaccgctgctctcgatttttaccggatagccccacaaacgataagcataggtgatcggatagatcgtgatgtccaaaagggcaccgccggcacgctttggatccgacacacgtggtgcatatttgacagacttcatatgataagtgaagttggcatccgtcacctttcccagtttgtcctccatcaaccataatttgacctgattggcagccggagagaaccaggtccacatggcttctgccagatagactttcttttcccttgcaagcgcgatcagactgtcggtctcctccgctgtgaccgtaaacgccttttcacacaataccggcttgcccagttccagagcctctttgacataacggaaatgcgcattgtggggtgtcacgacatagatgccctccacaccatctgctaaaatggattcctcggcgctcccatatgccttgcaatggaactcctccgcaaaagccttggcattatccatatttctggtatagcaggagacgatctcatgtctgccactggcaagcaactgccctgccacctgatgtcccaatttcccc

SEQ ID NO: 12495 - DNA, 5452 bp, Unknown
  gut microbiota DNA sequence
tcctgtgcttcatcctttgttatgcctcctgcgcagcacaaaggattttcagcctctgctgtcctactcaaaggtcttgtaacccatgaaaatattaccatttattgtcagatatttcaacaagcgtttttaaattatatgatatagttttacccccccccgagaaatttcaaacaatttgagtttttcagaattttcttgctttttcgtaaaattctgttcacttcttttcccgggatttacgcagtcttgatcttgccttcctgctgtaaccactgtacttcatcacggatggtctcggtatatggacgggtgtgataacctaatactttcttagccttgctatagtcaaacgtattgtttctctccagattatatacggcaaaggaggtcatgaccggtttctttccggataaaccggctgtcttttctgcaatcttcgcaattccctttgctaccggcaatggcagaaaatgcttgatcggtgtgcagccggtctcggacgcgatcatatcactgagctggcgcatggtcacttcctcatttccaaggatataacactcgcctgccacacccttatccgcagcagcgatcacaccatctgccaagtctctgacgtcgcacaggttaaaggatccctccatacccatcggcatatctccgttgatgatacggatgatggttccggtcgtctcgctgatggagaaatcatttggtccaaggattccgcttggatgaacaacgcaggcatttaaacctttttccgtgactgcatccaaaaccgcctgtgttgccattgccttggttctggaataccagcctacgacctgatccggatcgaatttctttacttcatggatttttcttccctttggtgcttccgggatggctccagtgctgctgacatagacaagtttgtcacattctttatgctctaagcactttgcaatgatattcttggtgccgcccacattaacgtcaaccaatttcttgctgtaatctgcattggtcgttaccatgcttgccacatgaaggactaccgtgtgcacgccatcctctacggcaaagaatggctccaaggatttcttgtcacacagatctccttctacgacttccacggactccgggatatattttgctgccggatcgtttggcagaacaaaggctctcacgtcagccccctcttccaccaactgcctgcataccgtgcttcccaaaaatcctgctgctcctgttactaaatattttctactcatgatctttctgctccttttctatttttaaatttttctttctttgtttgttacaggtagtatcatagagcgtcagtattgcacaaatattttacttttgttaaggttttattaaagagggaaacatgttataatttcttcatattaaaatgatcgatagtagtagataaagcgaggaaacttgccatggttacctatccactgaacgaattacaacccggcatgatcgttgcggctgatgtctttacgccccgtggacagttgatcgttctcagaggctccattttaagtcaacagatgatccagcacatgaaatactaccatgtgccgtccgttacgatcctgccaaatgaaattgatccaatgtcctttgaaaaggcagaccgtagcgaaccgacttacgccaaacgtatccgccagagcgaatctttcaaagaattcagggagcattatacgcagagtgccagcatttttcaggaacagttgagtcgttttgttgccggcgatgcgcatctggatacctctgcccttttacaggacacgctggaacttttcgaccacaatcgtgcttccttttccttactggatatgctgcacaatatgcgcgatctggacgactccacctatgtgcacagcatcaacgtcgccgtcatttcacgcctgatcggtatgtggtcagatctggacgaagccaatctggatgttttgaccctgtgtgggcttttacatgatgtgggaaaagtacagatcccggatgagatcttggaaaaacctgaccggctgacaccggaagaatatgagatcatgaagacacatacggttttaggctaccgcatgatggaacgggagcgcatcgacaagcggatcaagaatgccgctctcatgcaccacgaacgttttgacggcaagggctatcctttcggtcttaccggggaccgtattgacacctttgcttccatcgtagccattgcggatgtctacgacgcactgacttcggatcgctgctaccgttcggcagtctgtccttttgaagtgatcgccctctttgaaagcaatggactaaccgaatacaaccccaaattcatcctgacctttttggaacatatcgcccagacctatgtcggcaactctgtccgtctgagcgatggcagtcagggcaagatcagcatgatcgacacaaaaaaacttctccgccctctcatccaattagaaagcggagaatttgtagatctgtccaaacgtctggatctctatgtcgaagagatcatttaatcaaataattttgccttttggcgttcaaagaaagcatcgacttccgcgatgatccttgcaggctccatggtcttgagcagatagccttccggcttgagtgccatgacctgcatcacactttccctatcatccttacttgtcaaaaaaatgaccggaacatcggaaaattctgtctctgtacggatcatttccagcacctgtctgccatctacgaccggcatttcataatctaacagtaccagatccgggcggttggtcgctaaatacttgatcgccatggcaccggaatttgctaagatgacctgatagcggtcttccagccagcctttgacattgcgcagcattgccccggaatcatctacgaccagaacctttttcttgtgctgtgcgccaaactttgcgatataggcatcgataacttccaccaattcattgacattgaccgggcgctcaaaaaactgacggatgaggtggcctgagatcacacgtccgatagcgtcattttcttccctgcttcccaccgtaaagatgggaatgtcgcgctcggctgactggtctttgagatagatcagagcctgctgcatatctccgatcccgtccgatccacagatcagataggcaccgatggtatcacgctcggctgagatctgtgccacatccggctcgaccacgctcacatcatagcccgcctcttttatcttatccttgagtgacaggataagatagccctgtacctccgacacaatcaaaatcttatacgtttccttcatcattttctccacttacttttctttttttctccaacttatccaccatggcatgacaaagatccatgacttcttccatggcgacatccgcaaccgctgcccgcagtgcatccatatcctctgccagatcttccggcatacgatagccttccaattctgccatggcagcatctacgccgtccagatcaaagtcatccatggcatctgccatctgacctaagatacggctcagttcttcctttgaggtctcctgtaaatttgcctcgtccaaacttccgtaaggacgcaggacttctttataacttgtatataattctaatacttccggcagtctttcttcaagtccttttcggtcattggcattgcccaggtcttccatttccttgaagagggcagacagacggtctgcaccgatcatgcgggaggtattcttgagggcatggacttcgatggtcagatcccggatcataccatctgccagacactgctgcatctttttcgtcttggtatcgatcagtttgtagtagtctcccaagaggctcaagaaaagtttcttgcctcccgagtaatgcacgccttcttctacattaagtccttcaatgacaggcagttcttcttcctccgcctctgctgccacatcctctgtcttgatgatcttatcctcaggcagatattgttttaacttgccgcagatctccttgatctcaatcggctttgccacaaaatcatccatgcctgccgctacaaactcctccttggcgccgctcatggcgtctgccgtgagggcgatcacgatctcatgctcctgactgcccttttcccactcacggatccgacgggtggcttccacaccatccatgaccggcatcatgtgatccataaagaccagatcataggtatgcgcctccagcatttccagcgcctgctttccgttttctgccgtgtcgatctgcatctgcaaaggtgccagcaaaccaatcgcaacctttaagttcagcttattgtcatcgaccagaaggatctttgcctccggtgccttgaaattcaaggcctcagaagtgcccgcgtaggtcacctgtccctctctgcggatcgcctgacagaagttgagcgaatagagcggcttgttcatgaccatgaccttggcatcccgcaaagcctcctgtaccggattttgcagaacgcagatctgcttatctcccaacaaagaaccatggatggcatccttgtgctcctcgtagaccagggtatccgtaaagaggaagtctacatgcgggcggtcttttgccatgacatccggcgcgatcggttctatgccgtaggcacgcaccagacgctcgaagttctcctgcaaataggtattggaaaaagcaccaccgatctgcagggtctttttctcctccggcagactggcaaccggactctcctctgagatcttctggcggatggtaaagtagaactcactgctctgtccgtaagtgcttctgacaccaatctgtccccccatcatttcaaccaactgacggcaaatggcaagccccagaccggttccctctttggaatgatttttccggctgtcaacctgagagaaggactggaaaagtttcttctggtcttcctcgcggatgccggatccgctatccttgatactcacggcaaggacaagatcctgctccgtcttatcctccaccttgatcgaaagtttcacatagcctctttctgtaaatttgacggcattgtttaagatattgatgatgatctggcgcacgcgcagaccatccccatgtaaagtctttggcagggtcgggtcaatatcgtaaaggagttccacatttttctcaccgattctggtcaaaaacataatgcccagatcactgatcatagacatgggtgcatagtcttcttctaccagttccatcttgccggactcgatcttggaaaaatccagaatgtcattgatgatatttaaaagggcttccccggatactttgatattggataggtactcctcctgctcctccgtcacatccccacgtagcatgatctcggtcatgccgacaatggcattcatcggggtacggatctcatgtgacatattggaaagaaaggcagacttggcttcgttggcagcctctgcctcctgcaccagttgtaactgct

SEQ ID NO: 12496 - DNA, 1819 bp, Unknown
  gut microbiota DNA sequence
cgtctttatagaaatagggcaggatgttcattttgttggtggaagtctggaagatgctatcaatgaaggtgtacgacagggttatacagatgggtatcttcgaaaatcggttgtaggagatcctattgaacgcataaacacaaaagataatacgccggcagtcatccattattctatcgtgaccggagataaggtaaagatcacatttgcgccaaagggttttggcagtgaaaatatgagccgggtctttatgttaaagcctgcagatgggatcgagggtgtaaaaaatgccattctcaccgcggtaaaggatgcaggtccaaatgcctgcccgcctatggtcgtaggtgtcggtattggcggaacctttgaaaaatctgcactgatggcaaagcaggcacttaccagaaatctcaatcagaagccggaaattccatgggtggcagatctggaaaaagaaatgcttgaaaagatcaatggactgggaatcggaccgggtggactcggcggaagcaccacggcacttgcagtcaatatcaatacttatgcaacacatattgcgggacttccggtggcagtcaacatctgttgtcacgtcaatcgccacgtagtgagagaattataattgtaaaaaggggtttcagatggatagacatattacattaccaattacaaaagaaatcgcagaaagcctgacttctggggactatgtatatctggatggtcagatgtatgtagcacgcgacgcagcgcacaagcgtatgatggaagtcctggatcgtggagaagaacttccgatcccgatcaaagatgcaacgatttattatatgggaccttcacctgccagagagggcagaccgatcggttccgcaggaccgacaacagccagccgtatggataaatacgcaccgcgcctattagatctgggacaaaaggctatgatcggtaagggaaagcggacaaaagaagtcttagatgctgtcatccgcaatcacgctgtatattttgcagccgttggcggtgccggtgcccttctttctaaatgcatcacagagtcagaagtcatctgctatgatgatctgggtgcagaagccatccgtaagattatggtcgaaaattttccggtcatagttgtagcagattgccacggaaataatctctatgaaacagccattctggagtatcagaaataaaagaaaattgcgaagaaatgcaatatttccgttgacaaatggggatacctttagtagaatagtttgtgcattgtgaatattgatttagttcgactatggagaagtactcaagtggccgaagaggtgcccctgctaagggtataggtcgggtaaccggcgcgagggttcaaatccctccttctccgttttcataatgcatatggctccgtggtcaagcggttaagacatcgccctttcacggcggtaacacgggttcgattcccgtcggagtcactgattgaagtagcacttatgactaaatacgtatcgtactaaactcgaacggcgctacgcttgttctcgttaagtgctcataacaggccgatgtggctcaattggcagagcagctgatttgtaatcagcaggttatcggttcgagtccgatcatcggcttttaatttggacctttagctcagttggttagagcaaccggctcataaccggtcggtcctgggttcgagtccccgaaggtccactctatagttaaaggttttgtactcgatttcttttatttggcctaatggctcagttggttagagcgccgccctgtcacggcggaggtcgcgggttcgagtcccgcttgggtc

SEQ ID NO: 12497 - DNA, 29998 bp, Unknown
  gut microbiota DNA sequence
atatatgtcatctgatttgaaccatcatatgtcatatagtagtagcactttaagtgctcgtaacagcacttgactactaagttcgaacatcactaacgttcgttctcactaagggtcaagtatgtatcgcactaaactcgaacggcgctatgcttgttctcgttaagtgctcgtaacaagccgcagtggcggaactggcagacgcgcaggacttaaaatcctgtggtggtgacatcgtaccggttcgattccggtctgcggcagttcattttttccttgacaaaccaagaaaaagatgtataattaaatatgttgtgtgagcaacgtataaatagtatgtgtgtgtagctcagctggatagagcacttggctacggaccaaggtgtcgggggttcgaatcctctcacgcacgtcttacaaaaaaggacaaggcaaactgccttgtcctttttgttatggcgatgaggaaaatacaccgcataaatgcgtgtatttgacgaacgctaatcagagcgagactcgcagagcgtatctcggctctgttatttacgccaccggaaggattgagacagcctatttcttatgaaatatctgcatagccccataagtgcggggaatctgcttggcagagacttttcgtgatgggcaggaaaagttcttgcaagtgtcgcaggagttgcataattgatttaatgccgcgtggcgcttggtatctaaatgcaggatcagggtggcggtctttaagggacttagcatattgctctcagtcaggcttatgtcacccggattaaggttatcatagatctgtggaagcagatccaaaggatagtcatcgcccaaaaatgacaatttttccaggtagaggctgctttcaccttcgatcatatgggcaaagtcctcgtatgccttagagaggagcaggaggctgatacaatccacgatataagcctcctgtatctgttcatgattgagatagagttccgaaaattcatcaacaccattccctaaagtcacaaagccataggcatagtgagaaagggaaatctcggggagatcctgctttaaagaataataggcatagcaatcgaccaggggcaggagcgcctgataaatcgcctggatccgccttaattcctttgcaggaaaatgaaaacggtcgcaaaaatttttccaatcgccggtggataatttgggcagcagtttacacttcatgagatccatcctcctccccattgcgtttgataagatctgcaatttcctcaaaacgtgcgtttaccagatcgtagttcttgcgatgatggggaaaggcacagttcatacaggatttgactccattttctaaaaattcatagttcccgccacaggacttgcccagagcataaagcggacaataacaaaaaagacagttaaagtcagcctccgggatgcccttatgacagggaaaatattcacattttttattctgaaaaaatttataatattgactcatgagattatcataccctattttgcataaagttcaaagaaaagattatataagtctgcctgccggtggtttctttgctcaaattgtggtattctaagtaggcatgcatattggaaatatcatggttatagtgaccatgtaaatagcaatagatggaagaccaaacggaagaaaacgacagttactcgcggaggattggaagaaaaaatgaacttacttactataaaaaatctgacgaaggcatataccgataaggtcctgtttgatgggatcgattttagtctggaagagggtgaaaaagtcggcatcatcgggattaacggtacaggcaaatcaacccttttgcgcattattgcaggcatcgaggaaggggataccggggaatataccaagggtaatcatgtggtgatcaattatctgccacagaatccggaatttgcaccgggacagacgatcttggaatatgtcattggacagaaccagatgcatggcatagcaggagataccagcctttccggagactatggcgtggagggagaagccaagagtattttaaaccgtctgggctttacggacctgaatcagccgatcgatcatttatccgggggacaaaagaaaaaggttgccctggcagccgtccttttatcaaaaaatgagattctgatcatggatgagccgaccaaccatttggatcacaatatgacagaatggctggagggctggctcaagtcttatcggggcagtctgatcatgatcacgcatgacaggtattttctggatctggtctgcaatcgtatcgtggaactggataaaggaaaattatattcatacaaaacaaattatgaaggatttcttgcgcttaaggcagagcgggaggagatggcgctgtctacgcaggcaaaacatcaaaatatcctgcgcaaggagatcgcctggatgcagcgtggggcaagagcgcgttcgaccaagcagaaagcccatattaagcgttatgaggttttgcgcgatgaggaaaaggtagccgtggatacggaggtggagattggcagtctgtcgacgcgtctgggcaataaaacgatcgagatggatgatattgcaatcgcctatgagggaaaaccactgatccgggattttacctatcatttcttgaagaaagaccgtattggcattctaggaccaaatggctgcggcaagaccaccctcttaaagatgatcatgggagaagtgcagccggatcaaggacgtattgagatcggggaaacggtcaatatcggttattatgcgcaggaggcaaaggatatggatccgggacagcgtgtcattgattatatcaaggataccgccgaatatatccgcacggaagacggctatatctctgcgtcacagatgttggaaaagtttttatttgcaggctctttgcagtaccagatgatcggaaaattatccggtggcgagaaaagacgactttatctggcaaaaatactgatgggagcaccaaatgttttgatcttagatgagccgaccaacgatctggatatttctaccctttgtattttggaagattatcttgacacatttccggggattttgatcacggtttcccatgaccgctatttcttagaccgcgtggtcgatcatatgctggtatttgagtgggcaggaaaaatctccctttttaacggctcttatcaggaatattatgagacctatggcggggagagtctgacggatccgggggaaaaagacaagacaggtcagcagactggggaagaaacgacaaatctgtccggtgcccaggcttataaaatgcaaaaggaacagagcaagaaactgaaatttacttacaacgagcagcgggaatatgaaagtatcgaggatgacattgcaggcttggaagaagcattggaaaaattagatgaggatatggctgccaatgcgaccaactccgtgaaattaggtgagttgctggaggagaaaaagaaagtcgagcagactctggaagaaaaaatggagcgctgggaacatttagaggatctggcggctaagatcgcagcacagtagggacgttccttttgccacatggactgtcccgtttggcacagataagcaaagagaaagaggtaagttttgatggaaaagattaagaaaaaatacatagggaccggggcattttaccggcgttatttatatctggcgctgccaatgatcctacagaatgccattaccaatctggtcagttttttggataatatcatggtgggacaattgggcacggagcagatgtccggcgttgccattgtcaaccagttgatttttgtctacaatctggcgatctttggcgcggcatccgcggcgagcatttttggcgctcagtattttggtaagggcgaccacaaggggcatatgtattccttccgttttaagttgtatgcgactttgctggtcacggtcattgccatgactttgtttgcaagtcgaggaagccagttgatctctttatatctgacagatacgacaggaagcggagcgacagaagtggctttaaaatatggtctgcaatatctggcggtcatgctgtttggtttgataccgtttgccgtcaaccagtcttatgcaaccaatatcaaggaaacaggacagaccatggtgccgatgatcgcaagttttgtggcggtaggttccaatgcagtcttagattaccttctgatctttggaatcggaccatttccaaaattgggcgttgtgggagccgcactggcaacggtcttggcgcgttatattgaggcggggatcgtgatcctatgggcgcatacccaccagacgaaaaaccgctatctggagggagcctaccggggattcggcataccgaaggccgaacttaaagcaatccttgtcaagggactgccccttatgatcaatgaagtcttgtgggcagcaggtatgacgacggtcaaccagtgctattccatccgcggcattgctgttgtggcaggtgtcaatattgcggcaacgatcacaaatctctttaatatcgtctatatccaactgggagcctgcatcagcattatcgttgggcagtatctgggagcgggagatttggaggaagccaaggatgccgataacaagatgatcgctttcagtgtattctgctgtgtcattgtggctttttgcatgtttgtactgggacgctttttcccgcgtatttataacactacggatgaaatcaaatcgttggcggcaaatttcattgcggtatctgccatgatcatgccgttttgctccttttcgcatgcctcttattttaccctgcgttccgggggaaagacctttgtcacctttttgtttgactctgtctttacctgggtggtcgtggtaccggtggcatatgtgctggcgcattttacggggcttggcatcgtaagcatttactttttcgtacaggcgaccgaactgatcaaggtcatcattggttactttatggtgaaaagcaatgtctggctggtgcagatggtatagaaaattcttacttgcgcagtaaggcaaggaaacgtatactaggagtaaagatatgccacgaaaccgaggttttggggctgggattggagcgcaaaggagaagatatggctgagagaaatgtaatttggagtgaccgcaagagaactttatttggcttgccactgagttttacaaaatatattttgacggaggatcgtctgtttgtccagaccggtttttttacgacggtagaggatgaggtacgtttgtatcgtattctggatgtgaaactgacccgtacgctgggacaaaagatctttggcgtgggaaccattcaggtatgttccgcagacaagagcatggcggattttgagatcgtcagtgtaaaaaatgcggcagaggtcaaagaacgtctgtcagaattagtggagaaaaatcgtgtagaaaagcgtgtgatcaaccgtgagtctatgtttgacaatgacggcgatcctgatgacgatgatgaggatctgcactaagaaggtataaagcaaaaagggacgctccttatggcaaaaggagtgtcccgaaagaggaactacagtacgcgctgtagttccatttttttatttacgagtaagatgtcagcatatttgcccggcgtaatggagccgacttggtcgtagatgccaaggctttttgccggatgtatggtggcagcagcaatggcttcttccataggaacgccgatctcgatggcatgacacatactgtcatagaggttggtcacggagccggcgatggtaccgtcatccaatgtggcaagtttgcctttgacatggaagatctgaccgcccagttcataagaaccatccgaaagtcccgtgccacggatggaatcactgatgagacagatatggtcagggaacatgcgaaaggcattgcggatcatggtgccgtggacatggatgccatcggcaatgagttcggcatagatatcttcagcatccatggcggcaccgatcagtcccggttctctgtgaagaagagaaggcatggcgttgaatagatgtgtcagatggtcagccccggcagtaatcgctttttctgcggtagcacagtcgcagcaagtatgtccgagggaaatcgttactttctcgtgatagtctcggataaagtcgatattgtcggcgatgtttggggcgaccgttaccagacggatggcacccgatgcagccttttgacaggcatcaaaaaatgctgcacttgccggacgcagatagcatgcctgatgagcacctttttttgcctcatccaaaaatggtccttccatattgataccggcgatacgggcataaccggattccaccggattctgaccggaagcaggttgatctgttctgacgtttgccagatggaaaaaggatggatcatccagactggcgtaagcggtttccagagtctcctgcggcagtgtcatggaggttgggcagtaggtcgtgatgccgtgtgctctctcataggctaaaatctttttgacaccacccttatcgccatccgaaaaatcacaaccgactgcgccgtggctatggatgtcgatcagtccgggaagaacaaattgcccttcagcatcgatgacatctgccttatcttccgtgtaggcattcggcgagacaaatctgccgtcctctatataaatatcttttttttcaaatcttttgtcttgggtaaagaccagtccatttttaatgatcataatgtgcatcttctttcttaaagtcttgtgccaaaagggacactccttgtggcaaaaggaacgtccctaaaggagggacagggcttcttcgtcggcaactacgatcacatccgggtggagttgcaggatggaagccggaacctgtggcgtgatcggtccgtagagggcatcgtagatcgcctgcgcctttgccttaccactggcaagcaggaggatctttttggcttccatgataccgccgatccccatggtaatggcatgtgtcggaacttcttccatagaggcaaagaagcgggcattggcacttctggtattttcggaaagggttaccacatgggttgccttgatataagagtcagtcggctcgttgaaaccgatatgaccattgccaccgataccgagcagttgcaggtcgatgccgccgcaggcagcgatcagatcatcatatgccttgcaggcttcctctggatcctcggtaagaccgtttggtacaaaggtgcagtctttgttgacgttgacatggttaaagagattatcattcataaaatagcgataactctggacatcagcggcaccgagccccttgtattcatccaggttgatggtggtgacctgtgaaaaatcaatatctcccttttcgtaccactcgatcaactgcttgtaagtgcctaccggggtagatccggttgcaagtcccagcacggaggtcggctttaaaatgacctgtgcggaaatgatgttggcagccttacggctcagttccttaaaatcctttactttgtataatagcataatatccactccttgccttttgatttcttctttgttatcatgtaaatgaaaattattttcatttcaaaggtataatatcacaattattttcataatacaattatttttgaaaatcattttcaaaaaataaaaaggaaagacggcggatggaacagcagaatatcctattaaaaatacagtccatgggaaatcaatttaccaagaaagaaagacaactggcagattattgcctgtcccatcaggacgagatcatatatatgtcgatcacggatctggcgcttgcctgtggggtgggggaagccagtgtgacacgtttttgccgcaaattgggcgcgcagggctatcaggattttaaggtgcaggtttcgatcagtcaggcgcgggtcggagcgatcttagaagcccatgcagacgataggacgggggtagaacataggccggagccggaggcggcagccggacagacggactgggcacagaaggttttccttgctcaccggaaggctctgcatgagaccatgctgctggtggatgagaaaactctgctttccatcgtgcagatgtttgagcaggcggacaggatccacttttttggcgtcagcgacagtcttttgatggcccgggaggcgcacagcaggttcgcccgtgtcatgccaaaggttgtctgtgtggaggatccccacttgcaggcgatcgcggcaaccatgatgacagagcgcgacgtcatgtttattttttcttattccggtgccagcaaggatgcggtacaggtggcgagattagcccatgaggcgggagcaaaagtggcagcagttacgcattacaccaagtcgccgctgacggcttatgcggatgccatccttttgaccggtatgcgtgaggcacctttagagagaggctctatggcggcaaaaacggcgcaactatatctgatcgaccttttatatcagaggttttatgagagaaaccgcgaagaatgtcaaaagaacagtgagcgggcgattgagacagtcgtgcgcgagacctactaagataagcaggaggataaaagtttcggctttgatagaaaatttcttggagttgaaactttttttgcttctgtggcgtctaatatatagtttcgaaacaaaaacagatgatggaggtgaaaatatgcagtccttttttcgcacaaagaaaacagaagatgacaaacaggaaattgtcgaagaagcactgcttgcaaactatgattcttactatcggctggcttacgcttatgtaaaaaatcccgaagatgcgggagatattgtgcaggagggagcctatcaggcgatcaaaaagtgcaggaccttagaaaagccggaatacgttaagacctggctttatcgtctgatgctcaatgaggtatttagtttttgccggaaaaagcaaaagacggtgagtacggaggaagtcgtgacggagccatggacggaggatcgttatcaggacatggatctctggaaggcgctggatgccttggaggacaaggatagaaccgtgatcctgctgcgctattttgaggagtataagatcagtgagatagcagacattatggatgaaaaagtgagtacgatcaagagccgtctgtatcggggcatcaagaagatgcgtatacagatggagaatgactggatctgggagggataagcatggaacaaaaagatttgaaagcatataaagaagattatgaatccgttcatatgagcgaagatcaggtggagcagatgaaaaaaaggatgcagcaggcaaaacaggaaacgcaagggaaaaagatcatagagatgggaaaaagaggaaaccgcatcttaaaaataggggcgacggcagcggcagtagccctggtatttgtggctttgccaaatacatcggcaagcgtggcgcaggcaatggagcaggtgccggtcttgggaaatctggtgagcgccgttactttccgcgattatcagtatgatgatggcaagaacatggcggatgtcgatgagccaaaactcgtggcaggggatacggacaatgccaatgtggcgcagtctgtaacagaagtcaatgcggagatcgcagcgatcagcgaacgctatatcacagagtttgagaacaatatgagaaatcagggctatcaggatattacgatcaaacatgaagtgatcagcacgactgatgattactttaccttgaaactcatgtgttatcaggcggcaggcagcggctcggaagaagattattactatacgatcgatcttgcgaccggacagcgtcttgctttagcagaccttttcaaggatggtgcagactatgtgacaccgatcagcaagaatatcaaaaagcagatgcgggcacagatgaaagcggatgagaatgtgatgtattggatcgacgacccggaagtggcagagtcgaactttgatgcgatcgctgctgaccaatccttttatctaaatgacaagggcaacattgtgatctgctttaacgaaggcgatgtcggaccgatgtctatgggctgccctagttttgagatcccacacaaagtggtttctgatattttgaagtagtggcacacaggacgaagaatggcagataggagatcagatatctggcatttgtctcaaaaagtgtgaccatggcaaagatgccgagaagtgccagatggatcagacattcctctgatgtggaaggacgcttcaacaagagaaaagcatgatagaaacaaagcagtaaggtgcagatccagacgatctgcgccaactgcacataataagtgaaatattttccaccggtgccgatgacatagtcggcatcggtatttttcatatagtagaaattttctaacaaccgggaaatcccgtccgatctttgtgggatatattcatcaaaatctgcgccctctttgccccagccaaaggttccgttggaaaaattacagacagtctttcgcaggacatgatagagataaccggagaagcccatatcctgcaaacgtttcttgagcagggtcagattggcatctttttttgcatcgtaatcgtagatggatgtcgagagttcatcgtcggtttggctgtaattgccgatggtcttttcgttcagtcccatcatggcatagtgagcaaaagatttttctacactcttatccggtgctatagccagataggatgtcatgcctttggaggcaagcgcggaaagggcaaaaagagcggcaaaggtgcaaagcatcacgattgcttttttcagaccatgctgaaattgcccgcgtacaaggtccaaggcaaaaaggatagccagtgcgatcaggatgatgagattggtcggcttgagcaggcgtccaaagatcgcaggcaggcagatcagagaggtttttatccaaagtggcatagtatcttttcgcttcatttgcaggtagaggtaaaaggtcaggatcggcaaaggcagggataaaatatcgctgtaagggacaaagatccaagggaacagcccaaagagcagcaaacccagaagaaaagtaccactgacgaccgcgcgggagtctgtcagaagcaggacgcagcggcaggtcagatagagggcgatattgctgcagaggatgccaaagaggatcaaaagataatagccgtctacagagaaaaactttcctatttgcagggaaagcaccgtaataaaataaatgcaggtattgttgggattggtggcaaagtaagtcggagcataagggtagacttgtccctgcacaaaatactgggcgctgatacgcacgatcccgacatcaaagcctacataaaaccagatatgataggcgataaagacctgtaaaaggagggcgagcagacaggcaaggcgcagatgccctaagttggcgcttgtgcagctttttaccataaaacgctgccacagatacaggagcaggagacagggcaagaggtagcaggcgatcggggcgatttcctttaagtaaggaagttccacggttctctggaaaaaaatgagggcagtaaagataaatgccatcatgataaaaaagaccatatcgaaaaacttatatttttgcataatattctccaaacaacaaaaacttaacgaaaatatgctatcattatatcataagtaagacatgcaggaggacgggatgaagaaaaatcgcatgacctatctggatatggcaaaggggatcggtatcctgtttatgatcgtggggcatactatatctttgggctggcaaaaggatctgatctattctttccatatgcctcttttttttgtatgcagcggtatgaccatggtcttgtcaaacaactggctggagtggagagaggatgccaaaaaatcggcaaaacgcctgctcttaccggcacttgttctgtttatggtcatgactttatggacttatcttgtggaggggcagtttgacgcggcatacacaaaagactttgccctgaatcggctggcaagtcttttgctggcgagtggatcggatgtcatggtctttggaaaagaagttgcagcgatcggtctgctctggtttttgccggctcttttctttgcccggctgcttttggatgccctccatctgctgatgccgaagaaatgggaaagtttggttcttcttgcatgggcactggttcttatattgcatctgccactgcctctggcgctggatctgggacttgccgggatgggctttgtggacatcggtatctggctaagagaaagattgccacagtgggagcaggaaggaaaaaagaagattgcgacaggggataaaactctaatcggtgcaggtatcttctggtttttggcatttcttttacaggaaaaatccgccgtgcccgcctttgacatggcacaaagagactatggtattacttttcttgggcttgccatggctgcctgtggcagtcttagccttatacttttgtgccgaaagttagaaaagtatgtgcgcgcggatggttttctggcgacttgtggcagatacagcatgctgcttttgtccatacattatctgggctatctgccttatctgtattatggatctctttttcctatgggagtagtccggtgcctgtttcgccttgtactggaggtttgttttagttttttccttatactatggaagaaaaagaaggagatgcagcaggaggtttggtggagccggttggcttttctggcagtctttttgcttcagatgaattatctgctcttttgccgtttcccgggaggcctgcagtatgattccatcaatcaactgacccaggttgtgaccgggcagtacagcaaccaccatccgatctatcacacactctggctgacactgggcgcaaaactggcagaaatattgggcggagacctgacgttgggggtattcttctttaccgtcatgcaagttcttgttttttcctatatggtgtcctatcttttaaagaccttgcagcagatcgggatcaggcaaagatatctggggattattctgggctatttcctcgtttttccctatcatcttttctttgctgcttatgtcaataaagatacgctctttacctgttgcggtgtcatctttgttgtgtcattttatcgtttgtcctgtgcgcattttgcaggatcgaaacgagcagatgtctgccacatgctgatcggcggtctggggctagccctcttgcggagcaatgggttggttgccattgggattttgttctttatctttttgctggggcacaaaaaggatggcgagagcatccggctggcggtcatgggatgtgtggtggcaatctctgtggtcttagtggctggactaagactattcccggagattgggcaggggtatgaatctgaaaaattttccatgcctattcagcagatcgcgcgtgtgatcgcagaggaggagcatttatcaaaagaggaaaggcaggcggtggaagcattgtgcccggaggtctcccatatgacggggcagaccttttcacagtttatccatgacaattacaatccatggcgtgcggatgagatcaagggacagatccagttctggggcagggatgcttatctaaaaaagcacaaactggcatatctgaaactctggttgtcgctcgggcttcgttatccgaatacctattttgaggcatgggttcgtatgacaaacggctattggggctggcgggggcattccgattatcatcattttgtttataaaaatgatctcggggtaaaaaatgtgatcctgctgccgaaggtcaatcaggcagtcaatgcctatctgctttttatgcaggagaatacgatcatgaaatatttcttgcatccgtcaagtgcatggtggtgctgtgttgcctttttgctgatgcagttacgaaaaaagcgtgagaggggaaatctttatgtactgccactgacggtggcctggacactttttgtcgcggtaccgctgaatggggaagtacgctatgtttacatattatatggatgcctgccgtttttggcagcaattttatttgaccggactgcggagtagtggttcggtctttttataccacacatgtaaaaacatgtgtcttgtcacctgacaagcactgtggtatactcctaaaagtattaagaagtacaaaggagcaatttatgtcaatcgtagaggatatcatcagattaaaggaagaaaagaatgcggttatcttagcgcattattatgtggacgaggaagtgcaggatattgcagattacatcggcgattctttttatttgagcaaggtggcaacaaagacggatgctgaccgcatcatcttttgtggtgttgagtttatgggagagagtgccaagatcttaaatccggacaagcgtgtttttatgccggatgcgacagcagactgtccgatggcacatatggcgaccggggaagaaatcgaaaaggtcaaagcccagtatgaagatgtggctgttgtatgctacatcaattcgactgcggaattaaagaccatggcagatgtctgcgtgacttcatccaatgcagtgaagattgtgcgcaaactgccaaatgaaaacattttctttatcccggaccgtaatctgggatcgtatgtggcagaacaggtgccggaaaagaatattattttaaatgcgggttgctgtccacgccatgtcgctattacagcggacaaggtaaaggaggcgaaagcggcacatccaaatgccctttttgcagcccacccggagtgtaccaaggacgttttggtgcaggcagattatataggaagtacctcgggtatcattgactatgttgtaaatactaaccatgacgagttcatcatcggtaccgtggatggcgtttttgctgagatcaaaaagcaggcaccgggcaagaaactttacacggtcaaggatcagcaggtctgcgtcaatatgaaaaaggtgactttggaaaaggttttagatgttttggcacatgataccaacgaggtctttgtagaaaagaatctggcagaaaaatccatgaagcctttacaaaaaatgctggaattaggccagtaatgtttggagatgtaagaaaatgaaaacagatattttagttgcaggatgcggctgctccggtctttatcttgcacttaatttgccaaaagataaggaaatactgatcgtgaccaagtccgatgcccagagtaatgattcctatctggcccagggcggcatgtgcgtgcttacaagggaagatgattatgatgcttactttgaagatacgctggctgccggacattatgaaaacgaccgcaaatccgtagagatcatgattcggtcatcgcaggatgttttaaaggatctgatcggctggggcgcagattttaaaaaggatgcggatggcaacctgctttataccagagagggcgcgcacagtgccaaacgtatcgtcttccatgaggatgtgaccggaaaagagatcacgagtcaccttttggcagaggcgagaaaacgtgagaatatcaagatcatggaatataccacacttgtagatattgtcagcgcagataatgtttgctatggcggcatcctttgtatggcagacggaactcttgaaaaagtcagtgcagaagaagtcgtgctcgcgaccggcggtgtcggcggtgtttatcgccattcgaccaatttcagacacctgacaggtgacggcatagccatggcgatcaagcatggggtggaactcaaggacatcacgtatgtgcaaatccatccgacgactttttattccacagaaaaggaacagaggagttttttgatctctgagtctgtgcgtggggaaggtgccaaattatatgacaaatacggcaaccgttttgtcaatgaacttttgccgcgggatcttttgacccaggagatccgcaagcagatggaaaaagatggtacggactatgtctgggaagacctgcgggagatcccggcagaggaactggattcccattttccaaatattattgagcattgtcggcagatgggctatgatgtgcataaggaatgtattccggtcgtgccggcacagcattattttatggggggcatcaaggtcaaccatgaaagcaagacaagtatggaacatctgtatgccgtaggtgagactgcctgcaatggtgtgcatggcaaaaaccgtcttgccagcaattcccttttggagagtctggtctttgcaaaaagggcagcattggatatgacggaaaacccgggcaaaagggatgaagatgccgggcgcaggatcatggatgcgattgacctttcgacctatgaggatcgggaggctttggaagaagaatatcagtcaatggtgcagcaggcagtcaaggcaagtgcataagagatattttttagaggagagagattatgtttgatcaggtaacaatgacattaaatgtagacccatatatcagaagcgcattacaggaggacatcacaagtgaggatgtcagcaccaacagtgtgatgccggaggcaaaacttggagaggtggatctgatctgcaaacaggatggaatcatctgtggtttacagatcttcagccgtgtgtttgagatgctggatccaaagacaaagatcgaactttttgcaaaagacggggacgtggtaaaagccggggatcatatggcaaaggtgaccggggatatccgtgtgcttttgtgtggagagcgtacggcactcaattatttgcagcgcatgagcggtatcgcgacttatacccatcagatcgcaggcatgctggaaggtaccggcatcaaacttttggataccagaaagacaacgccaaacaaccgtatttttgaaaaatatgcggttcgtgtgggtgggggaaataaccaccgttataatttgacagatggggttcttttaaaggataatcatattggtgcagcaggcggcgtgaaggaagccattgcgcgcgccaaggaatatgcgccgtttgtccgcaagatcgaggtggaagtcgaagatctttccatggtaaaagaggcagttgaggctggtgcggacattatcatgttagataatatggatcatgataccatggcacaggcaatggcgatcattgatggaaaggcagaggtcgaagtcagcggcaatatgaccgaggaaaatctggcaaaattatccggtctgggtgtggattatgtttccagcggtgcgctgacacattcggcaccgatcatggatatttccttgaaaaatctgcatccgatcggagcgtgaggtaagaaaagttgagtggagaagaacgtagaaatcagatcattcatattttgcaatcgagcgatacgcctatctccggtgtcaaactggcaaagatgcttgatgtgagccggcaggtcattgtgcaggatgtggcattgctccgtgctaaggacatctgtattcattcgaccaacaggggctatgtcatcgacaagaatcaggagaccctgcgtgtcttcaaggtcatccatacagaggaggagacggcagaggaactacagaccatcattgatctgggaggctgggtcaaggatgtctttgtctatcacaagacctatggtgtgatccgtggagaactgaatatccattcccgctatgatatcgagcagtatattgcagaactcaaaagtggcaaatccagccagttgatgaatgtgacatcgggctatcattatcatacagtttatgcgcgggatgaggcggtcctagaccggattcaggaactcttgggagaaaaaggatttttggcgaaattgcaggaatatgaaccggtgaacttttgggaagaatcctagagataaaatccgcagatacattttgtgtctgcggatttttttatgggcgtaagtgagaaagcactgggggcgggcaggcgcaggcactaagaaaaatattaggagccaattcgttacgtctcttaaagagacaatttgtttgtaacgaaactgtctcttacacggcttcgacagtcgagcggatgtgtccgtctgtggcagatattcaggggcgtcacttataagaggtgctaaggacttgttctattagaaacaactagtttgtggcaaccggcgcaaacgaacatccatgtgaggttgcgcctctcgggtacatccgtgtacccgagttgcctagttatttgcaagtcctaagcacctctaatgcgttttgtattcatatctgccacagacgaacagcatcctgggagactgtctaaccttgcaaagacagttttcataaaataaaacaaatgcctctttatagagacgtagaattgcgcgacttttttcttagtgcctgcgcctgcctgcccccagtgctttctcacttgcgccccaacaaaaaagagcgccccacaaaggaacgctctaagtcttagtattcgatcgagatatcgcccgtgtcacttgtgacggtcagggtctgtgtgtttgctgctgcagcatcctgcttgtagtggctccggaaagaacgatcattgatctcaatctcgcctatatcacaagacagatccatcttgtaggaatccagcggtgacggagtctcaacatcaatatcgccgacatcggaactaagtgctgctgtctggaaagtgacattttccagtgaaatatcgccaacatcggactggagagtgatggtggtaaaaagattgtctgaaatatcaatatctccaacgctggaggaaatattcagggtatcggtgcctaatctttccatagtaaagtcaccgacatcaatcgttccgtcgatcagttttagaacggcatccttaggaaccgtgatcttacaagtacaatcggcattgttggtcagcccatgtactttctttgtcttttggctgatataaagtgtttcattttttacctcatactgtggcagcagattttctttgttggtcttataagaaatcgcataggtgtcgccataagcgatgctaatatcagatacttccatttccagatggatgtttgaaaaagccgccacttcttcgtatactgtacttccggatagaaaagactcggagtcattcacatcatccagatcatcactcatgtcagacagccagttgccagccggaagcactacatgaacgagtagtccaattgcaatacagataacagtgataatggttaatagggttaaataccatgttctttttttcataagtaacctccttagtcagcccagatattctttatacatttgtgaacgatggctgccagcggccagatgatccaggtcatataccagtcaaaacttaaaaaagaccagatcagataggctgcggaaatggtaggccagtaaacagacatgatggcggcaaccgttttattgctgtaattttcctgcttttgataatctacatactgtccacccatggaacgactatcgttgagttttaaaagggtgttaaaaccatccatcttgatggatgtcaaaacgatcataaatacaccgatggctatgatgatgagtaccgcagcaccggaaatattatcgataaagtcaggcagtggcaaagcatccatgataatggcaggtacagcgcacaaaacgcagaagatgatgccgacacttaagagaacggcatgtgtggtgcgatacatattgcgtctgtcatgcacatattccgtggtagcaaaatctaaagaacagtgctgatgtttcataaattcccaacggttcatggtaatgccggaagtaacaaaaagtgctactgcaatggctatgaaaagaaacatgccgatcacaccaagagcctccatgaacgtttctctttcggtgagttctccgatgttgctcataacgatcgtagagaccgggctcaggatgcacaagagtacgccaagtgcaatcagaaaggcatggcgggaagatgctttcaggtattcttttacttcagtaagagataccatgcgccctgcttcaaaggtctggctgtggtgtaatacactgtcaatgccaagatcctctgccagttcatccagattgccaaactcggcgatcacggttccgatggcttcgttctctgtcttgccatcggcaatgagttcccggtatttgtcttccatcatctgtccgagttcgtatttggctttttgcacttcgggggtgtttggaagatttaaaaacattgtctctaaataatttttaatagcgtccataactattctccttgttttttgataaatttttctacgacttctttggttaattgccattcggcacatttttcatgatagtatgccctgccggcatcggtgatgcgatagtaggtgcggcgtttcccggtgtccgggttgttgccgtcaaaggaagtgatgtaaccgttcttctccatacgggtaaatgcggagtagagcgtcgtttccttgatgcagtatttctcatcgctcatcgccttgatctgtttggagatctcatagccataggatggctgatcccagagcagatacaggatcatggtatcgttgtagcctcgaatgacatcgctgctgatccttgtcatatcatagatcgctccttccatttatctgtcaaatgtctattactacgacagtcaatgctacgactgacattgctacgactgacattgctacgtctgtcgtagtaacaatatatgacatttccttgggattgtcaatagggaaaaagaattgtagaataaatctatatcaaaaaaggacggaaaagaaaatgctgagacgaaaagtcagagggtacgacagttttcgatgtattgccggagattgcccccaaacatgttgtgcaggctggttgatcgagatcgatgatgaggctttagagggctatcaaaaggagacaagtgcttatggggagaccttgcgcgcacggattgattgggaggaaaaagtattcagacaggatgcggacgcacgctgtgccttcttgcgccaggacggtctgtgtgatatgtattgtcacttgggcgaggacagcctttgtttgacctgcacatcctatcccagacataccgaggaatttgaaaatgtcagggaatattcgcttgctatttcctgtccggcagtggcggagcagcttttagcgaccactcagccgctttcctgggagacttgggaagatgatgagatagaggagccttatgaagaatttcatggaattttatatgaaaaattagttgtaatgcgcgagtctatgatcgccattatgcaggatcgtcggattccttttgccattcgttgtcacaccatgcttagaaaggtaaatgccatgcaggaagccttggatgagggcagatgggaatcctgtcttttggacgccaaggcggcagaggatgctaaagagggtgtgagagcctttgcttccttagaagatatgcatgttctgttccgcaatctctatgccctggagccgctttcctatatgtggcgggaacgtttgctggcggcagagcatcttttatatgagaccgatcaagagacctatacgcatctgcagcaggaatttgagaccagccagccggatctttttgtcaagatggagcagatcgtcgtttatttcatttttgcctatttttgcggagccgtttatgatgagtatgtctatgcgctggcgcaggaggcagtcgtcaatgcctatctgattcgtgaattgtggctggcaaaatggctggaacaggacaagaccataacgataaaagatatggcagagatcgcttaccgctattccagggaattggaacactccgaagaaaatctggaatgtatggaagaaatgatggatgggcaaattttagtatagatgtatgtgtggtagaggatgcgaaaaaagaaaggcgataccatggaaaaaaattcaaatctgcattatgttttgacgagccatgtggcagaacgggggagtgacggacagtattattgccgtgccttgcagactgtcatggtgggggcgtattgttattgtacttcctgtccgctttttggcggattttctcagttcggcaatatggaggaggaaccggagtgctggtactatgacatggaggagatgcaagaggaaaaacgtctgccggaagaacaggagatgcggacggcgggcttgatcttagcggggatcacgggggagttcccggactatctgccccaggatgagacagccagacccttttctgttatagagcgggcaatccagtatgcagccgaggcacataagggcgccgtgcgtaagggcagtctggtgccctacatcgcacatcctatggagaccatgatgctggtggcatccatgacaaatgacaatgaagtgatcgcggcggcggcactgcacgatgtcgtggaggatacaccgatcacgatcgaggagatcgaggcagaatttggacagaagatcgctttttatgtggcacatgaatcggagaataagcgcgaggacagacccaagagtgagacctggaagatccgcaagcaggagcagttggaaaagacaagggatgccagccgatcggtcaaatgtatcatgctggcggacaagttatccaatatgcgggcgagtctgcgtgattttaaacgggatgggcgcgctatctggcagaagtttaatatgaaagacgaaaaagaacagtactggtattatcacgcggtcgcagatgtggtaaaagatctggcagacacgccctcctatcaggaatacatcagtattttagatattgtctttcatgatctggatgaggaaatgacaagggatctataggcagggaatggtgcagtcgagtttttgactcagatatttgcagcagtctttacggtgggcatcatccgggcagtagaggcggaggctgatggcgatggcatccgggctaaaggtctttaagaagtccctatcagtttttgtcatggttggaaactgtcctttgctaaaagataattcagtggaaatatgattcaactttgtaaacgcagtcaaaagagcatcctccggctgatgcaggtctaattggatcttttggcaggatgccagttcaaattcacaggtagaaatgatctgcaggcaaagatgcaggcgaccgtcgatatccgaggcttccatgaggatatccggtcgcttttcttttacggataagaaataggctttggcaccggcaatgtcctctttcttaaaataggtaaagagtttctgggcagtctctttggtttcttttttttcgccgatcagaccgactttacattctttgacgcgcaggtgacgatactcgcaccagaccataaggagaaactcggagataaaaccatagagtctcttgtggtaatcatcataggtatccagggcaagcagtggatgcatggcttcaaaaatgggaaagagaaaggcacagtattcatcaaagagaggcttggagcagatcatcatattgccaaaataagtatggttttcctgcaagcgtttggcatagagaggataaaagtcaggatagagtttggcaatgacctgaccggctgccgcaagatcctccggtgtgtgattttctccaaaaccataagcataagaaaaattcagggtcaggcatttggaggttatcatgtcataatctttgaggagtggagccagttgtgcccgggtaaaaatactgccggcatcatttaaaagataacgccggtaatggcagacaccgacataatccagatcttttacatttttccagacccagtaaagaccggtcagttcgctataatagcagttcttagcagaaatattatccccggtatcatcggcaagatagcccagatcttcatgcgtggcatgtccgacctgcagggaaacatagagcgggtccggcgggggatcaaaggtcttgtgggtcatggcaaaaatttggatcttcatcaaaaactacctctttaaaaatgaaactttactaaagactactatagtacaggaagaacaaaaagaaaagcaaacgaatacttgctttatggaaaaattttgttataattatagatggatttgtttgttgaaccgcattaccactataaataggagagcattatggcattatccattggtcgcatgggagcgacaacatcatattcacagatccgtccgcagtcttatgcactttccaatgagtcacagacttcggcggcatatgaagcatccaagacacagagtctgcaggggatcggagccgttgatccggtacagtatccgaatgcacagaccggcggaaagagcctgtcaggcatatcttctgcgcaggaggtagagcaggcttacaatgcgatcgcatccgcctttgagggtgtgacgactttttatggacaggatagcgtgggatcttcttatggtatgctgggatcacaggttgatgtttatgcatagatgagcaaatagaatagagacagggataggacgatccgctatgcgtggatcgtcttttttacggaaactgatgattacaaaacggtttccttgacgctgtcgacaaaagaggataaaaaataaaaaagaccgataaatcggtcttttttgaggggagtataaataattaataaggggtgtaaaaggaaacttcctcttacatggctaattatataacgacctttttcggattgcaataaaaaaataataaaatttttataaacttttctatagggatattcattgacacatttttttacaaaagataatatgtaattatctatgattatggctagagaaaggtttgttttatggagacaatacaactggtggcaccttgtcattttggcatggaggcagttttaaaaagagagatctacgatctcggatatgatattacaaaggtggaggatggcagagtgacctttgaaggggatctggagaccatttgcaggagtaatatctttctgcgcaccgcagagcgcgtcatggtacagatcggcagatttcgtgccacgacctttgatgaattatatgaaaacatgaaggctttgccatgggaagactggattccacaggatggaaagttctgggtcaaaaaggcttcttctgtaaaaagcaaacttttcagtgcatcggatatccagtccatttgcaaaaaggcaatggtagaccgtttgaagatgacctatcatacggattggttcaaagaggacggcgcttcttttccggtgcgaatcttcttattaaaagatgaagtaacggtggcactggatacgaccggcgatcctttgcacaagaggggctaccggacatggacaagcaaggcaccgatctctgagacactggccgcggctcttatcatgctgaccccgtggcgggcagaccgcatcctggtagatcctttttgcggcagtggcacttttttgatcgaggcagccatgatggcggcaaatatagcaccgggcatgaaccggtcctttatggcagaagcatggacacatttgataccaaagcagatgtggtatgatgtggtagaagaagccgaggagatggtagatacggatatttcctgtgatttgcagggctacgatattgacccggatatgatccgtattgcgagagccaatgccaagcaggcaggcgtagatcatctgatccattttcagcaacgtgatgtggcagacttaaagcacagcaaaaaatacggctttatcattaccaatccgccgtatggagaacgcctggaggacaagaaggatcttccggcactctatacgacgatcggacaggtctatcgtgatttggatgcatggtcaatgtatctgattacatcctatgaggaggcagagcgttatatcggacgcaaggcggacaaaaaccgcaagttatacaatggaatgatccggacctatttctatcagtttatgggtccgaaaccgccgaagaagaaggatagggtatgagatattccaagagatatatagtacttacggtcatacttctagtgacctttctggcaaaactcaatacttggaatgatgaatatgcggatgtgacagcctttcgtggcgccaagttgcaggacgaggtcttttatccgctcaaggcgcgcagcatcaatgaggagggcaatctgtacttgacggtgggcgaggacacttacggtgtggctgacggtatcatcatgggtgaccatatgcaggtcatggcatcgcttccctttgtggaggacttttttggatgcagtgcctctctttatgaggacaaaaagatcctcttagattatggtgaccgctcttataccttttatatcaacagtctggatgccaagcgggatgacaaggcgatcactttggatgtcatgccggagttgcatgagaagcaggcatatctttctttgcaggatctgtgccgtgagtttggctgtacctatagttatgatgagaccaattatcaggcgacgatctcgggtgatctgcaaaaaggaagccttccggcatcttatgatctgcgggagaaagatcgtgtgtccgctgtgcgcaaccagggcgacacttcgacctgctgggcgcaggcagcactttcggccttggaatcctctcttttgccggaagaaaagttttcctttgatgcagactctatgacctcggacaatgcatatcaggtagatacgtctctgggcggcaactataccatggcggtatcttatctggtatcctggatgggaccggagcagacaggggaaaagaccgtggataaacatgtgcaggaagtccatttttacgatagtgatgacatcgacgatatcaaatgggcggtctatcagcatggcggtgtatcgacatccatttatgccagcctatccacgacaaatttaagtaagtcttcctattataatagaaaaaagaatgcctactgctataccggggcggaaaagccaaatcatgatgttgtgatcattggctgggacgaccattacagtgcgtccaatttcccgggaaaagtggcgggggacggagcctttatctgtcagaacagttggggcgcgacctttggcgaaaatggtgtgttttatgtttcctattatgataccaatatcggcgatcaggcggtctcatatgctggtatagaggatgcggacaattacgataccatttatcagtcagatctgtgtggctgggtcggacaggtcggttacaataaggacaagatccatgctgccaacatttatgaggcaaaagaagatgaacagatcgaaagtgcaggcttttatgcactgggcaagaatacgtcatatcagttatatatggttacagattatcgcaacacggcatcccttgccagccgcgtggaagtggcgcggggcgaattggaagatgcggggtattacaccattccttttgacagaccttatagcgtaaaagagggagataaatttgccattgttgtggtattatccacacccggtatggatcatcctatggcgatcgaatatccggcagatgctctgagccagcatgcagatatttcggatggcgagggctacatcagtaacaacgggctggattgggaaagtgtcgaggagaccgccggcggcaatctttgtctcaaagcctatggaaagaaagtggaagaagactagacgatgggaaagatgataggatgaagttagaaaaaaaagtcgtgggtctggtcgcgaccatattgcttgtattaagcgtagcagtctgtggtattttcctgggcatcccggatctgcatgtgtgggcgcagcagaagcagttgcaatatgccacacaggtggaaaaaggcgagtcggtcttatccctgatgcaggcggagaccgccgttttaaaagaggggcagcaggacatcgagatgcagggacagttgcgtctggagatcccggaggaagtaaagaccgcagatgttagtatcgagcagaattatgtggatcaagaggtgcggatctatataccggagatcagccagtcctatttttatgattatcccatgatcggcagcagcgaccatattgacgacatcaaatatgatgtggaaaataaaaaggggctgatcgatatccttttggataatgtctatattacggatgtgacctggcaggaccattatctttatatggattttgtggcacccagagatcgctatgataagatcgtggtcattgatgccgggcatggtggcagtgatccgggagcagaagttctgggaaccgatgaaaaagacattgatctggcgatcgcaaaaaagatcctgccgtattttaaagatcaggacaagataggtattttctatacgcgaaccgatgacagcagcctgtcactggaaaaaagagtagggcttgctaatactttgcaggcagatcttttcctgagcatccacaacaatacgacggcgagcggcaggatgtccgggatcaatggtaccgaggtcatgtatcatgcagcagatgaaagcggggcgtccaaagcctttgcccagacctgtctggatcaacttttacagacacttggttccgggagcaagggcgttgtcgtgggggatgatatttatatcattcggacggcgcagatgccggtagccttggtggagatcggatttatgacaaatcaggaagaactggataaattaaagagtgatgaatatcaggaggcagccgcaaaagcacttgcacaggctgtgctccagacattggaggagtaagaccatgaaaaaaattatttttgctacaggcaatcaaaacaaaatgcgggagatccgtgaaatctacgaagatctgggctatgagatcctttctatgaaagaggcagggatttctgtggatatcgtggaagatggaaagacctttgaggaaaatgccctgatcaaagccagagccatcgcagaccaggtggatgccatcgttcttgcagacgattccgggctggagatcgattatctgaacaaggaaccgggcatttattctgccagatacatgggcgaggatacctcatacgacatcaagaatgccaatctgatcgagcgactggacggtgtgccgaaggagaaacgtacggcacggtttgtctgtgctgtggcagcggtattcccggatggcagcgaaaaggtggtaagaggcacgattgagggatatatcggttgggagccggagggggagaatggatttggctatgatccgatcttttatgtagatgcctatggatgcagtacggcggctatgtcccgcgaagaaaagaacgcgatctcccatcgtggaaatgcattgcgtaagatgaaggaagaattgatcaaatatgagaatactggttgttagtgatacacacagaaaacatgataatctggatatcgccatcgaaagggtcatgccggaccgcatttatcatctgggcgatggcgaaggatgcgaggactatatcgaggcggtagcggaatgtccgctggagatcgtgcgcggcaactgcgactttggaagtgatctgccggcagaagtggtgatgcaggtaggacgtcatgtagtcatgctgacacacggacattattataatgtaaattatggaacgcagatgcttgtggaggctgccaaggaaaaaggtgcggacattgtattctacgggcatacgcatgtgccggaagtgacgtatgaggaggatatgaccatcatcaatccgggaagtatctcttatccgagacaggacggcagaagaccctcctatgtggtcgtggatgtagacccacagggagacctgcattttaatctgatctatatgtgatctttgcaaaaaataagatgacgaaagatggaaaatccgcctgtggcaagggctggcagggcttggaaaaagaaaataaaaaaagtgaaaaaagttgttgacatttatctgactctgccatataatattacttgcgtcacggagagacgacgcggtaatacatcggggtgtggctcagtttggctagagcacctggtttgggaccagggggtcgcaggttcgaatcctgtcaccccgacttgtatgcgggtgtagttcaatggtagaacatcagccttccaagctgaatacgtgggttcgattcccatcacc

SEQ ID NO: 12498 - DNA, 555 bp, Unknown
  gut microbiota DNA sequence
cgggagtgacagatgtcatgacgagagagattgtctctgtaaatctgaacggaacaagatttccggctactattgtgagtaaaaaggattttgattttatgcgtcaagaaggggatattggctctatggactatgagcaggcagtaaagaatggtgatattttctttggctggtcgacgtggatggaacaagatggatatgctccgggtgaatccattgcatttgactttgaaaatggaagtggaacctatacctatcagggaaagattgcaggatcctttgtaagtgcggacacttatcttgtcattccggaaggcgtataccgttccatgaatccgagcggaacagcctatggctatctgtgggtggactgtgataaaaaagatgtggcatctgtggaacaaaatctgaatacattaatttctaatacttcgcatataaaaatggatacttatcatgcgcagttacaatctgcagaatttgcagcccgcatgatgaagcttggctgttatctgtttatggctattgtaggactcatcgggtttatgaatatgg

SEQ ID NO: 12499 - DNA, 7254 bp, Unknown
  gut microbiota DNA sequence
atactcaaataagcattatatcccagcgttgtcgctggtaattccggcgctgcgaccaacttcttacaattctgaaacatacacgcatatccattacttcctacttgtgttgatggtaattccggggcttgtgtaagactatcgcaattcataaacatgccgccaaagcgagatgctactgtatcaggattgccaccatttccatctttaagactagttatactgccagacgcagcgatttttcccgtcatggtaaaagctgggtttatataagtatttatattaagtttggtaagttctcctctaaattgcacactgtcgtctaccttggctaagataatttttgttcctttcgcgtaagtcgaccaattcttaccactatctttgctaatctccacactttcttctgtgttccatgtgaatgacagggtcgatccagcctcctctgccgtaaaagtcagataattcggctgcgtagccgccttcacctgtaatgccccgccaggcatacatccaagcaacatgcccatgcataaacctgcgccaagtatttttccgaataactttttcaacttcataagcgttctcctccgtttcactggtgtcaaacattgtaatagccaccatatcttgtatctatcataccgaattttaaggctgaaaatttcgctcagcgcgaagtgtcgtttttagggtgtgaaatgcaatcgctgtcattgaaaaagaaatttacatatactaagatagaactatcactgatagatcattttttgagggaactataaaatgctggcacggacaagcttacggattgccgtttgtgacgacagtcccatctttttaaacaagacaaaaacatacatagaaacatggtctgccaacaccggacatgcggttcagatttttacctatgacaatggtgatgctctcatcgaagcacacaaggactgtcatatggatatcatttttcttgatatcattatgcctctgttgaatgggatggatactgcccgcgaactgcgtcagcacgaccgtgctgttcagattatatttttgacatcatcgccggaatttgccttagaatcttatgaagtaagggcacagggatatatcctcaagcccgtatcacaggagaaattatcaaaagaattaaatgaacttgccatacaatatgacgaagagccaaagcatctgattttaaaaacagcctttggctatcagaaacaatattttcacgatattgaatatatagaagcccagaacaaacgcgttctctttcatctttgttccgggcagattttagaagtttcagagccactgaaccactttgaacaacagcttttgaacacagatggtttcttcaaatgccatcgttcctacctggtttatttgcccaatgtgaatcattttaacaataacgaagtcacaacacgatccgggcagaccattccgattgcccgaggatacggaaaagcgttcaaagaagcttatttttcaaccctgtttgctgaatgattttttatggagattattgtatgattttaggaatactgcaacttacccacaatgcgactacattactttttggcgtttacctctccgctgcctttctcggcattgtgatgaaacgctctaatatcctgcggttatttggattttcctgtgcaaccgggctgctttatctcggtgcgtttctatttttaggcgaagccatgacgagggagctctatcctttgattgtacatctgcctttgattctcttactggtcttatattataaatatcgccctctggtagcagccatttccgttctgacggcttatctctgttgtcagattagtaactgggttggcatagcttttcttacactgacccacgaacaatggtgctattatgctatccgcatcgttgtgactgtgacggttttcttatttttactgctgcatgtatcagatgcaacagcaaggctcttggaaaaatcaacagaatcacttgccattttggggatcattccctttgtctattatatttttgactatgcaacgaacgtctatacatcacttctatattctggaagcaaagttgtcgttgagtttttaggttttgttctctgtaccacctatctgctctttctctttttatatttcaaacaatacgaagagcaacaggaaaccctgcatcaaaaccagttgatggaacttatgcgcgaccagtctcaaaaagatctcgtcaccttgcatcaggcgcaacagtctgtctccatcatgcgacacgatatgcgtcattttcttcttgccatttcttccatgattgaaaacgacaaaaaagaggatgcactgaactatatccatgagctcgtgtctacttccgatcaaatggcaatccagaaatactgcaccaatgaactggtcaataccgttttatctgcccaggacgatctcttaaaaaagcaggatatccgcctcgaacataccatacaaatcccaaatactctgccactatccgatgtggatgtgactgcaattttatccaatggtttggaaaatgcgatgcacgctgtatctgaacttcccatcgagcagcgcatcattacactccatatgcgcatgcacgatgagaagctgctcatttccatcaaaaatccttgtgccactttgcctgaaatcaaagatggcatgccacaaagcaaaaagtttggacatggttttggcaccaagagcatccgctacattgcagaaaaagcaggtggaaactgccaatttgcagtggatggaaatgactttgtcttgcgggtgattgtgtagagggttaggaaatcggttttaatatgtaatcaaaagcatccactgcgtagccacgaattgcgcacgataatcttgtatatctctgcatagaatcctccccgttccatcaacacatcatggctgccgccagcctgcagtctaaaatgcccgcaactgtctgagagccgcttaggactgcggagttgaaatgctgataaccggcaggaggatatggacgcggaactgctgtttttcatggtagacatgcatctgtcccttgtggagttctaccatcttctgactgctgcgcagtccaatatgattgctttccaccgtgccgacatcctgcttgatcgtattgatcaaaagaataccgagcatgccctgttccacccgcaggcgcacatagataggctttcccttgtcagcatattttaggatattggaaaagagattgctcgacatacgttttaacatcatctcatccgcatacataatcccctcgatatcctccatctgcccctcgatcgtaaagcctgccagttccacaaactcgcagttgcccagaaggatttcttttacctgcccgatctccatgcgttttaagaccgcttcttcattagtctcataggcaaaagcatactcaaacatgtgatccgtcagtgccttgatatcggctgttttttgcaggcacttgttcagatataaagccctcttttcctcatccgcgttatccatgcgcaaaacttccagatagccgtttaatactgtaagcggggtgcgcaggtcgtgtgaaattgcggagatcagttcctgattggtctggcggatggcatcttcctgcttgatattttcatccagggtcttgcgcaggatatccagttcttttgccacgatcccgacttcatcctcgccgcattggggaatggcatgagtcagatcgccctgggacatattaacgacagcatccttgagtccgtccatgcgcttgatgacgctccccatataggaaagtacccccaggaaaaatatgaagatactaaaaagggcagatgcgatcacataaggatagacaaacctcgtccgcataaaggaggaatagacgacatcataggtaccgttggcaaattgcaccggcacaatgttagtgtactctcccaaaatgtccatgctgtctgatatgatggatccgtacatgatcttttctatgactttcgccgcgtgtcccgcacgaaagagtccgtcatcatggccatagatataacatccgatataataactggtatgttttttcaaaaatggacgaaatgccttctgcgctgttttgtcgctctccaattccggcacattgtaattgacggcatcttcctttatctgttcaatataggtatcctcgtcaaaccaactgatcagatgcaggttttcaaagacatgacagaccgactcctgcagattccaaagtccccagaaaagaagaacgctgaccgccagcataataagaataaccacaaagagtttggtgcggatcttccatttgcccggacgatgttcctctaagcagtggagcatggcatttttcttctctttagtcacagcggtacccccttccccagaccgtcttgattatggtcggatttttcgggtccttctcgatcttgcagcgtagatttcgcatatgcaccatgaccgtgttgttggctccataataatattcttcctgccagatactctcatacagatgctccgccgaaaagatctgcttgcggttggtaagaagcagattcaaaagggcatattccgtatcggtcagttcaatgacctgcccattccggctgacttcccgtcttgtctcattgaggacgatatcctgataagaaatgatgcgctctgccgtgccctcctttgatgccgcttccctgaccggcatattcttcccctgatatacatgatagcggcggatcagtgcctttgcccgactgacaagttcgttataggaaaagggctttaccagatagtcgtccccaccgctggaaaatcccagcatcttatcatcttcctgggatttggcactcagaaaaaggataggcgcgttgctgttctttcggatctccacacaggtctgatagccgttcatccccggcatcatgatatccaggatgatcaggtcaaaagcatattttgccgaagcctcgatcgcctgctcgccatttgccgcctcggtcacctcatatccctcgccccccaaaagaagatagatgacctcccggatctccggattgtcatccaccaccaaaatatgggaagccgccggcttcccttgttcttccattgtccttgtctgtatctcgctcatctgtcgcttctcccaaccccattttctgtctgtatttgcctacagtataacaattttttgccggcttggaagaaaattaagaaaactttagaaatagatcctcctaccagaaatcgtaaaacggcatggtctcacggttgcggaattcgtgtttttcatagtagccgatcaaatgtccgtcctcggcacgcagggcgatcatatagatatctttctgctgtttttcattgaaaaaggtatgcacgatattgtgatctttgtctgccgcaaaccagtccaccacacgctttatcatttcttttgacttatcattgtggcaggcaagcaggctgcgcccgatcagatctgccccgccccactttacataatctttgatggcagccgggttcatgtagatgatctcatgctccagattgcaaagtaccacgtcgcaacggtcctgatcgaccaggctcttaaaatattctaatgcattttccatgatgtctctccttttaacttgttatctttatgcgttttctatccctttgcctgtggcttcctgcggcaatgggatgcccaattctttgatcgcatccataatgtgactggtggatatgtcccgaaattctaattgcccgaatacagaaaaaatccattctaccgaaagatccagccatttttccacatgcggatcgatgacctgggatgagccatctgcacatgcttcgttggcaagactatagccgtgtggtcccttttggaaaagatgatactctaagagacagcccttttcttcatatgccatcaccagattcagagtcgatctcctggtgagcgtatcctctgcggtcgtaaacataaatagtggtggtgcgtccttggtcactgcctgcaccgggttcagccagatcttttcttctttcgccggtccctcttttccgaaaaagagcatctgcatcagttccgaaccctgtccgctcatgtctgtcgccggatagcccaagatcagcccattcggtcggttctttcccagcagaccgctggataatgccagatgtccgcctgccgaaaaaccacaggcaaggatcttgtccgcatccacataccagtcgttcgcatgttcacggatcagaccgatcgcccagtccatttcctttaatggctggaaacctttgacttcccagcccagagaataatgcaggacaaatgcctgtatgcccttggctgcatatgccaaagccaccggttctgcctcgcgtggtgataaatacacataaccgccgccgggacagatcacaagagccggtcgtaccagatcctgtcctaatttcagaccgctatcctgtatatagcactccagccagaccttatcattgtccgggtaatttatcttttgataatgcatgtcttttacgcctcctgttaccactttgttgtcctctattatagcatgcgatcaaaaaaagaccacctcctctttactatccctgataccttattctttcaaccaacgtttcctttttcagattactgcttaaaacgagggaaagcacaatctgcaaaaggctgaccagcaaaatcatagcaagaattggtgtcattggaacatgatagacattcattccaaatatcccattatgttttgcataggaaaaaagtgcatagccaagtggcagaccaacgataagtgctacacatatagtgccaaccgtaaaaatcagtccctgtaactgcaggcataagtttaattgtttatttgtcatacccacagcctgcaatacaccatattcctgcttttttgtcgtaatattcatgatcatggtgtttgccatattcataaaaccgatgaatcctacaaccgccataaacagataacagccaagtttcatcgtgcgagctgagaattctgcagattgtaactgcgcatgataagtatccatttttatatgcgaagtattagaaatcaatgtattcagattttgctccacagatgccacatcttttttgtcgcagtccacccacagatagccataggctgttcctctcggattcatggaacggtatacgccttccggaatgacaaggtaagtgtccgcacttacaaaggatcctgcaatctttccctgataggtatag

SEQ ID NO: 12500 - DNA, 4861 bp, Unknown
  gut microbiota DNA sequence
atgaagctaaaaatattgttgtagatcccgtgatggtagcgacaagcggcgcacgcttgatcagcgaggatgccattagtaccttgaaaagtaaattactacctcttgcaaaggtaatcacaccgaatattccagaggcagaagtattgtctgaaatgcagattaaaagtgaagcagatatggaaaaagctgcagaaattatttgcaaccgtttgggatgtagtgttcttctaaaaggtggtcatcagttaaacgatgccaatgatcttttatggcaaaaaaatgagcaggcaacctggtttatgggaaagagaattgataatccaaatacccatggaacaggatgtacattatcatctgccattgccagcaatttggcgaagggatacgatctaaagacatccgtaaaatatgccaagaattatatttccggagcgcttgctgccggtttgaatcttggaaagggaagcggcccgatgaatcacgcatttgcaatcaaaggagaatacatagatgaatgaaaatagaacttccgttttttcaaatggattgatatggtttggtgcaggggtatctctggctgaaattttgacaggtacttattttgctccattaggttttggtaaagctatggcagctattttattaggtcatttcatcggtggtcttatgatgtttgctgctggtatgattggcgcaaaagaaagacgtagtgccatggaaacagtaaaaatgagttttggtgaaaaaggaagtttattgtttgccattcttaacgttttgcagttgattggatggacatccattatgatttatgatggtgcgcttgcagcagatggtttgctgcatacaggactctggatatgggctttggtgattggtgcgttgattattctttggattgtaatcggtcttacgaatttaggtaaactcaatacgattgcaatgacagcacttttcattttgtcactgattctgtttaaggtaattttctttggtacagcagtagcaggtccgattgtggatgacggaagcctgacttttggtgcagcagtagagcttgctgtagctatgccattatcctggttgccactcatcagtgattatacaagagaagcagaaaagccatttgcagcaacactcgttagtgtacttacctacagtgttgtcagcatttttatgtatatgattggtatgggagcagcgatttttacaggagaatatgatattgcccagattatggtaaaaacaggacttggcgttgttggccttttgattatcgtattctcaaccgtgacaacgacctttttggatgcgtattctgcaggtgtttcatccgtatctatttcttctaaaataaaggaaaaatgggcagctgtggttgtaacaatcattggaacggttgcagcgatgctttatccaatggataacattacaaactttttgtatttgattggttctgtatttgcgccgatgattgctgtgcaaattgcagattatttcatcttgaaaaaggcggatgcagcagaaaaagaatttcagtggaccaatctgttgatctggcttattggttttatagcgtatcgtttgctgatgcatgtggatacaccggtgggaaatacgttgccagatatggcaattacaatcgttctctgcctgattgtaggaaaaattgcaagtaggggaaaagaaaactaggggacacatgtttttcgtgatgtctccggaaagaaagagagagtatcatgaaaaaagtaaatctgaagaaattaactatcacagcacttatggcagcagttgccgtggttggaagcttattttccttcccggtatttgggtctaaatgtgcaccggtacagcaccttgttaatattttatgtgtcgttacggtaggaccttggtggacgttggcacaggcatttattgcatccttaatccgtaatttaatcggcttgggaagcccattggcatttcctggcagtatgtgtggtgcacttttgggcggccttttgtataaatatggaaagaagctgccatttgcctatattggtgaagtggtaggaacgggtattttgggaggcatgctctcttatccgatagcgtatcttgttatgggaaataaggcggcagcactctttacttttgtagttccatttttgattagcacatgtggtggaaccttgattgcgattgttattacggcttctttaaaaaagacaggcgttttaggacgtatgcaggcaagcttggaagaataagaaacgtcataagtttaggagttcttcgatggaaaaagatatggaaccgttgttacgggactatttgaacaaaataaaacagatacatccgattgtgcattgtattacgaatacgattaccgtaaatgattgcgccaatatggtgctggcactgggcgcatcgccgaccatggcacatcatacactggaagtagaagagattacagcaggaacgaatgcgctcgtttgtaatcttggtgcaacagaatgcttagaagccatggagcttgctggggaaaaagcagatgcattgggacatccaattgtgctggatcccgtgggagtagccggatcaactttcaggcgaaacaaatgtatggcattgatggagcgcgtgcacacaacttgtattcggggtaactattcggaaatattagcattgatgcgacagcgtaatacggcggtaggcgttgatgcagcagatacagacatggacttggatgcattgcagcagtttgcagacgaagtgcatggaatcgtagtggcttcaggagaaaaagattatatcacagatggaaaacgcttgtatgtatgtgaacgaggccatcgtatgatgtcacacattacgggcagtggatgtatgtcatcggttgcgctggcaacatttttggcagtggaaccttcgatcgagagtgcaaatgcttgttgtcattttcttggtcaaatgggagaacttgcagcaaaacagacagaagagagagcgggaggtacgatgacatttcgtgaactctttttggatgctgtgtctttgcagggcattctatgggaagataatacgcacttgtagaatatgaaatttcctcttgcattttaaaaataaaaggactataacagtttgtggaacgaagagaaacgaaaggccatttgttttaatgacattccgcaaacatccctctgttcttagatttgtagcatggaggaaaagacaaatgaatactttaaaagcgcaaagaagagaaacaacggagaaagcaaagagactgagaagagaaggctatgtgaccggtaatctgtttggaaaacagatcgagggttctgtacttctgaagattgagaagaaggaagccgagaggatcatgcgtgagtgcatgaaaggtagccagatcatgctggatgttgagggcaaggagtatgatgtcctcatcaaggaaatggattatgattccatgaaacgtagcatcgtagagatggattttcaggcattggttaagggtgaaaaggtacattccgtagccgaaattgttcttcataacaaggataaagtcattgagggagccttggaacaactccttgaggaagtatcttacaaggcaacaccagagcatttggtagacaagatcgatgtggattgcgctaccttacatctgggcgataccatcacagtcggcgatctggatattgccaagaataaggatgttgaggtcatgacccatctggatagcgtagttgtcacggtacttgcaccaaacaacgcagatattccaagtgatgaggatgctgaggaaacagccgaataatacctataaaaagaacgaaatccgccggggaatatatcctcggcggattttttgtctttggctatagcgcggcaaaatatatgtgcagataatctgcaaattccagagccagcggtgataggtagggttggcggtagagacaaatatgacggtagatttttgcattcgggagaggtgcaagtatcagattatttgctgtataggcaggacgccaactcttttgtggtaccagagtgaaataacgtccctgactgacaagttcgcattggacataggagttgttgacatcgctggatgattgtagggggcgcaggatataacgcttccataggtcatctaacagatcgcccatgcgactttctggcgatggcagaatgcagggataatgatagagtatggaacgtggtatggattcctcccgggcaaaaggatgcgatgcggcgtaggcaatgcagatctcctcactcatgagtatatcgcccactggcttttgcaaggactctgtatcagaggaaggtgttgttagttgtggataggcatccaaaacgagatccagatgatcctgcatacagtccagagggtaaccggtgtgaaccgtgatgttggcgtccggacgcttttcatagaaaccaccaaggatatcggagagcaactgggaacagacgctgacaccaaaggagatatgcttgtcatctgtctggttgtttgccataagagctgcacgggctccgtcgtaatcggcaagaatctgcttggcataggtttgaaaaatcctcccattttcatttaaaatgatatgttttccctgccggtcaaacagtgggtagtgtaattcttcctccaattcctgaatggttttggaaagtgccggctgggcgataaataaatttctggcagccaatgaaatattttctgttttgcagacttctataaaatactgtaatttcttttctgtaatcataagaaacctcccaataatctatacataatatattataacatatgagatttttatattggaatatttatatataaaagaattatact

SEQ ID NO: 12501 - DNA, 29557 bp, Unknown
  gut microbiota DNA sequence
caaacgaacatccgtgtgcggttgcgcctctcgggtacatccctgtacccgagttgcctacctataaacaagttctaagaacctctaatgcgttttgcattcatatctgtcagcaggcgaacatcatcctagacggttgtctaaccttgcaaagacagttctaatatagaaaaacaaatgcctctttcttagagacgcagaattgcgcgactttttatatgataaaatgtgccgtgctgaatgtctgctgttacgtgcctgaaccaaccggagtgcccctacgaaatctgcatgcatcccgcgtctgcccttgtctacttggcactcttgtcgatgaagttggatttgtacttggagtagacgatcttctggctgctgtaaaggctgtagtaaccggatacggtataactaaagccgatggcaagcaggaagaaaggtgtcccttcaaatccaaacaactcaaagcatatgagcagggatgtgatcggactgttggtcacaccgcagaagagtgcgcccataccgacagccgcacacaaagatggagaaaagccgatcaggttgccaaacatagatccaaaggaagctccgatgaaaaaggtcggtacgatctcgccgcccttgtaaccgcatccaagggtcaatgctgtaaagaggatctttagcaaaaaggcgagggaggaaatgtctcccgccatacaaaaggtgatcatggatgtaccggtgccgttataggtctggttgtcaatgccgccaacggcaaaggacagtgccaataccgcacagccaccgacaaaggcacgcaggtaaggattggcaaacaatttctgatagagggcgctggtcttatgcaaagagacacagaaaaagatactcagcaatccgcaaaggatggaaaaaccggaaatgataagtccggtatttaagtcaaaggctggcagttccaagatttcataggacggcgatgcaatgccaaagacatacagggcaatggcgcgcgcaatgagcgaggagatcgcgcaaggaagcagggctgcataatgcatgattccgacgctgacgacttccatggaaaagacagcggctgcgatcggtgttccgaaaagagcagaaaaggcagcactcatgccgcacatgatcataatgttgcggtcttctttttcacgaaatcccagatattcaccaaaggcatttccgatactgccacccagctgcagggcagcaccctctcgtccggcagaaccaccgaccaaatgggtcaaaatggtgctgatatagatgaggggagccatgcgaaggggaatacggtcatcggaatggatcgcagagatgacaaggttggttccgggatctttttcgtgcaggatcagatggtacatggcaacgatcgccatggcaccgaaaggcagtccgaacaagagataggcatggctgagacgaaaagccgtcactgcctgtaagagatagccgaaggatccgctgatcagaccgacaacgatcccaatgagcacagagactaagagccaacgcaaagtagagttgaaacgtctgacattgtgctcggatttttgaaagaaaagtgatttattaaacatagttttattcctaacttatttatagtaaaatgatagtaacaaagcaacttgcggatgcgaagatgcatatgtatgttatcacgtctggcactataattcaaatgagaagatataagaggaatacaaatggataaaacatacgattttattgtcaatttacattccaggacaggaaaggcaaaggagatctgggagtctttagaggagatcttaaccaaagatggggtttcctaccgggtccacattacagaatatgtcggtcatgcgacaaagatcgccgaagatctgaccgcagatgatgcatatcattttctggtggttgccggaggggacggcacgatcaatgaggtcttaaacggtatccgcgatctttcaaaggtcagttttggctatctgccgcttggctctgccaatgattttgccagaggcttacatattacggcagaaccggaagtgatcttaagacagattctggcatcggagacagaggatgcctatgatctggggcaggtctgctgtggcggacagacgagacgctttgccatcagtgcaggcgcaggcattgatgccgcggtctgcagggaagcactgacctcaaggctcaaggtctttttgaaccgttttcatctgggtaaactgacctatggactgcttaccgtagcagaacttttccgtgcgccttttgtatccggtaaggtagaactgacggacggcaaagagtttcatatgaagaatatcatttttacggcagccatgaacttcccttgcgagggaggcggtgttcccatggcaccttctgcggatgcgcatgacggtaagttatctgcctgtctggtctatggcataccaagatttctttgtctgtgtgcctttccatttctgatcgcaggcaagcatggaaatatccgcggctttgagatcgtagaagcggaggagttgcatgtcgtttttgacaagcctatggtggtgcatgcggacggtgaggactgcggtgaccagacagatgtgactttccgctgtctgcccggagcacttcacatgccacatttagattagttttacatgacaaaagacacctttagatgtatgatataaaaataaggggaaatgacatcaatggggggaatttgatggaattactatataagatcaaggatcgtgtgcagcaggagagcattgattacattgaggaaaacagatccagtgttgtcaagaacaaccaaaagaccctgtttgcactgaatattatttatttcgtggtcgttgtcggatatcttctggcatcaatgaccgtattttcagaatggcaggttacaggcgtttatgccagagccgtagccgtacatcttgttgtactgccgatcattatcatccgttatcggaaaaagacgagatcctataaggaagtttcgatcgtctgcaaggtctttcagttgtatgtgatgacctttgccgggatcatgagtatcgtgccgatcgagatgaaccagccggcagtctactatatgccgatggcagtagcatttgtcgtggcatttacctataccttttatcaggcgctggaactggtacttttagagatggcagtctatgtgctggcgtcctttttgaccaagtcgatcgaggtcttttcggttgacctctttagttgtatttttggtattgttcttgcaggctatgtggcaaagatcttgtattcttatcgcgccagcgagaatgaggcaaagcagcggatccgccgtatgggtatgatggatcgcctgacctcgacctacaacaaggcaagtacagagttcctttgcaaggagtttatgcgttctcatccgcagtcggattgtgttatgctgattttggattttgacaattttaaaatggtcaatgatacttacggacatcaggcaggggatgaggtcttacgcagttttggcaagatcctgcgccattcgatcgggacagatgatatcgccggacgttttggcggcgatgagttttttttgtttttcaagaagaaagatattacggatgccttgatgagcgtggagcgtgtcatggagcagaccagagccatgcgtgcaccggatggcagacagccgttttcctgtagtgtgggtatcgccatccgccgtgcgacggacgataccatggagtcttacgaccaacttctcgccagagcagaccgtgcgctttatgatgtcaagcgcagcggcaagaataattacaagattgattcataaatataagcctcatcccatatattagagtaaatatgggaggggctttttcttatgggagaaacaaggttttctttatataacgatatacagagcaggacaaacggagagatatacataggagttgtaggaccggtgcgtaccggtaagtctacctttatcaaacagttcatggagcagatggtgcttccgaatatcaaagaggaaaatgccctgcgacgcacggtggatgaattgccacaatcagcacaggggcgtaccatcatgacgacggagcctaagtttgtgccaaaagagcaggtagagatcgaactggagcatgacctgacctgcaagatccgcctgatcgattgtgtgggatttttgatccagggagccaagggggccatggagggcgataaggagcgtatggtaaaaacgccatggtcaacccgcgagatcccttttgaaaaagcggctacgatcgggacagaaaaggtcatttcggatcatgcaacgatcggggtggtcatcacctgtgacggcacctttggagagttggatcgcgaggcatttgtggaggcagaaagacgcacggtggaaaaactgcgtgccatcggaaagccctatgttatgatcatcaattccgggcatccccacagcgaggagaccaaaaaactagcagaagatctggaagcggaataccggtgcagtgtgcttcctatgaattgtcagcagatggtcaaaaaagattttgaagaacttttgtcgcgtgtcttatatgaatttccggtcagtggcatctctttttccattccaaaatgggtggaaatgctgccggcagatcatgagatcaagcagagcattgcttcttatgcaaagaggatcttagccgatacgacaaaagtgcgggatatttttgccattgatttttcccagccggaggactacatagaaaagacaacattgacgggtgtggatctggcaaccggacggatctccatttccatcagtctggaggagtctttctactatgaaaatatctcgcagttagcgggcatgccgatcacaggcgaatatcaactcttatcctacattggcaatctgtcaaacctgcgcagatcctatgaaaaggtggcagatgccatgcagtccgtggagcaaaagggctacggggtggtatcgccggaactgtctgatatcaccatggaagaaccggtgctgatccgccatggtaataagtttggggtcaagatgaaagccttatcgccgtccattcatatgatccgtgccaacattgagacagagatcgcgccgatcgtcggcagtgaacagcaggcgcaggatctgatcgactatatcaaggagggacaaaagaccaaggaaggtgtctttgagaccaatatttttggtaagtcggttggtgaactgatggaggacggtatgcgcagtaagatcgccgccatggatgatgaatgtcagttgaagttgcaggataccatgcaaaagatcgtcaatgacaacaatggtggattgatttgcattattatataggtacaaattccaacttttgtggtaatacggatttaatatatactttatgatacggaatacaaatgaaaaatgcgttctcttgtgcaaaagattgcgcaggaggatgacaagatggatctgatgatccgcgttcatgacaccggcaagtacggcaaagatattatgtgcagagtggatcgctgattggaaaggatgcattttcggatgccggtcgtgtaaagacattggtactgcctcaaagtgcagatgtgacattggagaaagcaggattttttggaaaaggggtgcatgatcgtaaaatgtggctgaaattgcgatacgcacccatcgcttatgtgtgcaaaaattagacataaaaccccgcgtgtcgtacaaaattcgacaaattattacacaattctaaacgaatgaggaagattgtttatatttattaaaaaagtttgaaattatataaactaagtgttaaaatcataacgaaatgagggataagtcctcaagatagaacaacgtataaatacaagtaagggaggaatgtaattatgttgtttcagatttacggcagcacatctgctacacagcttttaggctgggtacttgtgtttgcaggactcattatcatgaatgagattggtcgtcgtacaaaggccggcggaattttaattttcgttatcattccaatcattctgacagtttactttattggtatgcatttaggcgcatttggcggtgcatccaatacaactatggagtacatggatggatggttccattacttcaaactctatgcagcagatatcggatgtgtcggcttcatgatgatcaagtacaagtggggcattggtgccaaagattggttcaagccattcccatggttgatcgtagcagccaacatcatgatcgcagttgtttctgaccttgagtcagcagtacatgctttcgcaatcacaggcgacctttcaggtgcttggtgggcatccaacgaaggtgtattcctttatggtggatggtggaacgtactcaacgctatcgctggtctcattaacatcttctgtatgacaggctggtggggaatctactcatcaaaggacaagaacacagaagatatgttgtggcctgatatgactgtatggttcattgttgcatacgatatttggaacttccagtatacatatgctaacttacctacacatacatggtattgtggtgttgcacttcttcttgctcctacatttgctaacgcactttggaacaagggtggttggatccagaaccgtgctaacacacttgcaatctggtgtatgttcgctcaggtattcccattgttccagttgagcaagactttctcagttcttccatctgtttacggtggagcagcagcaaagggttactcagcacttgatctttatgacaaggcaatcgctgtttacaacagtggcgtaaatacttctaacgaagttatcgctgacatgggaatcacagcaaacccaacagcacagggtgttgtctcaatccttgcacttgtagcaaacgtaatctgcatctctgttatcatcaagagatctatcgagcagaagaagaacccatacaagaacgatatctgggttggtacaagagattacgagcaggctatggcaagagcagcaaagtaatttactttgtataagatacgataagtatgacgagaggtcgggcagtattgcccggcttctttttttatgttagacttagaagtaaatttgaagaagatggaaagcggaggagaagggatgaatccagtatatgaaaaactatgtgcctgctatgaaagtatccgtgcgcgtattccgtttaccccggaaatagcattggtacttggctccgggctaggtaattatgccagcaaaatggaagtggtcgagcagatcccttatggggatattgcgggatttccggtatcgacagcaccgggacatgtcggacagtttgtctttggctatgttgagggggtgccgatcgttgccatgcaaggacgtgtgcattattacgagggctatgatatgacggatgtggtgctgccgatccgtctgatgaagatgatgggggcagaaatcttatttttgaccaatgcagcaggcggtatcagacagggattttctgcgggagatctgatgatgatcaccgggcagatcgcgacctttgtgccatcgccgctgcgcggtgccaatatcgcagaattgggaaatcgcttcccggatatgagccatatctatgatgaagacttgcagcagatcatccgcaagtccgcctgtcagttggatattcctttgcgggagggtacttatatccagttgccgggaccaaattatgagtcgccgcaggagatcggtatgtgtcgcgttttgggggcagatgctgtaggtatgagtacagcttgcgaagccgtcgctgccaatcatatgggcatgaagatcgctggaatctcctgcatttccaatctggcggcagggatttcaccacaccctctgacagaggaagaagtgattgaagccggtaagatggttgagcgtgatttttctgcacttgtgacctgtgccatcggtcatatgcatgaagcgggtaaataaggacggatccggtggggatttaaggatccgataaaataggagaaaggatatttaggggaatgaatatacgtttttacaatgcaaagatgctcttgccggggcagggacatggctttgagatcaaagaaggtgaattgtgggtcaagggcaatcagatttgctatattggggatggcaaggatctgtcgcatgtcttttccgtggacgagatcgtgatctgggatcgtgagatcgatgccaaaggcaatcttttgatgccgggatttaaggatgcgcatacgcatacggcaatgaccttcctgcgctcttatgcagacgacctgcccttacagcgctggttaaatgaggcagtttttccaagggagggacaactgacggcagatgatatttactggctggatattttgggtatcatggaatatctgacgagcggaatcaccgcgaattttgatatgtatttcttcccggagtcaaatgccaaggcttcgatcgattgcggtttccggacggtgcagacctcgggctttaataacttttccagcagtctggaagaactggaagaagactattaccgcgtaaatgagatgggagaactggcttcctttatccttggttttcatgcggaatatacgacttcaagagaccgtatggaaggactggcggcacttgccaataaggtcaaatctcctgtctttttacacaatgccgagacggcacttgaggtaaaagaatgtaaggaaagatggggcatgacaccgaccggtttgacggatgccctgggtatgtatacttacggcggtggcggctatcattgcatccatatggaggatggcgattttgagatctttaagaagcggcagctgaccgcggtgaccaatccggcatccaacctaaaacttgccagcggcattgcaccgatcaagcgttatctggatgaggggatcgcgcttgccatcggaacagatggtccggcaagcaataattgtctggatatgttccgggaaatgttccttacaacagcacttgccaaggtaaaggagcaggatgcggcttgtgtcccggcagaagaggtactttatatggcaacggcggcaggcgcgcagtgtatgggactggcggattgcgatagtctttccgtgggcaagaaggcagacattatcatgatcgatctgatgcagcctaatatgcagccggaaaatgatattgcaaagaatatcgtttacagtggcagcaagcagaatgtgatcatgactatggtaaacggacggattctttatgaaaacggacagtttgagatcggttttgatccaaaagagatctacgccaaggcgaatgccgttatcgggcgtatgaaataaagaagaaagaggacagattatgttacgggttacttatgtttggcactcgtgttttgtagtggaactggataagagcattctggtctttgactatttccccaaggaagccgtagagacagtgcactttgagggaaagatgccggaactggatgcgaataagcatatttatgtctttgccagccacagccacaaggatcatttttctctggaggtcttgcgctggcgggaaaaatatccgcagatcagttatattttttccaaggatatccgcttgggacgagcatatcttttacgcaatggacttgacccggagatcaaaaagcagatccattttgtatcggttatcgagaagtatgagatcggcgatctggtggtagagacgctgcgctcgacggatgcaggcgtggcatatctggtgcaggcagaagggcttagtatttatcatgcaggcgatctgcactggtggaattccggtatggaaggcgaactttacaccaagacttacggggatgcctacaagcgtgagctgaaccgcatcaagaaccgtcacattgatctggcatttgtggttttggatccgcgtctgggggatgcctattatctgggcatggaatatttccttaaaaatatggatgtggatctggtattcccgatgcatatgtggaagcagtatgacctgatcgaccgcttcaagcgcagaccagaactggtaggactttcacaaaaggttgtggatattgaccgggagaatatcatatttgacttgaattaggagaaaagaaaatgcatgttacaatttttacagacggcgcagcaagaggcaatcctgatggaccgggaggctatggtgcgatcttacaggtgagagacagtgcgggaaatctgcatgaaaaggaattgtcctgtggctacaagaagacaaccaataaccgaatggaacttctgggcgttatccgtgctttgcaggcactcaacaagccttgtcaggtgaccatttattctgattccaagtatgttgtggatgcctttaaccagcattgggtcgacaattggctgaaaaagaactgggtgaaatcagataagaagccggtcaaaaatgtcgatctttggaaaactcttttagaggcaaaagcaccacatcaggtgcaatttgtctgggtcaaaggtcatgacggacatccggagaatgagcggtgcgatcaactcgcaaccagtgcggcagaccagccggaagcatatttattagatgatgtgccactcattgctgcagatgaaaaacagatggctctgccattttaaagaaaagatcctgctatcagtagtgatagcgggatctttttgtgataagaaagaaactggtcacacacaaagcaagtgcttcggcgactaatacggcagaccagataccgtcgatgccaaagaagaccggcaaaagcagaatgcagatgacttcaaatacaagcgtgcgcagaaaggatatagtagcagagaccatgccgttgttcagcgctgtgaagaaggaagatccgaatatgttaaagccgttaagcagatatacaaaggcatagatgcggaatccgtgtatagtcatggctaaaagttcggagtcgtaacctacgaagaagcgggcaaaaggcagggcgaagatatgggaaataatggtcatgccaatgccccagactgtgatgagacgcaggctttttttgcgcatatttttgagttcgtcgtgattaccggcaccataatggaaactgatgatcggcgcactgccgagggagtatcctaaaaatatggctacaaagatgaagttgacatacatgatcgtactataagcagcaacaccattttctccggcaatcttcatcaactgcgtattgtagagtacagtaacgacggaggaggagagttctgtcataagttcggaggaaccattggtgcaggtcttgagaatggatccggcatcaaaagaagtccgtcccaagcgtagaagactgtgatttcttccagcaaaatacaggataggaaccagtccgccaataatctcgccgcagacggttgcaatcgcagcaccttttaaaccaagtccgaaaacagcgacaaacaaaaagtctaaaaccatgttggtgatgccggcagacaggatgacgtctagtccgagtcgcggcttttcagcagtaataaagaaacactggaaaacattctgcaacataaagcagggcatggagagaaagcagattcttccatataaaatgcagtaatccagtaactgtccggaggctccaaagagtctggatactgttggaaccagaagaaaagccagagcggacaggagaatgcctgctatggctgtcgtatatacaatgagggagaaggtcttgttggcttttcctttttctccctcaccaagcagtctgccgacgagagcgctgccgccggttcccatcatgaagccgagtgccccgacagccatgataaaaggatagatgatattgatggcggcaagggcggtcttgccggcaaagtttgatacaaataatccatcaatgacactatagatagaggtaaagatcatcatgatgatggatggaaatgtaaagcggagtaatttgctataagtaaaatgttctgaaagttgaatcttcattgtttcgtgtcctttcctaatagatctgaaaaagcggcgcgcagatgcgaaatatacgtgttacttgattggagcaggacttctgcgtccgcgggtgtcatggtatcgaaggagcggttctcacagtcgatgacaggacgtatttttgcataaatgatgtcctgaccgagtggggtgagatagatatttctactacgtcccttgcccggacgcagggtaatcagtccgtctttttccatctgatgaatggtggagttgatggtctgtttggaaaggaaggtatggtctgcaatatctttttgacggcagtcgtcgcccaactggcagatggcataatagatatcaaaggcactgtgggaaagtccaaggctttgcgcagtttcctgataaattaaattgatctcccgaaagatgcgattgtattctttgagagcagtattcatggttatagatgaattttgcatcgtagatcactccttaagtctgatttcgtacttgaaagagcatagtccgatttcgtacttatgtcaaggacttttgatgcgatagaaaaaatggcaaagaccaagttggcagaagtaaaataatggatagagcatcttgaaatgaagatatgatttctatataatagtaatgttacaaataccatgtcataaggaggcataagatatgatcgtaagcagttttttgtcttatctgatattattcgttatattggtagccatcgctgtatgtggagcgatgcttggcgttaagttagccaagagaaaaaatgcgaagaatgcgcagcaaaatacagtagcagaagatacaactgctcaagaatagagtttcggaggaagatacgttgaagaagtatggagtaaacgaattaagaagaatgtacttggagttcttcgagagcaagggacatcttgccatgaagagtttttccctagtaccacacaatgacaatagtttattactgatcaatgccggtatggcaccacttaagccatattttacaggacaggagatcccaccaagacgtcgtgtgacaacatgtcagaagtgtgtaagaacaggagatattgaaaatgttggtaagacagcacgccatctgacattttttgagatgcttggtaatttctcttttggggattactttaaggaagaagcgatcacatggtcatgggagttcttgacagaagttctcggcatggagccggaccgtctctacccatctatctatggagaggatgacgaggcatttgaaatctggaacaaaaagatcggtgtacctgcagaaaagatcactcgtttttatcgtgacccggagaccggagaatgtgataacttctgggagcatggtgcaggaccttgcggaccgtgttctgaaatctattatgatcgtggagaaaaatacggctgtggcaaaccggattgtaaggtcggctgtgaatgtgaccgtttcatggaagtatggaacaacgtatttacacagttctacggcgatggcaagggtggctacagcgagttagagcagaagaatattgataccggtatgggactggagcgtctggcagttgttatgcaggatgtagattccgtatttgatattgataccatgaaggctatccgtgaccgcatctgcgaactctgtggcaagaaatatcaggtagatgccttggatgatgtttccatccgtctgatcacagaccacatccgttcctcaacatttttggtatctgacggtgttatgccatccaatgagggacgcggctatgtgctccgtcgtctgatccgtcgtgcagcacgtcacggcagaatgcttggcatcaaggattctttccttgcaaatctttccaatacggttattgaggaatgtaaggacggttatccggaattagaagaaagaaaagagttcatcttcaaggtactgaccgaagaagaagaaaagttcaataaaacgatcgatcagggtcttgccatcttagcacagatggagcaggacatggtcgcagcgggatccaaggaactttccggcgagaatactttcaagttgtatgacacttatggattcccggtagatctgacacaggagatcctggaagaaaagggattctcttatgatgaagcaggatttcaggcctgtatggaagaacagcgtcagaaggcaagagccgctcgtaaagcaaccaactatatgggcgcagacgcatctgtatttgaaaatgtagacctttccatcacatccgaatttaccggatacgacaagttggaggatatcggtaaggtgacagtactggctacggcaaaagaagatgccgagggcaaggtggtatctgaacttgcagaccgcatcgctgagggcgagaatggaaccatcgtatgtgatgtgacaccattttacgctaccatgggtggtcagcaaggtgacaagggcgtgatctatacagatggcggtaagttcatcgtagatgacaccgtaaaacttgtcggaggcaagtatggtcatgtcggacatatggaacagggcatgatcgaggtcggacaggaagtgaccctgtctgtggacaagaccaatcgtatgaatatctgccgcaaccattctgcaacacacttattgcagaaggctttgcaggaggtattgggcaaccatgtagcacagtccggttctttccaggacggtgagcgcaccagatttgactttacgcatttctctgctatgacagcggaggaattacaacaggtcgaggatatggtaaatgccaagatcgcagagcatctgccggtcgtaacagagatcatgacacaggaagaagccaaaaagaccggtgctatggcgctctttggcgaaaagtacggcgagaaggtccgtgtggtttccatgggcgatttctccaaggaattctgcggtggtactcatgttgccaataccggagatatcatggcattcaagattctttctgaaaatggcgttgctgccggtgtcagacgtatcgaggcactgaccggagataatgtacttgcttactatgcaaatatggaagcagagatgcaaaaggctgccaagaccgtaaaggcgactcctgcaaatctggtagagcgtctggaaaaacttatggctgaggtcaaggaactccagagcgaaaacgaatccttaaaggcaaaggcagcacagagtgctcttggtgatgttatggattccgtggtagaagtatctggtgtgaaacttttagcaacatctgttgacggtgtagatatgaatggtctgcgtgatctgggcgatgatcttaagaataaactgggcgagggcgtgattgtacttgcatcggcaaaggacggcaaggtcaacctcgttgctatggcaaccgacggtgccatgaaagccggtgctcatgcaggaaacctgatcaagtcgatcgcaggtcttgtaggcggtggcggcggcggtcgtccaaatatggcacaggcaggcggtaagaatccggcaggcattccggatgctatcgcagcagtagcagctgcacttgcagggcagttggcttaaggctgatctgctgttgaagaaattgacagtttctgaagaaaactgttgacgtgtcgctattttatgctataatattttactgtgcaaagatatttacccaaacagttgaatatgcacaatacccaactggagggaggttaggtgtaagactatgtcaagtgtaacagttaaagagaacgaatctttagatagcgcattacgtagatttaagcgcaattgtgctaaggcaggtatccagcaggagatccgcaagagagagcactatgaaaagccaagcgtaaagcgtaagaagaagtctgaagctgctagaaaacgtaaatacaactaaaattgaaattgcgtttagtaagagatgtgatgcaagtcacatctctttttttttcgagcgttatcgggtataataataatcatgaaaacaatcgatgaagatatcaaaacaggacaatttaaagcagcctatcttttatatggagatgaggattatcttaagaagcaatatcgggacaaattaaccaaagccctcatggggcagggcgatactatgaactttgccaagtatgagggcaaggattcgtccatagaggagatcatcagttttgcggatactatgcctttttttgcagacagacgagtggtactggttgaggattccggtttctttaagtcttcacaggagactttggcagactatttttccaatatcccggagacgacctgcatggtctttgtggagagtgacgtggataaacgttccaaggcttacaaagcgatcgcaaaggcaggcagtgcggtggatttttccatgccggatgagaggatgctgacttcctggatgatggcgcgtgtcaaggcggcgggaaagacgatgacgcgggatgcctggaatgagttttttgagcgcagcaatgattccatggatcacatggatatggaaatggaaaaactgctttcttatgtatatgataaggatggaatcactttggaagatgtggaggcaatctgtaccaaacaggtgcacaccaaggtctttgacatgatctcttttgtggcatccaagaatctgccaaaggtattggatctatatcatgatatgctggcaacaaaggaaccgccgatccgtattctggcgctgatcatccgacagtttgaccagatgtacgtcatgaaggatatggcatcgcaggggatgaatgtacagacgatcgcaggcaagatgggcatccgtgattttattgtgcgaaagaatctgggacttgcaaggaattttaccatggaacagatccgggctttattggaagatgcggcagatctggatgagagagcaaagacaggacggatcaacgaccagttggcagtcgagatgctgatgatcaaatgggcgggttgaaccggaaaaatgcgtaaagaaaaacaccagtatgacggtactggtgtttctttttgtttatgttcaaaaaaattaagcaatagaattaacagccttggtaagacgagatacctttcttgctgcattgttcttgtggtagagacccttgcttgttgccttgttgatctcagaaatagcaacgatgagtgcttcattagcagcttccttatccttgttagcaacggctgcttctacctttttgatacaagtcttaaccttagacttgattgctttatttctagcagtcttgatctctgtaactaatactctcttcttagcagatttaatgttagccaatctgtacacctccaatgtcttgatataaaaataatagtaactctgttgtaacaaagccggacacggacagtctgttacaaacatactagattattttagagcagtaagccttgtctgtcaatacatatttcataaaaaagtgcaaacaataaggaaaagattttaagaaacgagggcatgatgcgggatgtttcagattcgaacagaccttgcggtggaaacatcggaaaaacgaccggatgggaaggaagtatccgggatccgggtggagaagaaaaagagaggcgaggatgtggtcatcacaaaagtatgcattgacacacaaaaggcggcaaagacactgggaaagccgcgggggacttatgtcagtatcgaagcagatcagatgatggaagaagacggcggctaccatcgggaaatctcggaaatcttttccgagcagttgaagacctttttgccaaaagattatagaaatgccaagatcttagtcattggtttgggaaaccgagaggtcacgccggatgccctgggtccgaaagtgatcgatcatctgtttatcaccagacatttgttggaggagttcggaaaatatctggtggaactggatcagtgctgcagtatcagtggcattgtgccgggggtcatggcgcagacaggcatggagaccgtggagatcctgcgtggaattgttgccgaaaccaagccggatctggtcattgcagtggacgcgcttgccgcgcgcagcatcaaaaggctcaaccggacgatccagatcacagatacaggcatcattccgggatccggtgttggcaattaccgtaatgccattaccgaggagcatttgggcatccctgtgatcgcgatcggcattccgacagtcgttgatgcagcgaccatcattgcggatttttgtatggggctcatggaggaaaacaaatcagaaccggaggagatggaagcctctgtgcgtagcctgatctcacccaagttaaataccatgtatgtgacatccaaagacattgacgaggcggtcaaccgcctgagttttacgatatcggaaggactcaacatgacttttgtcccaagagtctagccacagggacgttccttttgccataaggagcgtcccctttggcataggcaggcatatctcgaaaaaaaacgcatatattggtgcgtggggaaaaggagagatttgtgagtgccaagtggtctttgtattatcaattattaaaattatgtgtgccggtgttctgctttcaaacgacagaggcatctttgtcagacctgctcttacagcagatggaattggcaacaccggtcatggcatatgtctatggggaagatgagtcaaaagatgaactgactctgctggctgccatagaaaattccggcaagcaagaagatacaaaaaatgccgacatagaaatcagtgcagatgcgcaaaaggcaaatggggatgaggaggagacacaggatccgatcgctgcggccggggcagaaaatgtggctgctacagcgacaccggtttggacaaagcaggcagaggtcaatcgggataaactgctggactttgattatctggtcaaaaacttttatcggattgaccgcacaacgacgatcgattcctcggaactgaatccggggcaacttttagcaaaagatctgaccattgatacaaatgtgggaggaccggtcattttgatctatcatacacattcacaagaaggatttgtggactcggatggatcggaagggatgacggtcatggggttgggggatcgcctgacaagccttttgcaggatacctatgggattcctgtcttgcatcatcggggcaaatatgacgtggatgggcgcgattatgcctattccaacgcggaaccggagatcaggcaggtcttggcggacaatccgaccatacaggttgtgatcgatctacatagagatggtgtgggggatgatgtccatctggtgacggatataggtggcaagcagacggcaaagatcatgttcttcaatgggctgagcagaacgacatcgaccggtccgatcgattatctgcaaaatccgaatctgcaggataatctggcaacttctctgcaaatgcagatcgcggcggcagaactgtatccgggctttaccagaccggtctttttgaagggctatcgttataatatgcatatgtgccccaagtccatgctgatcgaggtgggggcgcagaccaacacctttgaggaggtctataatgccatggatccgctcgccaatatccttgcctatgtactattgggacaatcgcacacttgagaagacgcgtattcctatggtataatcttaccaaatgagcaaattttcgataggaaatgcggaggataaattttcatggcaatagatcagagcaaaattcgtaacttttgtattgtagcccatatcgatcacggcaagtcaacactggcagaccgtatcattgagatgacaggcctgcttaccgatcgtgagatgcaggcacaggtcttggataatatggatctggagcgtgagcgtggtatcacgatcaagtctcaggcggtgcgtatcatctacaaggcaaaagacggggaagaatatattttcaacttgatcgacacaccgggacacgtggatttcaactatgaggtatcgcgtagtctggcggcatgtgacggcgctattctggtggtggatgcggcacagggaatcgaggcacagacgctggcaaatgtctatctggcattggatcacgatctggatgtccttccggtcatcaacaagatcgatctgccaagtgcggagccgcagcgtgtcaaagacgagatcgaggatgtgatcggcttagaggcgcaggatgcaccgctgatctctgccaagaccggtctgaatgtagaggaagtcttagagcagatcgttagcaaattgccggcaccgaccggtgatccaaaggcaccgctgcaggcattgatctttgactctttgtatgatgcatacaagggcgtgatcgttttctgccgtatcaaggagggaacgcttcgtcccggagatcaggtgctgatgatggcaacaggcgcgacagcggatgttgtagaagtcggttattttggagccggacaatttatcccttgtgatgaactttctgctggcatggtcggttatatgacagccagcatcaagaacgtcaaagatacccgcgtgggcgatacgatcacacacaagaagcatccgtgcaaggaacctttgccgggctataaaaaggtcaatcctatggtctactgtggtctgtatccggcggatggagccaagtacccggatctaagagacgcattggaaaaattgcagttaaatgatgcatctttacaatttgaaccggagacatcggtagcccttggttttggtttccgctgtggtttccttggacttttgcatctggagatcatccaggagagactggaaagagagtataatctggatctggtgacaacggcaccgggcgttgtttatcgtgtgtataagacggatggcaccatgatcgagttgaccaatccatccaatctgccggatccgtcagagatcgaatacatggaagaacctgtcgtagaggcggagatcatggtgacgagcgagtatatcggagccattatggatctgtgtcaggagaggcgcggaacttacatcagtatggagtatatggaagaaacgcgtgccctgctcaagtacaccctgcctttgaatgagatcatctatgatttctttgatgccttaaaatccagatcccgcggctatgcatcttttgactatgagatgaagggctatgtcaagtctgatctggtcaaactggatatcctcatcaataaggaagaagtggatgccctttcctttatcgtattcagtggaacggcatacgaacgtgggcgcaagatgtgtgaaaaattaaaagaagagatcccgcgtcatttgttcgagatcccgatccaggcagcggtcggcagtaaggtcattgccagagagacggtcaaggctatgcgaaaagatgtgcttgccaagtgttatggcggtgatatttccagaaagaagaaattgcttgaaaaacagaaggaaggaaagaagcgtatgcgccaggtgggcaatgtagagatcccgcaggaggcgtttatgagcgtgttaaaattggacgaggattagtaaatatgaaagaggtcagtctttatctacacattccattctgtgtaaaaaaatgtgattactgcgattttttatcaggagcctatgataatgacatacaaaaaagatatgccgaaagcctctgtaaagaaatcgcttacatgggacagcaactgcgatcagttgctgtttcttctatatatattggtggcggtaccccatcctggctggatgcatcggacatgggaaagatcatggatgccctacataaaaattttactatcggtcaggatgctgagatttccatggaatgtaatccgggaacggtaacgatggaaaaatttagtgcataccgtaagatggggatcaatcgtttaagcatcggtctgcaatcggctaatgatgacgaactgcgtctcttgggacggatccatagttacgaacagtttttgcggacttttgacatggcacgcaaaagcggattttacaatctgaacgtggatattatgacaggattgccgagacagaccccggaaaaattgatgcatactttagagcaggtcattgccctgcgaccggaacatgtctctgcctactctttgatcgtggaagaaggaacccctttttatgatcgctataaatttgatgcggtcaagcagcatgctgggatgaaaacagaatttttgccggacgaggacgaggaataccgcctgtccaagatggcacaaagcgttttgatcgcacacggctatcagcaatatgagatatccaactatgccagggaaggttatgcctgctatcacaataccgtttattggcggcggggcgactatctgggacttggcattggagcagcctccatggtaggcgaccgtcgtatggcaaatgtgcgggacatctatcagtatatggatctgtgtgcggacgaattgtcttctaataatatagaagaaacagaaaatctgacgtcgcctttatggcaggaagtaacgagtctttctaaaaaagatgccatggaagaatttatgtttttgggactgcgcatgaatgcaggagttaccagagaggattttgccaagtgcttttcctgctcgatagagtccgtctatggcgagaccatcaaacatttgcggcaggaggctttgctagaagtggcagaggggcggatctttttgaccgacaagggaatggatctgagcaattatgccctggcacagttcctcctgtaagatcatctgcgccaaaggggacagtccatgtggcaaaaggagcgtccctgcaccacaaaaaattcacaaaaataaataaaaaaaattgtgagaagtgttgacaaagcaaaagggcagtgatacattaggtttaaagatattagcactctaagttaatgagtgctaacaatcttagaaacaaggaaatcagatgaggtatccgatggacgaattaggtgagagaaaagagaaaattttaaacgccatcatacagaactatctggaaaccggagagccggttggttcccgtaccatttccaagatgtcagatctgaatctgagttctgctacgattcgtaatgagatgtcggatcttgaggaactgggctacatcgtacagccgcatacttcttcaggacgtattccttccgataagggttaccgcttctatgtagatcacttgatggaagtcaaggatcgggaagtgaccgagatgaaggatctgatgatcgaaaagacggagaagatggaacaactcttaaaacaggtcgtcaaggtacttgccaacaatacgcagtacgccacgatgatatctgcaccgagtgtccagcgcaaccgtctcaagttcgtacagttatctgccgtagatgaacaccagatcttatcggtggtcgttatggaaggcaacatcgtaaagaacaagatcattccggttgaggaacctctgagcaatgagactatgttgaaactcaacatgctcttgaacaccaacttgaacgggcttaccgtcgatgagatcaacttagggctcatcaccaagatgaaagagcaggcgggtattcacgaagaaatcattgcacaagtcttaaataccgtggctgagacgattcacgaagatgacgatctggagatttatacgagtggagcaacgaatattttcaaatatccggaactttccgattcccagagagcaagtgagttgatcagtgcttttgaagaaaagcaggcgctggcagatctgatctctgagacacagggagatgaagaaaccggcattcaggtatatattggaaatgagtcaccgatccagacaatgaaagattgcagcgtcgtgacagccacctatgaattaggtgagggcgtgaagggcacgataggaattatcggaccaaagcgtatggattacgaaaatgtcatggataacctgaaaaatcttaagtcgcagcttgacaagatcttgaaaagggaatgacataggaaggagatgtaaaagtggcagaggaaaagaagcaggaagatagggaagaagtcaaagtagtcgagacagagacttccgaagaaaaagatacagaaagtacagaggcaggagaatccgctgataccaaagaggaggcggaggaaaaagaagaatccgcagaagaagctgaggaagaaaaaggaaatggaggctttttcaaaaagaaagaaaagaaagacaaaaaggatgcacagatcgaagaactgaccgacaaggtcagacgccagatggccgagtttgagaacttccgcaaacgttctgagaaagaaaaatcacagatgtatgaagtgggagcaaagagcatcttggaaaagatccttccggtcgttgacaactttgaaagaggtcttaagggcatggaagagagcgaagatccatttgcacaagggatgcagatgatctacaagcaactgatgacttccttggaggaagcaggcgtgagtccgatcgaggcgctcggcaatgaatttgatccgaatttccacaacgcagtgatgcatgtggaggatgaagaagccggcgagagcgagatcgtagaggagttccaaaagggctatatgtatcacgatacagtgcttcgtcatagcatggtcaaggttgcaaactagtcaaattggtagcaatgctaatttaaaataaagacaataacaatgtgatgataaataggaggaaaaaatcatgggaaaaattattggtattgatttaggtacaacaaactcttgtgtagcagttatggaaggtggtaagccaaccgttatcgccaaccaggaaggtgcaagaacaacaccgtctgttgtagcatttacaaagacaggagagagattgatcggtgagcctgcaaagcgtcaggcagttacaaatgcagaaaagacaatttcttctattaagagagatatgggtacagacaatggtcgtaccatcgatggtaagaagtattctccacagcagatctcagcaatgatcttacagaagttaaagagcgatgcagagaactatctgggtgagcctgtcacagaagcagttatcacagttcctgcatatttcaatgatgcgcagcgtcaggcaacaaaggatgccggaaagatcgctggtcttgatgtaaagcgtatcatcaacgagcctacagcagcagcacttgcttatggtcttgacaatgaaaatgagcagaagatcatggtttatgatttaggtggtggtacatttgatgtatctatcattgagatcggtgatggcgttatcgaagttcttgcaacaagtggtgataaccgtcttggtggcgatgacttcgaccagaagatcacagattggatgctggatgagttcaagaaggcagaaggcgttgacctttctactgacaagatggctctccagagattaaaagaagcagcagagaaggctaagaaagaactttccgctgcaacaacaacaaacatcaacttgcctttcatcactgcaacagcagaaggaccaaagcattttgatatgaacttaacacgtgctaaattcgatgaattaacacatgaccttgtagaaagaacagccattccggtacagaacgcattaaaggatgcaggtcttacagcaagtgaactttcaaaggttctccttgttggtggatcaacccgtatcccagccgtacaggataaggtaaaggcacttacaggacatgagccaagcaagtctttgaacccggatgaatgtgtagccatcggtgcttctatccagggtggtaagttagcaggtgatgccggtgccggtgagatcttgcttttggatgttacaccactttctctttctatcgagactatgggtggtattgcaaccaagttgatcgagagaaatacaacgatccctaccaagaagagccagatcttctctactgctgctgataaccagacagccgttgatatcaacgtagtacagggtgagagacagtttgctagagacaacaagtccttaggacagttccgcctggatggtattcctccagcacgtcgtggtgttccacagatcgaggttactttcgatatcgatgccaatggtatcgtaaatgtatccgctaaggatcttggtacaggtaaggaacagcacatcaccattacagcaggatctaacatgtctgatgaagacattgagaaggctgttaaggaagctgctgagtttgaagcacaggataagaagcgtaaggaagccatcgacaccagaaacgatgctgatgcatttgtattccagacagagaaggctttggaagaagttggcgacaagatcgatgcggcagataagtcagcagttgaggctgatatcgcagcgatcaagacaatcctcgaggcacatccggaagcagaggctatggatgatgcaaccgtagcagaattaaaggctgcacaggagaaattgcaggagagtgcgcagaaggtattcaccaagatgtatgaacagcaggctcaggcagcaggcgcacagggtgcaggtcctgacatgggtgccggtgcaggccctgatatgggagcaaacaccacttacaatgcggcagatgatgatgtcgtagatgcagacttcaaggaagtataaaaaacatggcagaacagaagcgagattattatgaagtccttggcgtagataaaaatgccgatgacgcaacgatcaaaaaagcatacagacagttggcaaagaaatatcacccggatatgaatccgggtgataaagaagcagaggtaaagttcaaagaagcctctgaagcctatgctgttttgagtgatccggataagagaagacaatatgatcagtttggtcatgctgcttttgacggcggtgccggtggcggcggatttgatttctcaggcatggattttggagatatctttggagatatcttcggtgatttctttggcggtggcggcaacagacgtaccaacaatggaccgatgaaagggcagaatgtccgtgcaagagtcaatatcaagtttgaagaggcagcatttggttgtgaaaaagagatcgaactggtattaaaagatgagtgtgcaacttgtcatggatccggtgcaaagcctggaaccacaaaggatacctgtccgaagtgtggcggtaagggaaagatcgtagttacacagcaatcattctttggaaccgtacagaatgtaacgtcttgtccggaatgtcagggaacagggcagatcatcaaagaaaaatgtagtgattgccatggtaccggatacatttcccgtaaaaagagaatttctgtatctattcctgctggtattgataacggtcagagtgttcgtatccgtgaaaagggagagccgggcatcaacggaggacctagaggagaccttttggttgaggttcgtgtggccccgcatgcgatcttccagagaagcgaatacgatatttattcttctgctccgatctcatttgcacaggcagcactgggcggtgaagtcatgatcgataccttggacggaaaggtcgtatatgaagtgaagcccggcacacagaccgatactaggatccgcttgcgtggaaaaggtattccgtctttgcgtaataagaatatgcgtggtgaccattatgttactttggtggtacaggttccgacttctcttagtcatgaagcaaaagaaactttgcgtaagtttgatgatgagacaggaaagaccttgaaagccggaggaacagcggttaaggaagaaaagaagaaaaaaggatttatgggcaaacttaaggatgccgtagacgatttataaaatgcgaagaagcgatggcttggtatagaaatatatcccatcgcatttttgcgtataagagaaagaggataacatacatgaaagtttggattacaagacatgggcagacagatctcaacaaaaagcagttgatgcagggcgtttatgacgaaccactgaacgaaacaggaattgcgcaggcagaggaaacacggaaaaagattggtgatatgaagttcgacgctgtttactgcagcccattgaagcgagcaaagaaaacagccatgatcatcggaggtgtatccgaagaggaattgatcgtggatccgcgtatcatcgaggtaaactttggaaaatacgaaaaaaagagttataaaaaattaggaccatttatgaccttatactggatgcttccggagatcataccggcacctaagacggtggagcctgtttcatctatggtgaaaagaagtcgttcttttatcgaagatctcaaaaaagaggactatgaaaacgtgcttgtggtctgtcacggtggcattatccgggctctttgtggagttcttgaaaaccgtagaaatggaatcaagtggagaccaagaccacaaaattgtgaaattagaaaatacgagttgtagtttgtagggacgttccttttgccacaaggagcgtcccttttggcataccgacaggtgcagagcggcgtcttctattgatttcggtattctttcggcgtcataccggtcaatttcttaaatacattctgaaaatacccctgggaggaaaagcctaaataggttgctatctctaaaatagagcgatcagtcgtttttaacagagacttcgctttttcgattttttgttcttgaatatactgtgacaaggtcataccggtttcttttttgaatttggttgacagataactgcgacttaaaaaaagatcctgagccatttggtcaacggagaaatcttcggtcagatgctctcggatgtaggatgtgacagatcgcatgaatttatcatagcgttttccttttttaatatcccgaaccagacttgtataatcaattaccatatgatattgcagattcatgacctgttccgggttatcgtaattctctgcgtgttggatatatttatcgctgagtgtcagggcttcctcaaccgggagcccgccgtcaatcgcagcgcgtgaaagcagggttgcggaggtgataaagatatttttgacctggcgtaaataggttggtgcaatttttccggcgcgacccggatcggtatgtgcgatgagggtttgcagattttctatatctccttcctttacacaggcaagcatagcgcattcaaaatcgtgtgttgtatgagcataggataccgtatcatccatgtagtcgcaaatatggttgtgagcccatgttatgtcattaaatgcatcgttaaatgaggaatgggggatagaggcatcgctattatctgttaatgtatacgcttggttctggctggaaattttggcattactatcgtagatttttatattggctaaattgagtttaacatcactgatgtagtagtatatcagacaaagttcatgaagtagcatttctacaggtagtggagtaatgttttgcataagttgctggtattgttccatgtaattcattcggagatcaagggaaaacatgaattcgcggatttgtttttttgacggtgtaatctggaaagtcggccctaagatgagcgtatactcctgatgttttacaataccataaaaatgttcgtagggagagatgaaatagtttacattgccctcaatcgcaagcagggtatcgaggtaggggctggcagggtctttgggaaaatgagaaggatcatagtaatgtatgagtttattttctttatatactctgacagcaacagacgatagagaggaga

SEQ ID NO: 12502 - DNA, 5367 bp, Unknown
  gut microbiota DNA sequence
gaagccttttatgcgcagcgcaacaagcacactgtgatccatcagaagtccacagacctacgcaagatcgtcagcattcatttagagcgtgaccgcaagaaatatcttttgcagaaaaagcagttggctgatacagagaagaaggataaataccgtatttacggagaaatgctccacacctacggctatgccgcaagccccggtgataaatccatcgaggtcacaaattattataccaacgagcctttcgtcatccctttggatccgacactggatgccatggaaaatgccaagaaatattttgataaatatgccaagttaaaaagaaccggaaatgccctctcctcttatattctagaaactgaaaacgagatcaaacatttagagtcgatcgagacttccctttccattgctgaaacagagggcgatcttgccgccatcaaggaagaattgcaggaatacggttttatcaaaaaacacagtggaaagaaaacgaaccggatttccaaaagtcagccccttcactttgtggatgacaacggttttcatatctatgtcgggaagaacaattatcagaacgatcagttgacttttaaatttgcgaccggcaatgattggtggttccatgccaagcagatgacaggctcgcatgtgatcgtcaaatccgaaaacaaagaattgccggattccacttatgagtacgccgccgcgcttgcagcctactactccagtggcagggataacgaaaaagtggagatcgattatctgcaaaagaaaaacgtcaaaaagccaaacggcagcgcgccgggatttgttgtctattacaccaattattccctagtggcaacgccatctctggcgcacgtcactttggtcagtgataaataagacttttgttttttctagtaaattgtgctaggatgatatgattttttgctcatatactatgattgtaaccatagtcctgcaacaaggagcacaaatgaaaagaaagcccgagaccaaacgactggatcctgcggcaaaagaggctttgcaacagttcaaatgcgaattatcccaagaactcggcacggttcttcattcgaaaaccaaggtacaacgtgcaaaagactcacaatccatcggctcttatatggtgcagcagatgatccggtcccagaaaaacaaaatagacccctaagaaaaaactacctgtgaaaaatcacaggtagttttttataagatcatattgttatcacttgcaaaagaggacagattttttcggatggcaggataattttccagactttcatcttccttcaaaaaatctgccacatcctgggatgccttttgcagcaagtctgcatctcctatgatgtccgccagtcgaaaaccaagttcgccactctggcggatgccaaaaaagtctcccggtccgcgcagacgcaggtcttcctgggcgataaaaaatccatcgttggacttgtgcatgacttccagacgatcggtctttttctttcccttggacttgtccattagtatgcaataggactgccattttccacgtccgacacgaccgcgcaactgatgcagttgtgccagtccgaatcgattggcatcttcgatcatgatcagagtcgcattcgggacattgaccccgacttcaacaacggtcgtagatacaaggatctgcgtctttccctcggcgaatgcctgcatgatcgcatttttctccttgggcggcatttttccgtgtaaggctgcgatggaaacctgtgcgccaaagatcggacggatccgctccacatagtcggtcacattttccgcctccgtctgctcgcttgcttccaccaggggacagataatatacgcctgatgcccgcctgccagttcccgcccgatcatttcataggctttttgccgcagatcttctttgataacacaggtcttgatcggaatacggtctgcaggcaattcatggatggcagatatctgcatattcccatataagatcatggcaagggttcgcgggatcggtgtcgcactcatgacaagcatatggggtgtcatacccttctttgaaaggctctccctttgcttgacaccgaaacgatgctgttcatccgttaccaccaatgccagattcagataatcgaccttttcctgaatcaaggcgtgcgtgcctaccacaaagatctgtggtctggtcgctatgatctcatatgcctttttcttctgggatgccgtcatggaaccagtcaggcagacaacctgataaggcagcccataatctgcgcacatctcccggaaaccagccgcatgctgcatagcaagtacctctgtcggtgccatgatggcagcctgatagccgctggcaaccacatccagcatggcaagaaaggcaacaatcgtcttaccggaaccgacatccccctgtatcagacgctgggacacataaggtccctgcaagtcgctgcggatctgtgatagagtatccatctgccctttggtaagggtgtaaggtaacttttggatggtctcatccgtcagtgcggtctctgtaaaatgccagggattttcaatgcctgtcgtccctgcttctaagatcctgctatgtaagataaagtagaagaactcctgatatacgagccgtcgacgcccttctgccaatgcctcaaaatgcataggaaaatggacttggcgtatcgcctgcatataggaaggaaagccctctctttgttctacaaaatccggcaggttttcctcagaataatccgccagactatcgcatgccgccagggtaagtttgcgcaccatctgttgtgtcatacccttggtaaggctatagatcggctgtaaactgtcccgaagcgtaagatatttttccggtgtaaatatagccggttgttccatcttgtagccctgtttttctttcaaaagccgcccataaaaaatatagggctgtcccacctgcaactgtttggcaatgtaaggcatatgaaaccagacacattctacgacctgattcttacaaaagaggcttgccaaagtaatatccatgcgttttcccctacgaaaggtggctggggtgcgaagggaaccgcagacagccacgatctgccctatattttcctcatccgggtcttccggctgcggatattcctgataagttctgggaaaatgaaggagtatatccccaagggtatatactcctatcttttgaaataactgttcagttttttctcccacgcccttgatctcgcgtaatgaagaatgtaaatccataatactcctattctactgatgcaatgtaatagtaaaccggctgtccacccatctgtaactctacctccagatcagcaaacttctcgccaacagcagcggcaagtgcctctgcatcttcctctgtcacatctgcaccataataaatgctaacgatagcagaatcttcgtctaccatttcagcgatcatatcaaggaatacggtctggatgtcagtattcacggcaaggatgccggcatcaccgatacccatataatctccctcatggatctccttgtcgtcgatcacggtatcacgcactgcataagtgacctgaccggtcttgacattggaaagttcctcgatcatacgatcttcattttccttggcactctgctccggaatgaagttgatcaatgctgtaattccctgtgggatcgtcttggtcggaagaacgatgacttccttatcctcacacaaagaagccgcctgatttgcagccagtatgatatttttattgtttggcaatacaaaaacggtcttggcaggtactttagcaatcgcacccaagacatcctctgtgctaggattcatggtctgaccgccttcgatcatgtaatctacgcccagttccttaaagatctcattgagaccttcgccgatcgatacggcaacaaatcccatttccttttccggttctgcgctggcaggtgtctcttcttcagttttcttttcctcagcctgctgtgcaaccgctttctctgcatccttgagcagacgctcctgatgctcctcacgcatattgtcaatcttgatcttgctaagagaaccatgtgtcagggctttttgaatggcaagtcccggatcattggtatgtacatgggtcttaacgatctcatcatctgcaacaacgacgatagaatcaccgatggattcgagatagcccttgtactcctgctcctgtgcctcagtcaatggtttatctaaaacaatgataaattctgtacaataaccatacttgatctctgcctcagcctccggagcagtctttgccacattgccggatccggattctgtttcgatcgtatagtctacttctttgccaagcagacagtcataagcaccctgcataacaacgacaagtccctgtccgccggaatctacaacgccggcctgctttaatacgggaagcatatccggtgtctttccaaggacataatcagcctctttgatcacttcatcaataaagtaaacaatatcatctgtcgtatcgactaattccaatgccttgtccgcagcgcccttggcaacagtaaggatcgtaccttcctttggcttcataacagccttataagcggtctcaacggcacgctgcaacgcttcacacaaaacatcgacatctacctgatctacctctttgatagcctttgtaaatccacgtaaaagttgtgaaagaataacgccggaatttccgcgtgcaccgcgaagggaaccggatgagattgccttggcaagagtcttcatatcgacctgctccaatgcactgacttccttggctgctgacatgatcgtcattgtcatattagttccggtatctccgtccggtaccgggaatacattcagttcattgatccattcttttttagactctaagttctttgcacctgctaaaaacatcttggctaatgtagatgcgttaattgtattggcttccactatcgtatatcctccttagtcaattactcttacgccttcaacgtagatattcattgccttgactgtcataccggtaaatgattctactttgtacttgacagtctccatcaaattgtcagcaacggtagccacgctgacaccataagaaataatcacatggaaatcaagtgtgatctcattgttttcatcaatagagacagcgattccatgattcagataatccttctttaataactttacaagaccatccttcatattgacagcagccatgcctacaataccgaagcactctactgctacagatcctgcataagttgcgataacgtctgattcgatcacgatcttacccaaattggtttccatttgaccttgcatatatatacctccacaataatcgtccataatat

SEQ ID NO: 12503 - DNA, 32475 bp, Unknown
  gut microbiota DNA sequence
agtttgttgaaaccgacaaaccccaatttgtcggcttgctcaaaataatgtggagatggttttgttacttttttgttacttttgaaaatgatgtgctgaaaagcccctttctatcgtattttttgaggtacaaattcattcaagtcccatcttccgcatttactgataggaaaccttttgaaataggtttccttttttgttatcataattactatattctcattgtaaatcctggtatatggaggtagcatatggaaacctgcaatctaaaggaatttcaatctaaatcggagcatatgcatccttatgctatgtaaaaacgaccttttgcacattttacatatcctgctcttttctcagcaatttttgcgttttcttcaacctaacttgtcatccccacaaaatcccttgacacaggctttgttttcccaatacaatagcataagtttcacaaaatacgaaggagtttacctatgttacaaaccaagataaaagacaacgaattagcgcaacaaatgttgcatctcgttgtccctatcgctatacagcaatttatgttagcactcgtcagtgcgaccgatgccctgatgctgggctttgtcgatcaggcatccctgtccgcagtttcccttgccggacagatccagtttgtcctcaatctctttatcgcaggcattgctgccggatgcggtatcattatcgcgcaatactggggaaaaaaagacaccacctccatcgaaaaagtcatgccggtagcgctctataccaacctgatcttcggagggacttttaccgtactggctttgtgtattccaagccacctcatgcagatctttaccaacgatgcaaccctgattgccaacggcacctcctatttaagagccgttgcattttcctatgtcctctgtggcatttcgcagatctatctgatccttttaaaaaatacagggcatgcggcgcttagctccaagatctcatctactgccgttgtgatcaatatctgtctcaataccatcttgatctttggctttcttggtgcaccacgtctgggcatcatcggtgccgcttacgccacggtcacagcccgtgttgtagaactgatttgggcttattttacagtacggcgcagtggcgacgttgccatccgctgggctggcattttgcatactgacagcactttgaccaaggatttctggcactataccacacctgtccttggtgcttcccttgtctggggcatcgcctttgtcctctactccgtcatcctgggacacatgggcagtgatgccgttgccgccaattccattgccagtatcgtaaaaagcatggtgcagtgcgtcatccgtggcgtgagtgccggcgccggtattctggtcgggaatctgctgggtgccaaccaactggaaaaagccaagaattatggcggtcggatcacgcatatcgccattgttatcggtatcgtaaccggtactctcctcatgatcctgtctccatttatatcgcgcattgccccaatatcggatactgccagaggctatcttcaatttatgatgatcgtactgggctttaacctcatgggacagtccgtaaataccacagtactggacggtatcttttgtgccggtggagattccaaattcgatatgaaaggtaacctcggtgccatgtggtgtttctccgttcccctcggctttattgcagcctttgtcctccatgctccggtatggctggtctacatcattatcagtctggatgagatcgtcaaacttccagcagtctatatccattacaagaaatatgtctgggtacgaaatatcacccgataatttaccactttatgcgagtgcgcataaaaaggtttataaacaagccaatagggacgctccttatggcaaaaggaacgtccctattgtactagatttcaaaataacgttttgcgttgcggtaagaaataccttctacaatcttctgtaaagacttgtcgtctgccgggtactctccgttttctacccaatttccgaccagttcgcacataatgcggcggaaatactcatgtcttgtgtaagacaggaaacttctggaatctgtcagcataccgataaagttgccaaggaggcctaagttcgccagcgaagtcatctgctccatcatgccggtcttattgtcattgaaccaccatgcagaaccatgctgaatcttgccgactgcctcagaagactggaagcatccaatgatggttccgatcgctgcattgtcgatcgggttcaaagagtagatgatggtctttggcagttcatccgtatatgccagggcatttaagaaatcagccagttcgttgatcggtgcactggtagaaatgctgtcgatacctgcatccggtcccaaggcttcaaaaatcttgtggttgttgtcacgctttacgccataatgcaactgcattacccagttcagacgatggtactctttgccaagatgcatgagcacgcccatcttgtacttaccgatctcctcacggctcaactcctgtcctgccatcttctttgcaaatactgcctcaacttcgtcctcggtgacatctgcatatgcaacatattccagaccatgatcgctgacacagcaacctgcttccttgaagtattccattctcttggtaagcgcagtcttgacatccgcaaaagatgtgatcttcatatctgctgcctgtcccagtttctccatatatgaaacgaaatcgtctttttcaatattgacagccttatccggtctccatgacggcagtacttttacattaaaggtctcatctgctgcgatcatcttgtgccagtgcagatcgtcaatcggatcatctgtggttccgatcatttctacattggaatccaagatcaactgtcttgcagacatggtctttaacttttcattacagagattccatacttcctcagcagtatcgccatttaaggcacctgtgtagccaaaatatctctgcaactcaagatgtgaccagtgatagagtggatttccgatagccatctcaagtgtctcagcccacttctggaacttttcgcggtcagaagcatcgcctgtgatgtaacgctcctctacaccgttagaacgcatctgacgccacttatagtgatcaccgcccagccatacctgtgtgatattgtcaaaatgtgcatcctcagcgatctcctgcgggctcaaatgacagtggtagtcaatgatcggcatattttctgcaaaatcatggaacaaatgctttgctgtatcggttgtcaaaaggaaatctttatccataaattttttcataattttgtgtcctttctgctctcgcacttctcttttatcacaaaatcgcccacggattctagcatctgtgagcgattctgtatgagtctatataatgaattaagcgttctttacaaggtctacagcgctctttgtcatagccttgatctcgtcaaacttaccagccttaacaagatcaccctttaccatccagcttccgccagctgcgatgatctttggctcagcaagatactctaagatatttgcttcgcttacgccaccagttggcatgaaacgcatctgtgggaaaggagctgccagagccttgatggtcttgagtccgccaaactgtgctgccgggaagaactttgctaccggaagtccatggtttacaaccatcataagttcggttggtgtgcatacacctgggagaatcggaatattgttctcgcagcagtatgttgtaacttcttcagaatatcccggtgttacgatgaactttgcaccacactcgattgcctgcttgcactgctcaacatttacaacagtgcctgcacctacgagcatttccgggaaagcctcgctcatagccttgatagaatcagcggcagcggctgtacggaaagtaacctcagcaaccggaagtccaccatcgatcaaagcctgtcccaagggaagcgcatcctttgcgtcctcaagaacaacaaccggaacgatcttcagttcttcaactttttttaataattcttgcatttccattatatattacctcttttctattctataactcaatgtcatatctcgttctcattaagaaagttctgttcgctaggttctaccttcacaattgctcggtctcaccaatctcacagaacggcctcgcactaagctcatccttcgccttcggctcggattcgctaagttgctttcggcctatacccctgagtatgcagagaaaccaccatcaacaggaagaacaacacctgtgataaatccggctgcatcgttgttcagaaggaataaaaggcttccgattaactcttctgattcaccgaaacgtcccattggagtagcagcaaggatcttgccggtacgaggagttggggttccatcttcgttaaataacaacttagcattctgctttgttgagaagaatcccggtgcaatagcgtttacacggatgccagcctttgaaaagtgaacggcaagccactgtgtaaagttgctgattgcagcctttgctccagaataggcaggaattttggtgagtggagtgaatgcattcattgaggaaatatttaaaatattacatccttctttgtctaccatatcctgggcaaagatctgtgttggaagcaatgttccaatgaaatttaggttaaatacaaactctactccgcttgtatccaagtcgaagaaagaaattgtatcagcgtcgatatcaccatgctcgaagtattccttgtctgtagtagcacgtgggttgtttccgcctgcgccgttgataaggatatcgcatgtaccaagatcagcaacaactgcttcatgtgttgcgatcaggctgtctttttccaaaacgtttgtcttgtatgcctttgctacaccgccttctgctacgatttcgtcagcaaccttctgtgcagcttcttcatttaaatcaaggactgcaaccttagcaccagcctgtgcaagtgcctgtgcgaacattccgcagagcacaccgcctgctcctgttacaactgcaacctttcctgaaagatctgtgttaagtggtaatttcatcattgtaaattcctcctgttatttattaaaactattagttgttcttatccgctttttcaacggcttcaaaaagaccattgatataagttgcaccaagtgctctgtcataaagaccgtaaccggcacgacctgtctcgccccagatcattctaccgtggtccggacgaacatatcctgtaaatccgttgtcatgcagtgccttaacgatcgcatacatatcaaggcttccgcaagatgaaagatgtgctctctcctcaaatccgttgtcaagaacctgtacgtttctaaggtgtgcaaagtggattcttcccatctttgcatacttagcagccatctttacaacatcattttttgcagagcatcccaaagatccggtacaaagtgtgatgccgttatgaggatcgtctacaaggctaaggaaacgatctaagttctcctcgcaagtgatgattcttggaagtccaaagatgctccagcatggatcatcttcatggatagccatgtttacgtcacattctgctgctacaggaatgatcttctcaaggaagtactgtaagttgttccagagatcatcttctgacaattcctgatactgtgctacgatgtcctttaactcttctctggagtaacttgcatcccatccaggaagtgtcagatcgctgtcagactcgagtggatttacctgatctacctgctcctgataataaacaagggatgtagatccgtctggaagcggatgatcgagctgtgttcttgtccagtcaaataccggcatgaagttgtagcatacgcacttgataccagcctcagcaacacggcggatgttctcgcagtagttctcgatgtatttgtctcttgaaggctttcctaacttgatgtcttcgtgaaccggaatactctcgatcacttcaaagtgaagaccagcatcttctgtctgcttctttaactttgcgattgactctctgctccaaacttctccaacaggtacatcgtaaacagctgttacgatagaatccataccaggaatctgtctaatctgctccaatgttaccttgtcgtcttctccataccaacggaatgataatttcatatagaccctcctcatttttaaaaaatattatggacttttttgttagcccttatgtctcatttactgtacctataatgtacaatctttcccctgactttgaaatcataaaacttgttgtaaacattgcaaaagttgttgttgcggtgtaaaatcataggagacaagatatttgtaccgcgcaaatcacagataaaaggaaagaaccatggcaaaacattatcattcacaattcgacgaacgacaggaaatgcagacctcggatttcgagatcttctattatgaagacaaggaagcatctgatgtatccatgcatcgccacgattattatgagatatatttctttttggagggagatctttcctaccaaataggaaaaaatatttaccccctccaatacggtgatatctgtctgattccaccgggcgtttttcatcgtccgcagtttcacagcaatgacaagccttaccgccgtatggtgctttggctgtcgcctgacttttttgcacgattgcaggcactgcatccggatattacctacagtttcaattatgggaatcagatctcctgccatcatttttcctgtgactttgccaatgcacagattctctttgacaaactaatcgacatcatagaagaacgtcagcgcgatgttccttttcacgaagctatgatttcctgctacatcgcgtccctgctgcttagcatcaaccgcattgtctatatgggtgagcgcccaacggctgcaaaaagcgaacagggaagcctttttaccagactctgcgaatatatcaatacgcatctggatgaagatctgagtctgaatgccctctcgcgcgaattttatgtgagcaaatatcacatttcacatgtttttaaggaaaatatgggtatgtctgtccatcagtacctattaaaaaagaggctctacgcctgcaagaacaatattcttgccggagagcctctgcgtgaagtcgccatgacttatggttttaaagattatacaaacttttttagagcctttaaaaaggaattcggtatcggaccaaaggaatataaagactccttcggcattgtcgcccagccacacaaggaagcgaccgatacgatcgaacatgcggtatttgatgaaatttagaccttattttctcgccacgatcccaaacatggcatccgggatatgaaactcgtccatttctgcatagatgcgttttccaacggtctgatctatagacacataagaaaaacctatcttgcgcagcacttcttcatcccaggatggacgtggcagcgcactgatggaaagcatgtgatagatatcgtgacattcttcctttagtaaatcactcatcatattatgtgccttattctccggcagagacagattatgtgcccccttggcatattccgcgtcaaaattcagaagaataccgccctttttcaaaagggcataccactttccataagcctcgatcggatgtggcagtgtccaggtcagatttctggtgatgatcacatcaaaactttctggggcaaagtcaggattttccgcatccatggtaagtgcctttacccgttttgcatccaatccatattctgcaatcatgccattggcttttgcaaccatttcctctgtcagatcaatccctgtgacctcaaatccatgctgtcctaaaagcacctcaaaaaagccacttccacagccgacatccaatacttttatcagtgaagtatctttatcagccacagcctctgccatctcatcagcatcttccatggcggcatctgtgatcttagtcaggatctctgtcaaccagcgatctgccttgttgctcttcatctcgtgcttgcgaagtttggcaaaggaatccgcacgtttactccaatagccctttacccggtctttcacttcttccggttgttcttcaaatgcaattttttttaactcgcccatatgaattcttgtcgctttctaccccttctattatagcgggtgcatcccgcatatttctcatagttctgatgcctatttttcagcccgcaccataaaaatcggtgtcgccgcatagttgatctgttccacttcggataggagcaggctaccgatatcccgcctgctgctcacgctctgcacacccgcttcttttaaaacagcctcatcccatgtcggacgctgcaccggggaaagtggcatctgataagcgatccgttccatggcatcaatgtccgtccccacatagtgatcctccacgcccagttcctgtgtattcttacggtcttcctcataggcttgccgcttcttttcatcaaaaagatagccataccagttggcatcaaaattcaaaagcaggcctcccttttttaagacacgacaccactccttataagcaactgccggttcctgcagattccatgtcagattccgggagaccaccacatcaaaggatgtatccgcaaaggtcagcgcctgggcatccatctgtaggaaacgtatcttatcctgcacaccgcaagtcgccgcattgtcctttgcctcttttaacatcacctgtgtgtagtcaatggctgtcaccacatagccacactccgccagaatggcagaaaaaaatccgggtccgcacccaatatccagaatatggatatcggatggctggtgtcccggataagtcttttctatttcttttaccaaaaactgcttccaattcgtatgctgcacgcctgtcagttcttcctgattgaccttagaatatccgtcagcgcgtcgggtccaatagtcttcggtagcctttaataggtttttatccatgttatttatcctcaccgactactaatttaccacagatgaggcggtttctacaagacttaaattctttcccatttccacgaaaaattgtataaaagcgcaggattttgtaagacagcctcccatgcatttgttagaatataggcaaaagaatacaaggaggtttttactatgatccaaaaatatatctatggcgatccgatcgaaacggatgccgtcataaaagagatcccgacaagcgaggggcatccttcttatggcacgatctcaacgcaggatggcttttcctttacctacatcatgcagccggaggatatcgtctatgggctgggcgagtccaaccgcggcatcaacaagcgaggcttcctttatgtcagcaactgcacagacgagcccaaccatacggaggacaagcagtccctttacggcgcccataactttatcattgttgacggaatcaatcacagttttggtctttttgttgactacccgaccaatctaacttttgacattggctacaccagacaggataccctgtccatcacctgtgccgatgcagacttaaaactctacgtcatcgacggcagcgatgcctatgacatcacccgccagttccgtcacatcatcggccgctcttacatcccgccacgctttgctttcggcttcgggcagagccgctggggttacgaaaagccggaggatttccgcaaggtcgtttccgaacaccgcaaggctcatgtgccacttgacatggtctatatggacattgattacatggacggctacaaggattttacggtaaatacagaggcttttcctgactttaagggatttgttgatgaaatgaaggaagactacatccatttagtacctatcattgatgccggagttaagatcgaagaaggctatgatgcatatgaagaaggccttgccggtgattatttctgtaaaaaagaagacggttctaattttgaggcggcggtctggccgggactgacgcatttcccggatgtcttaaatcctgctgcaagagcgtggttcggtcaaaaatatgatagcctcttatcgcagggaattgacgctttctggaatgacatgaacgaaccggcaatcttttatacaccggaaggaatggcagaaaagcaaaagataaccaaagaattgctctccggcgactccaagtatccgccagtggcaattttctatctcatgtccggaaatgatatttcttcggactatgcccgtatgtatcacaagattgacggcaaattagtctgccacaacaaagtacacaatctgtttggttacaacatgacaagagccgcatccgaagcctttgctaaacttgttcctgatcgacgcatcctattattttcgcggtcttcttatatcggtatgcaccgttatggcggcatttggaccggcgacaacaagtcctggtggagtcacattctgctctgcctgaaaatgctgccggggctgaatatgtgcggtttcctttatgtcggctgtgacttaggtggtttcggagaaaataccacaagagatctgctcctgcgtttcttagcgcttggcgtcttcacaccgctcatgcgcaaccactctgcaaccagaacgcgcgaacaggaattttatcagtttgaagatcctcaggactttgcagcagtcatcggtgtccgctaccgtctgcttccttatctctacagcgagtatatgaaagctgcacttggcgatgacctttatttcaagccactggcattcacttatccggatgatgccgtagcaagacagatcgaagatcagcttatgcttggaaacgagattatgatcgctccggtttacacccagaatgctgccggtcgcccggtctatctgccggaagaaatgatttttgtcaaattccttgcagatggcactattttacaagaaaagtgggaaaagggctggcattttgcagaagttgccttgaatgaagttccgctttttatccgcaaagatcacaagatcccggtggtcgatgtggcagaatatgtagatgccatcgatatgacaacactgcaatatatcggatatacagatgccgattacgaactttacaccgatgatggtatcacaccaatcgcataaaaaagaatgtgccttggcaccataaaggacagcgtttttgcgctgtcctttttaatacgcatttttcaacatttccacatcatatccggtttcccagaatgtctgaaggtgaggactttttttctgatattccttcggggtcatatgcatcattttctgaaaaacccggtaaattttgtttgcatttcttctatgcttttatatctatctgccttccatctgcataacgcagcgtaaccgctggatattcatcactgttttcatgtaataaatccaacatgccatcatgccccggataaatatatctggcattctccttgatccgttgtatggatctcctgctttgctccaaattctggctcatcaagggaatattcttccataattcatagcggtttttcatggcatccgagcataaaatcgtctccgctccacagcgcagaccgataagccccggtgtgtgtcccggcaattccatgacagacacctcctctgagatgatatctccttcttttacaaaacgcagatttcctcttttctccaaatacgccagtgtctggatgctatgccattcatccggcgtttgatttgcactctcccactcagtctcactaagcagaatttgtgcattggaaaacagcggcaggttcccaacatgatcaaaatgcagatgactgatgaccacatgcgtgatatcttccggcttcatccctgccttttccaatgcttcttttaattgcaaaacgcatccttttgatccgcagtcatacagtatgtttttctcgtcatcacacgctatcagaacaaccgtactgtaaccgacaattccatattcggtcataaaaggcttaccttccaataagggctttactttcatcttgtcaccccctatccgatcaaagcaacccagaagtcattgacattcgttccggtaggtcctgtcattaccaaaccgtcaatggcctgtagtccgtgatagcaatcattatcctgtaaaatcttttcgtaagacaatcctgcgttctttaaggcttcataagaatctccatccacatagccgcctgctgcatctgtcggaccatccgttccgtcggagcctacagaaaagattgccatattctgctgtccggcgataactttcatcgctgaaaaagcaagttcctgattccgcccaccttttcctttgccacgcaaatgtacgacagtctctcctccggcaatcagtgccatctttttcttccccgcatcgtcatgttccctcagacacaactgcgccagattccagccaacctctcttgcctctgccgtcacatcttccgctaagattctcggctcataccccagttctttacaggctttgtatgccgccttgcataactgtcgtacactgccaataatctgtgtgtggacattacgaagttctttgggcgtttcatctttcaggcacctctctgcctccgcgctcagtcgcaatttgtatttttttgcaatctttcctgcatctgcacaactagacgcatccggatatgcaggtccggatgcaatcatatccattgggtctcccacaatatccgatagaacaacagtttctaccatggccggcatacaagccagcgcaaacctgccaccttttacctccgaaagacgttttcgaattgtattcatctctacgatgtcagccccactggcaagcaactgctctgtgatatccgataattctttctttgagattctgggtttttcaaacagggcgctgccaccgcctgaaaccagaaataataccatgtcttcctctgtcagatcttttaccatggaaagaacctcttgcgttcctttaaaactattttcatccggtaccggatgtcctgcctccacacagtggatacgtggtaactgccccataacatgatgatattttgttataacaatacccttttcatacttgattccattttcctgcaaataggaaaccgcagcattcgccatctgccatcctgctttcccgatcgccacaatataaacatgctctgagaacacaatgttactcagagcacgtcttactgccgcatcaggttgaacggatgctatcgcctcgtctatgatctgtttcgcatcctttcttaactcctgattcattctttatatctcctatctaccaatccgaatatctgtcaggtattcataatactgcacaattgcactatgatccttctgtccgccctcatgattatgcatccactgcataatttcctgcacttcagcggtcatcggtagcggagcgcccacagtatgtgcacaatccagagcattattaagatctttgatatgcagatcaatcttaaatcccggcttatcgtttccggcaatcatcataggcgcttttgcatccatgacggttgaaccagccaaaccaccacgaattgcctgaaaaacaagttccggatcaacccctgccttttgtgccagtgtaagagcctctgacagtgcctgtatattgcaagcaacaataatctggtttgccaatttggtggtatttccggcaccaacctctccacatcttaccacggatgatcccatggtttcaagcagcggacgataagtctccaccagttcttcttttccgccaaccataaaactcagacttccgtcgattgcctttggttcaccaccggaaaccggtgcgtctaacatatcaatattctttttcgccaacactgctgcaatttctttgcttgcaaccggattgatagaactcatgtcaataaacatactaccttcctgcatataagcagcaacaccattctctcccagcataacttctttcacttgcggagagtttggcagcatggtcatgacaacatcacactgtctgccgatttcctcataagtagcagattttgcaccacaggcttccatttcatccaagacatcctgatgtctgccgttcactaagacatccgtatatccacccttaatgatatttttcaccatgggttttcccataattccaagaccaataaatcctattttcatttcattcacctcaagcacttctatttattttctcttttgcttcttcatttcagcaatgttctcctgaatctcagccatgcggtcataatccaattcatagaacttcatggcaatgatattacacagccatccgagaattggaaacccatacgttagaataaccgttacccagaagattggccaggttgccgcatctcccatctgcggcattaccgtcttatatccgattgctgcaaccgcaactgctgcaatcgtagagccaaaggaggcaattattttttctgtcagagaataaaccgcaccaacggttcccggcatatagtttccggaacgctccaattcatagtcaataacgtctgctcgcatcattccttctgcaacatttaagatcatcttggatgcattaacacccatggtaaataccacatagaccatcatgactacgccaccttttccgatctgcgccatacctgttggtccaaggtataacaaaaaggcaaagattgctatattgataaagatattaacagcagaccataccttagttgcaacctttactcctttcttggcaatataaacaccacccagaaatacaaagacaaaactaataatcgtacccgcattcgtaatcattgtcgccgccttatagttggcaatcaaaataccatttaacatggtaagcacaatcgtctgggttgcgctgttagatgcgattttatctgtaatacctgtcaccagataacaacgcataggaacattttctttaaagatgtttacgatttccttaatacctaccttggtctgcttgccacccatggcaaccatttctcccaggatttccggtgtgtcgattctgtgcagaccaataaaagaaaacattacgaagataaaagccgtaatgataaagataacacatgcctcactcagactctccacattatattggttgtcatactttggcaaaactgcaaatgccagaatggtattgacaagaattggtccaatgtactgataaaccgtggtaacaaaggtaacaaacggacgctgctttggatcattggtcagtgcagaactgatggtagatgctccaccaatagacatgatcgtgtagccgataacaaacaaagcatacaccagacaaaacacaacaattcccgcaacgccactaaattttcctgccagaatacggaacatcaaaagtgccgcaatagaacaggtcgcccagccaatcaacagaaagagtcgaatctttccaatatgtttaaacaccggcagacggtcataaatcacagcgacaataggatctgtcacaccgtcaaaaattgtcttggcctgaatgataataccggttactgtgaccgcaataccaaatccggcattcattgcataagaagcatacatcataaggacataaaatgccattttcgctgcactggttcctcctgcaaatatcatttcccatggttttgccgtacgatatttgggatcgttactaccaaacattccagcaaatattttctttaaattcataaaaacctcctttaataaatacgaattgcctcatatccatgcaggcaatccagttttatccccttatctgtccgtattacatgaccgccatttaaggcatccatgtttttatccgcaccgcatgctatctcaataaaaatatcgcggattggtaaaggctcacaataagtataattagcaaaagcccccgataaattgataagatgtatcacctttccggcttcgccttcggtcactgccaactcacacataggtgtcaatgtcggagcgatgctcttgacacctgcaagactgcaaacaatatcttttaagaaatcataagaattgtcatagccaaattcgtaataaaaagcagctatgcgaaatggaatatataggctttttccacttccataaaccatctcatacagccccgctgtctctgtcatctctgtggaatagcagatctccggtggtccaaagggctgatcgggaaccatacgcaggtatgtttttgcctcttttctacgtgtgcctgtcacaaccaaatctcctggcacaatgcaatccacgcccgattccttacaggacacccacgcttctttctctgcatctgaaaattgaaaaattgctgagcgcacctgctttttttctgtaatttcatccatacccagacactgtaatcccatatgttttcttggttgccgtctctcatcactcatagatgagcatccatctgcgatcaatgttccacccttttccacaaaagaatccagcatcctgcactgtgtatccgacatcgacacgacatcagccagaataaccgcatcatatcgctttagcaaaggcgcagatacttccccaatcttttgttcatcaaacggaatgtgcaactgcgtcaatacctgtacccagccatctgcctccggatcatttcttcccatcagaggcttttctatcagtaacactcgcgctgctgattgctgcccccgaaaaagttcttcatgtcgcgcgaaaaaatcgaacgctttctgcgaggcttttatgcctgactgatctgcactttttcccaaggttccaagcaaataaaggctggtacttcctgcatataccagattctgccattgacgtatttccagaagtcctttggatatgctgctgtgccggtatcgaaaagccatataaacggcggatgcatcgtccacaaccttgtcatgtaaaggtcctgctattcttctcgcattgaccgatgcatcataaacccatgcgtgatggttgacatcctgattgcactctgtccgaaaataatcaaacccattgatagcactattctcattgattcccttcacaacttcgtacatcctctgtttttgttttttgctacatgcaccaataaaggccatatagcgtccaaaagccggatctttgggattcaggctatccggtatctccattccggtctgctcttgaaacaatcgtctgcaattcttgcaatgacatggctcatgaacctgtaattcatagtccacaacaaaggtagaactcatattgcaaaacaaaccatcaaagtcatattttgaaaaaagttctcgcaggatatcatatacatacctctgttgataatctccattgatgcaagtctgcacataaccattgtatatcagcggctgtcccgaactctggcgatatgcccactccggatgttcctcatacaaggtttcatgcacttttgaaaaatcacagcgggcaatcacccggataccggccttatgacattcacgaagtatatcagccaaagtatctcccgtcagataatcactctgcttctgttgcgcgacttccgtcggataacttgcaataataccagcagcatttaacgtcacaaccgttgcatgatattgtttcaactcatctacataagattttgcatccatatctgccatatcaatctcacgtaaattggtctgcaccatacgccatggaaaagtttcccaccatctggtgtcgctcatgttccttcacctcctcctttgaagttgctcccattataaaaacgtgttatgatcttgtatatatctgttttctgttttttatatctgttttctccctttctatattttgtatcgtttctggatatattttaactattttaagtataaacaaatctcaggtggcttgtataataaagtcacatccattccaaaacgtttgtaactgaaaggagattaaactaatgaatgagatcagaaaagtagtatctacattgtggtacgacaaagataactaccacaccttgcgtaatgtatttccaaacgcagaatttatatatgtagacttttatgacaaagaaaaattggagaaggaagcaaaagacgcagacgttgctcttgtactgggcgatgtcccggattgcctgctaggagaaaactctctaaaatggattgcctgcgaccatgccggactgaatggttctgcacacccggaggtttttgaaaaaaatatttttgtgacaggtgccgccggaagaagtgcccctgttctggcagaacactgcatctattttatgctgcaatcctgctatcacaccaaagaacttttggctgcccaggaaaaaggtcaatggggtgttgacgggtcgaacaactggcgtggactttacggaagaaaagttgctatactgggaatgggtaataacggccgtatgcttgctgaccgcctgcaagcctttggcatggaaatctatgcctatgacaaatatccaatcaaagattatgattacattcctcacaaatactgcggtctgaatggcgacaccttagatcctattttagccgaatgtgacttcatcgttctgacactggctctaaccgatgaaacttatcatatgtttgatactgaagcattccgtaaaatgaagtccaatgccgtcctcatcaatatggcacgtggtggcatcgtggatactgctgccttgacacaggctctagaagacggagcgattggcggtgccgggctcgatgtaatagaagaagaaccattcccatccgaccaccctctttggagaatgccaaatgtctatatcacaccacatatgacgcctcaggttcccaaccgcgctggccgaagcattgagatcatccgagaaaacgcacgtcgctttgtagcaggagaaccaatgttaaatctcttaaaaccaaccgataccttccaaagcggaaatggcaatagcggctgggcaagactaacacaatccaacctatccaaagaagatattgccaaaattcctctggaaaaattcttagggaaacgtggttggacagatcctagtgaatggaattatctagactaaaagaaaggaagatatcatccatggaagaattgaattcattgacaaaacctactttgaccgatgtggatattcaaaaccgcctctcactgctgttggagtttctccaatgtaatgaggtcttgtatctttggcagtatgataccgaaggcaattgtctttggaccaattcttctcttcctatttatgataccatgctccgccatgccaaagacttcgatgaaatcatcgcttttggtcaggagcatgatacccctctaatgatcacgtcactcaccggaatgatgtggtctgttgtttatcaaaaggatatcgctcatcaactaagccgcattcatatcattggtccggtctttacagccatgctctccgacgatacgattgccctattgcaaaagcgccccgatatacgagaacactggaaggtcaaattatacgattatctgcgtcaggttcctgttgttacaacaacaaattttatcaaatacacacttatgcttcactttagcataaacaacgaacatttgaagccatccgacatcacctatgccgactttaactatgattcttttgcagatagatcgacgaaatcggtagattatgcttcctattgggctagagaaaatgtcatgctcgatatcatacgaacgggcgatatctatcgcaaatcatcacttggtccggcgtctgcacaccttagcaatatgcagccacacaatatccaggagttggaacgtacccgtcaatacaccatcatatttatcggtctgtgtatccgcgctgcgattgatggtggcgtatctccggatacggcattttcccgcggcaatatttatttaaacaacctatctcatgccaaatcctatggtgatatcacagcgtctgcccagttggcctttgatgattttctctttctggttcacaaccatctgcacttaaatcaatattctgaaaatatcaaagcctgcatcgactacatcgaacttcatacagacgatgacctaaatattcctctgttggctgaaaaaatcggttatagcgattactatctgtcaaagaaattcaaaaaagaagtaggcgtcaatatcaacgcctacatcaaaaaagcccgggtgcaaaaagccgcctatttacttgtttcttccaaaatgagtattcaggagatttctgatatgctccactttggcaatcgtaatttcttttgccgtgcctttaaggaagaaatgcacacaacaccagcggctttccgcaccagccatcaaaaatattagacacttatcctacgatcacgcggctctctgcatgacctagtccttctgcctccacatgtacacctgcctctccggcttctgtaccggcacgaaggatgacctgccatctaccctcaaaggatgtaaattctcccttggtgtaattttcctcggtctgtcctctgcctgttccaaaacctgccagacttgcagcaccttctactgaaacctttgctagcgtatcctcagctgtcggtacccagttaccttctgcatctacgatttcgacgatgccataagcaagactttctccatctgcagcaatctgattcttttccatagtgatcttaagtccaaccggctctcccaccgtttttacttcatcacgggatacttcctgtccatcctgataactgatcgctgtcagagtgcctgcctcatatgtcacttcaaattctgccttgaaatggcattctgcccccgctggttttttgccaagagacttgccgtttaacagaagttccacttcctcagcacggctgtatacgtctacgcttactgctgtcccattttcacaattccaagaccagtggtttccgccttctgcccatccataacggccgatcagggcgatctttccattgtttttcggatcttttgcaaaaatataagtatcgtttgcaccccagatgatctgatgatatcttccctgggctctgacatttccgcaaaggtcaaagtctcctgcctgtgccagacgccaaggataagctgcgtagtttaacattcgagacatctgtggcacttcttcttcgctacaataaatgctctttccaatacctgcttctccaatgtaatccatgcttgtccagaggaaatctccgatcacatacggaaggcgctctacatctgaccaataatcttcaaattgccccggcttgctctctgtacaaagaatcacacgatccgggaaaagttcatggctagtctcataatgatagttcaggtaattgtaaccgaccacatcccaatctttaacaaatggggcagtatattccatccagatcttcttgccgtaagaattatccatatttatgacagaaccaccttgcggcatctctttgtggaaagtctgccaaaaagctgcattgtcctcattatccaagcctttaaagaaagaacaaagtgctccgctgaccagtcttgtgctgtccatatttcgcactgtttttgccagcatagcagaaacctcatatcctgcagccataccgccctgttcggtcaactcattaccaatggaccagaagaaaatagacggatgattgcggtcgcgtcttaccatagcctcgatttctttgataccatcctctgcaaactgatgactgaaatcgaaactattcttaggcagattccaaacatcaaaggcttcatcaaaaacaatcattcccagttcatcacagatatctaagatctgctctgattgcggattgtgcgccagacgaagagcattgtatccattatccttatgcagttttaccttgcggtactcggcatcgtaaaaacttgccgcacccagaattccattgtcatgatggatacatccacctttcaacttgatggattttccatttaaaaggagtccatttttagcatctgctgtgatggtacgaacaccaaagcttgtcgtaatctcatcctcgtaatcggtctgtgccatcaaatcctggcggttgtccagagacatatgaacattaccagttgatgtaagactcaactgtgccttcacttcgtaaagataaggattctcggtatcccaaagttctgcattttcaataacaaaagcctgtggcaccacctgtctttttcctgctgtaagacggatcttctgataacgcgtagccacaacttctttggtatcttttttgcttactgtgagtttcaaaaagccttccgcatctccggttgcctttgccagatcattgaccacagtaatttccgccttgcaaaaagcatccccatttgtaatatgatcggtatatacaaaaatcccatcatgcgcaatgtgaaatgccggtgcacttaagaggttgacaccacgatacattccggcgcccgaataccatcgtccgtttggatcatcatcggtatgaacggttacctgaatctcgttgtctcctaccttcaaaaacttgcggatatccatggtaaatggcgtataaccataggcatgactgccgaccggattgccattgatgagaactcttgtctttccaaaacatccttcaaaatgtaaaagcatggtatccgtcatttcttcttctgtcagcgtaatggtctttaagtaagttcccgcacttcccttataaaatccgctctcagccttccccggagcatccggcgttacatctgtttccaccatgaaatcatgtggcagattgacttcctttgtctgctgcggcatcatagggatacttgacttttcccctgccataaacacccagccacgattcaaacttgtttttttcataccaacctcctatgctatacattataatcttacttgtatgattacatttttatatatgttatcatagccggttatgcagatttctttaatacaaaaattcgtttttttatgtataaattagtaagaaagaatgtgccttttttataatacagctcatcaaaaatcctgcttttgttttcttggaataaaagcatagattttcgaatgataaattgaatctatagaaatatgaacctcgctcatataaagatcacaccagaaacaaatatgctttgctagattataacatctggcaaagcatatttgtaagaacttttttcaattgtgacacgttccgttatgatagtacgggcaacaggacttgaacctgcacggtctcccactagaacctaaatctagcgcgtctgccaatttcgccatgcccgcacgtataactgcgtttcacagttacttagaaagattaccacattaccaatcgattttcaagtctagctttcctaacgataggatgtcgtatcaatcaattttccaacgaccagaaaacgccggtcactctgactgccaatgcaggtagaaagaaccagaagtttgtcatctgccgttacttccacaccttttctgacatgggtaatacttcgcccttcttctgcacatgatttcagtgaatcgagaaactgctgtacaccatctgttgatttcaaatcaaacattgccggaatataattatcattgtaattgtagacgccaaaaatctgataggtataaagcgcctccggggtctcaaatgtcatagtctcattcttctcaaaaaaatcagcatcatcaaacaaatgcaaggatccaaacatcgtatccgcgcgcatatcatgcccatatagaatcgtaatggcatccgacatgtccttgctgttgcaggcattgctgtaaatggctcccgccgtagtctcgacgtggttcatgtcatgactcagataataattatcttcttctgtctgcaagaccggataatccacaatggtattcgccacgttgatccagccgtacacgtccgcattttgctcctgcaaagatgcaaaatcatggataggcgatgcctccgctaccggttcttccgtcttttcctgcttttgccgcatcttggcatattccgcctctgcaaaatcattttgatgctgctgataaatatatatccccagacaaagggctgccgccagtacgatcaccgcactgatcaggcgaagtagtcgctcatgcttgtcctgatctcttttgttccttttcatcctatctgctctcctataacactaactatctactattatgatggtaagaggcagattttgcaagtaaagaccgaggcacgtccaaatgggacactccttatggcaaaaggaacgtccctaatgtcctcaactttgtatccagccatctcttttccaccctcatgcctatgctgacggaagagatccagtccaacttagagggcagtctggctgtttttgaagaaaaaaacggtgcactgcccgtgcaccgttacgtgatttctaattattgcgctggtggaatcatccaactttgcaaatcctggttcctacatccggagaccatgagcaaggaagatctctttgcccagtatcatactatgatctccttattctttgctacaatttctccagaactgtcttagcctctgtaagatagtcattctccactgcaaagatctgacctgcatcggctgccttggcaaatttctgatccatcggaagtttgccgaggacggaaatgcctaattcttttgccacatcttcaatgtgactgtcaccataaatatggatctcctcgtcacaattcggacatttcacataagaatagttttctaccacaccgagtaccggcacgtccatcatgcctgccatattgaaggccttcttgacgatcatctgtaccagttcctgcggagaggtcacgataataatgccgtcaaccggaagtgactggaataccgtaagcggaacatcaccagttcctggcggcatatctacaaagagataatccacatcgccccactggacatctgtccagaactgcttgactgctcccgcaataacaggccctctccagattactggctgttcctcgtcctctaagagtaagttgatggacatgatcttggtgccatcttctgcctcgatcgggaaagtaccattgtcatccccgactgccggaccatgcacaccaaacattttgggaatggacggacctgtaatatcggcatccagaatacctaccttataaccagcctttgccatcatggaagccacagatgaagtcacaaaggacttacctacgccgcccttaccgctgacaataccgatcacatgcttgatatgtgcatttggattggctgcctcctgaaatgatgtttttttgtttgcagatgcgcagcctgcgcaactttccttggaacaagaggatgcactggagcatccctgcttttcttctgccattttatctattctcctttctgttcttttgatccataatttcttttaatgactcctgatatggtgctcttgcaataccatactcggtaataattcccgcgatcagatcgtggtcggtaacgtcaaatgcaggattaaagactttgacaccttccggcgccatgcgcttttcataccacatctgtgttacttcctccggctttctttcctcgatcacaatgtcatccccggtcggtgttgccatgtcgatcgtagacgtcggtgcacagatataaaccggaacaccatagagttttgccactgcggctacgaccgaagtaccgatcttattggcggtatcgccattggctgccacacggtcacatccgacaaagacggcattgacccagccgtttttcatgaccatggctgacatattatcgcagatcagggtcgtatccacgccggattcctgcaattcaaatgcggtcagacgcgctccctgtaagagaggtcttgtctcatcacaaaagacacgcagatgataatcgtgttcctctgccagatagatcggtgctgtcgccgtaccaaaacggacggttgcaagtttgcctgcattgcaatgggtcaaaacaccatcgccgggcttcagcagttccatgccatattcaccgatcttgtgacatacggcaatgtcctcgtcacgaatgaccattgcctcctgatgcaatgcctcaacgatggcaggaatatcctcatttgcatgggctgtcaccacaccttccatacgctttagtgcccaggatagattgactgctgtcggtctggatgaatcaagatattccttgtcccgacaaaatgcagcataaaatgcatcatagtcatccacctcataacgcgacgctaagacatacataccaatggctgccgcaacaccgatcgccggtgcccctctgacctgtaaaagataaatagcatcccagatctcctttgcctttgtcagcgaaagcctctggatctgccccggcaacttggtctgatcaatgatcacgagagccttgtttgcctcatccaatgagactgtatcgatttctgtaattttaccacccatctcatttatccccctattattatcaacacctatattgtactgaatttacccgaaatatacaaatgtgttcctcggaaagtgcaaagccgggtaagtgtgcacgggcaggcggagacagtggggcaggggcatcgggacagggcaccgacaaaagtcgcgaaattctgtgtttcacaaaaaaggcggtctgtttttgtttatatgatttgtctttgcaaagttagacagccggctaggataatgttcgtctgcgacagatatgaatgcatagcgtattagagatgcttagaacttgttatcaccatgtgacgagggtacatggacgtacccgagaggagcaaccaaacaggacgtttgtttgctccggttactacattttttataggactaatcacaagttcttagcatctcttatatgcggcgcccctgaatatctgtcgcaggcggacatatccggccgactgtccgcgcacaccttctccgacgcaaaaacgagccgatcgcatgatcgactcgtcttttgaaaataagaaatgatgggaaagcaattattatgctaactcagcctttaaagcctctgtcagcgctggtacgatcttcttgagatcaccgacaataccatagtcagcaacatcaaagatcggtgcatctgcatccttattgattgcaataatgatgtcagattcttccatgccggcaacatgctggattgctccggaaataccgattgcgaaatatacattcggacgaactgtctttcctgtctgtcctacctgataatcctgtgccaaccagccattttcaacaacagcacgtgagcaggataccataccaccaagaacatctgccagatcctttaacatctggaagttctcagcactgccaacaccacgtccgccggatactaagatcttggcatccatgatattttcaacggttccaactgcctttacgatatcctggatctcaacatacttgttgttcttggtaaatccagggttgtaattgataacttctgcctttgcacccttgatcggctcgatcttctgcataacaccaggacgaacggttgccatctgtggacgattgtccgggcaggcgatcgttgcgatcgtatttccaccaaatgcaggtcttgtcataagtaactgaccatgcttttgtgtatcctcttttccttccggaacagaaagtgggaagtcaccgatctcaagcatggtacagtctgcggtaagacctgtctttactcttgctgaaacggtaggtcccagatcacgtccgatggcagttgctccaaccaacatgatctccggcttatactcattgataacagaagcaagtgcatgtgcatatggttctgttctgtatgtttcaagttccggatcatctacaacgattaccttgtctgcaccatactcagccaaagaatcaacgagatttcctacattgtgtcccaaaagaactgccgttacatctgttccaagatcagcagccagttcttttgcctttccgatcaattcaaaggcaatggaactaatttcattatctacctgttgtgcgtaaataaatacgcccttatattcttctaatgccattttattcaccgttttccttccaaattagattacatgtttctcttttaatttgtccatgatataagatacggattcagatggatctaatgtaactttctcacctgcgcccttgcgtaccttgtcagatgccttagcgatcttggtaggtgatccctttaatccaaggtcagaatcatcaacatcctttaagtctgcacgtccccatacggtaacttctttgtcataggcatcgaagattccgccaggagtcatatatcttggtgtatttaattcagaaagagcggttaccagacatggcatctgtgcctttaagatatggtatctgtcttcatactgacgcttaacaataacagagtctccttctaccttgatatcttctgcataggagataaccgggattcccaagtgctctgcaatctgtggtccaacctgtgcagtatcaccatcgattgcctgacgacctgtgatgataagatcatagtcaatgtttctcagtgcaccggcaatggttgtagatgtagcccatgtatcggctccaccaagtactctgtctgtaacaaggatcgcattgtctgctcccatagccaatgcctcacgaagtacgtcatctgcctttggaagacccatggtaagaacggtaacttctgcaccgatctcgtctttgattcgaagtgctgcctctaagccggctttgtcatccgggttcataatggcaagcattgctgctctatcaagtgttccgtccgggttgaactttacgccgccctttgtatcaggaacctgtttaatacatactacgattttcatgtattcatttcctcctatttctatttcagtaatgcaccagagataaccatacgctgaacttctgaagttccttcatagatctcagtgatcttggcatctctcatcatacgctctacatcatattcacggatataaccatatccaccaaagagttgaacaacctcggttgtaacagccattgctgtttcagcagcaaaaagttttgccttagcagcctctacagagtaaaccttctggtttgcctttgccatagcggctctgtaaaccaaaaactgtgcagcctcaacacgggtagccatatctgccagtttgaactgtgtattctgctgctgggcgatagaacgaccaaactgctttctttcctttgtataagcgatcgcacgatccaatgcgccctctgcaataccaagagcctgtgcggcgataccgatacgtccgccatccagagtatgcatagcgatcgggaagcccttgccttccggtccaagtaatgcgtcctttggaattctgcaatcttcaaagatcaattcatatgtagatgaaccgcggatacccatcttcttttcctttgttccgaaggagaatccaggtgctcccttttctacgataaatgcagagaagttctttttctttctgcctctcttgtcttctgtcacacttgtgatagcgataacaatgtaaacgtctgcgactttaccatttgtgataaagcacttagatccgtttaatacccactcatcgccatcaagaacagcctttgtctgtgccccctgtgcatctgtaccggcacccggctctgtaagagcaaatgcaccaagtttctcaccggttgccaaaggctttacatatttctgcttctgttcttcggttccgtatgtcatgatcgggtcgatacaaagtgatgtatgtgcagaaacgataacacctgtggttgcacatacctttgacaattcctctacacacataacataggtcaaaggatcacatccctgtccgccgtattcctttggtaccgggattcccataaatccactctttgccatctttgcaacagtttcagcagggaactgctctgtctcgtcaacttcctgtgcaagaggctttacttctgtctcagcgaactctttaaataaagtacgcgccatttcatgtttcttatctaaaccgaaatccatgatcatcattcctccgtctttcataaataatattcgatgatgtgccccgcctgcatggacggggctttaaaatcctaatcttactgtgcgtctaccggtgtcttggtacggtctgcattgtaaacatagaagcctttaccactctttacacctaagtttccaccacgaaccatcttgcggatgagtgggcatgcacgatacttactgtcgcctgtttccttataaagaacatccatgatagcaaggcagatatccaaaccaatgaaatcacccaactccaaaggacccattggatgatttgcaccaagtttcatagcagtatcgatacctgcgatatcagatacaccttccatcttgataaatgctgcttcgttgatcattgggatcaggatacggtttacaacgaatcctgctgcttcatttacctgaacaggagtcttgccgatctcctctgcgatcttcttgatggcatctacagtctcagccggtgtgttcacacctgcgataacctcgatcagtttcatacggtctgccgggttgaagaaatgcataccaaccataggacgggtcagaccattgccgatctctgtgatagaaagactggatgtgtttgatgcaaagatacattccggctttgcgatcttatccaactctgcaaatgttgtcttcttaacacccatatcttcaaaagcagcctcaacgatgaggtcacaatctttgcaaaggtcttcctttaatccaggagtgatcttagcaaggatagcatctacggcttcctgtgttaattttcctttttctaccagacgggcatagcctttttcgatcttagcctttccgctttcagcccattcctgcttgatatcgcaaagtgcgacttcatatccatcgacctgggcaaatgcctttgcaatgccctgtcccattgttcctgctccaataacaccaaccttcatgttagcacctccgtaaaatatacttttaaaaatttttattcatatttttcaacgattgttgagcagcccatgccaccaccgatacaaagtgtagcaagacctctcttagaatctctcttttgcatttcatgtaataatgtaacaaggatacggcagccggatgctccaaccggatgtcccagtgcgatcgcaccaccgtttacatttaccttgctcatatcaaagttcagatctcttgcaactgcgattgactgtgctgcaaatgcttcgtttgcttcgatcagatccatatcatcaatggtaagtcctgtcttagcaagaactttcttcgtagaagcaacagggccaacacccatgatctccggcgcaacaccgccaagtgctcctgcaacccacgtagccattggtgtaacaccaagttcttttgctttttcctcgctcataacaacgattgctgctgcaccatcgttgataccggaagcattacctgctgtaacaagtccgccttccttacctgagcagcaacgcaacttagaaagtgattccggtgttgtaccaggtcttggaccttcatccttaacgaaatcaaccatttccttcttaaccttaaccggtacaggaacgatctcgtcatcaaacttgccctctgcgatagccttttcacatttctgctggctgtttgctgagaatgcatcaagttcttctcttgtaatgccatatttatcacaaacgttctctgctgtgatcatcatatgataatgattgaatgcatctgtcaaagcatcatttaccatagtatcaatgatcgttgcattgttcatacgatatccgaaacgagcctttgtcatagcgtaaggagccattgacatattctccataccacctgctacaacgatatcagcctctcctgccatgatcatggttgctgcatcatttacacatttcagaccggatccgcaaacaacgttgatcgtgattgccggaacctcgatcggaagtcctgccttgatcgctgcctgacgtgctacgttctgcccctgtgcagcctggataacacatcccatcttaacttcgtctaccatctctggttttacacctgcacgatttaatgcttccttaataacaatagcaccaagatctgctgctggtgtgttgctgagtgctccccccatttttccgattgcagtacgacatgcacctgctaaaacgactttctttcccatgttctttctcctttttatttcttatttgctgcttctctttttttaccattcgttatttttttaacaagcgaaagtaaaaaaaagaaaacagcgtttccgcatgaacttatagtagcacaaaattattcttcatgcaagccaacttttttacacttgcggcttgcaaaataaaattgtcagaatattcacaagtttttcgccacatacttttttgacctgtttcttatctttgttaaaaaattatcaatatatgggggtttgccattttcattttctatcttagcgttggaatttcgccttataattgtgtcttattcaaacacaatttgcgtaattttcggaattatttttcttgcatctattacaaaaaaagagc

SEQ ID NO: 12504 - DNA, 9391 bp, Unknown
  gut microbiota DNA sequence
acatgcaccgtataatcaccggcatctaaaatatatgcctgttcaccgtcagcatcataagaagaacaatcccatatgtcaaaggttgccgtatagcgtgcacttgctcccggctccagaagatccgttttgacaaaagccaccaactgtgtcgccgctttttccacacctcctgcctgatatggcaggctgacatagatctggaccacatctttaccggcacgttctccgcaattcgtcaccgtcactgccacctgacagtcccttccgtttttatcaaagctgatatcgctccatgcaaattctgtataagaaagtccaaagccaaacggatactggaccggaaccccaaaggtctcaaaatagcgatagccgacataaatgccttcctcatactccacaaagttggctttctgatccgcataagtataatcgccaaaatttgctgtagatggatgatccgatacatgataggcgatcgtatcctgtagttttccggatggatttatttgccctgccaacatctgtgcgaccgattccatgcccgcttcaccgggtgtccatatgatcgcagccccctggatcgatgggtaattttctaaaaatcccatctccatcatatttgcaatattaaacaatacgatcacatgatcaaaagtctttgccactgtatcgatcagactgctttcctccgcgctcaactgcaattcttccagggtaaggtcatttccttcgctcccggatcttccgatcataaggatcgctgtatcggcatattcccttgcctgggtcatatccaactcgctgacaggcatttctttatgattgccgttctttccataccaagtctggtaagattgataaagggtatcattatatgtaatacctgctgcagaaagcgcatcataaaatccgatcatggtatccgacttgatcgatccggaaccggaactgccataatacggatcgatcgctgcgcttccaaagacactgacagcctgctctgctgcaagtggcagcaccccgtcttcatttttcaaaagaacgatgccctctgcttcgacctgctttgccacctgtaatgattccgctacgattgcggcatcaatgtcccctgtagacgcctcgaccaaagatgttcccaaagtcgtcactgtaagaataagggtcaataaaccagccagacatctgcttgctattcttcttttcataaaaaacctcttaactttcttttacatttccatctgctccttaatctctttttctgtgcaaagttcctgacaggtctttgccattttctctaattcgtctatcctgtgccttgccaattctgcttttactgcagccagcatggcagcattcatactgagttttcttgcgccaagtccgaccagaagtgccgcccccttgggatttcccgccatctcaccacatacagagatcggcttgtttgccttctgaaaactttcaaaaacaaagcccaagagccgaaccatcgccggtgcataagtctgatagtaaggctccatggcagcgttcatgcggtctgccgcacatacatactgggtcagatcattcgatccgatactggcaaaatccacctcctgcgcaacaagatctgcctgcaaagccagacttgggacttcgatcatgacaccgatcttaacctttggatcataggcaatcccctcctgcttcagtgcatccatgacctttcttaccgcttcctttgccttgcggatatcctccatactgcctaccatgggaaacatgatctgtaaatttccatagacagatgccctgagtgccgcacgcatttgcgtctcaaagatctccatgtgggaaaaacataaacgcagcgcccgctctcccagaaatggattatcctcttttggcagggaaaaatacggcagggtcttatcccctccgatatccagcgtccgcagggtcaccggcttgccttttgcaccttctaagatacgacggtagacactgaattgttcttcttccgtcggcatatggtcgttttccatatacagaaattccgtccgaaaaagaccgataaaatcatatgccgcccctgctgtatcgtacgcatccgatcctacattgatccccagcgcgatctttacctcatctttggttgctcccggacgaagcaaataggtctgctcctcctctatctgttttttccacaactgtcgcttttgttcatactgctctttttcttcttgggaaaaatccagccatatctgaccggtcagaccatccaggatcaggtcttgtccgtcctgaatctgcgtcatggcatcttctgctcccagtatcgccggaagtgaaaaacttctggctaagatcgcgcagtgcgaattggaaccacccacttccgtgatcagacctttgacatggtcgcgatccagattggcagtgtcgctcggcaaaaggtcatgcgccaccacgatcacatcctcgacaaaatgatccagtcttttttcctcttttcccagtaaaaggcgaagcactcttgccttaacatccaaaaaatctgccgccctgcctgcgatcaggggatcctctacctgctttaagagatcggcatactggttgaatattgtatcaactgcactttcagccgtcagacaatcctcttttatgacattctccgtctcctcggtcatttcttcatcttccaggacttcctgatgcgccacaaagatcttcgcctgatccgggtgttcctcctctaaggctgcataaagtgtctgcaattccgcctttgcctgttcccttgccgactgaaagcgccgacactcggcttctgtctcctccttgtcgcacttgcttttgctgaccttcagatccaatggttcatatctatatgcttttgcgatcgcaatccctttggatacggcattaccacataaaaacttctgtctctcgcccatagtcgctgtccccttattctccaaatccgctggcaaccagatctgccaaagcctcgatcgcttctgcctcatccggaccttctgctgcaagttccgcttttgttccctgcccgattccttctgccaaaagacgcacgaccgacttggcattgaccggctctccaccttccttacagatcgtgatcttagactcatatttttttgccagcatgacaaaatccgatgccggtcttgcatgaagtcctgtcttattgataaattccacttgttttgtaaccatatgatccaccctcttatttctataattcctcgccatggctggcaatacacttctgataccagtaaaaggaatccttctttatacgttttccggatcctttgccctcattatccagatctacatagataaaaccataacgttttttcatctctcctgtgctggcactgaccagatcgatacagccccatggcgtataaccgatcaggtccaccccgtctttcatggcttccttcatctgttcaatgtgtgccttgagatatgcgatgcggtaatcatcatggatacatccgtcctccgtcaactgatcgaccgctcccaagccattttctaccagcatgaccggaatctgatacctgtcataaatcgcattgagcagatagcgcagccccttggggtcgatgatccatccccattcgctggcctttaaatatggattttgcacgcccagcatcatattgccggcagtcttttgtacctcggcatttcttgtcacgcaacgcgaagtataataactgaaactgaaaaaatccacacagcccttttttaaaatgtcagcatcctctgtcttgccgacaatggcaatagcattttcttcaaaaaaacgctccatataataaggatatgccccgcggatgcagacatccccacagaaccagttgttttttttcatctgccactgtgcctctaacatatcatccggtgaacaggtatatggatagactcctgccgccgacaacatacagcccacccggtttttcggattgatctcatgggctaaggctaccgcctttgcgcttgccacaaactgatgatggagtgcctgaaaacgcgcctgcatttcttcctttgtctccggcgtctgcatacgaccaagcccaaacatatctgctccatcttctggcaaaattcctgctcccagcagggttccaaaacgactgactaaagtattcatctcattaaaggtcagccacagatcgacctcatcctgatactctgtaaaaaccgtccggcaataacgcaggaaaaagtctataactttacgattttgccaaccgccatatgcctgacacagatggtaaggcatttcataatgtgacagtgtcaccagcggacggatgttccattttttacactcagcaaatacggcgtggtaaaaatccaatcccttttggtttggcttttcctcatcccccataggaaagatgcgtgtccacgcaatagacagacgcagtacctgaaatcccatctgcccaaacagggcaatatcctctttataatgatggtaaaagtctatggcatgatggctgggatagtgttcgccttccctcacttctttggtaaatcgccgcggagacgtttttgtccccgcggtgatatggtctgagatcgactctcccttcccatcatccttccatgcaccttctacctgattggcagcgatcgcgccaccccataaaaagtctgcattcattaagccacctcttttgcttcctgctcctttgcgatcagatcgcgctcatataccttaaagaatggacgatataccacccatgccacgataaaggcaatgaccggaatcaggatattggtccaggataaggtacacaggtatggtgatacgccgaccggtaaggtcgctgtaatcatggtaaacgccggtttaaagaagccgaccatataaccaaagtagcaaatgatcatggtaatcaatgggttgatcacaaatggaatagcaagtgtcggattatacatgatcggataaccgaaagttgccggttcattgatattaaagatacccggtacaacagccgccttgctgactgctttgatctgctcagacttggagaagagacccatgacgcaaagtgccaaggtatttcccgttccgccacagcagttcatgataccaaacaaagcaaccggtacaaagacgagtgcttcacccttggatacatgctcagcattgttggctatgtactccatgagcggtgccataatggcgatataaacaaccatggttccatggataccaaaagtccagaggacatttgcaaccaatacgacaatgatgatacccggtacgctggtcagtgcgcccagcggtgcagataagagataagagatcgcgtatggcagagagatcgtcatgacattcaagcagatgcttccgatcgtatgccagatcgcgatgttgataaccagtggaatcaaagatgcaaaggtgtcctgcaaaaatttcggcacgacatccggcatcttgatcatcagatgatgcttttcacaaaaatgcgccatcttgacggtacagagcgaaatgatgatggctgtgaacatacccacagcacccaggcaggagttgtcaataccggtaaaactgcttccgtccgcaagttctaccgtcttgatcggtcctgcaacgatcaaaaagatcaacatggcatttaatgcgttggtcagtgcctgcatcttaagcgacttggcataagaataggcaatggtaaatgccatataaacagagatcagccccatagacagatcatatggtaccaataagatgttatagatcgcatcgtccgtcgtccacgccccaaagaaagtcgggatgattgcgatcaactggaaaatagcgccgatcaggatgatgcccattgccatcatcataccggcagatactgctgcgatcgctttgttacccgcacatttttcgcctatggattttactttttgcatgaatttgctttcatataaattactcatatccttctccttttcctttccctaaaaacccttaccggatgttactgtggatagatctcatccacttgtttcatgatgttgtctacattaccgatagcgtaatcataggctgcgatcacggcgatcggcatctgcgttacctgtgcaatctcctcctttttgtaagacacctgcggtcctaaaaggatcacatcataatttttgtaggaatcttcgtatgcggacatccccactgcgtcgatcttgagctcaatgcctttgtcctctgcatacttttccattttcttcatcagaatcccggttgacatgcccccagcgcatatcaataacactttcctttccatatgcccctccttatttttccttgtataaaaggatcatttccttgatgagatcccccgctaatgcgcttcccatcagatgatcctgtgcatggcaaagcagaatgctgacgctgtccacttgaccttttgcatccatctgcaagagtttccggtgcgcctcatgggctgtctgtaaactcttttccgcgctttccatcagttgatccgcctgtgcaaaatccttctttttggcagcctgtaaggcttcaaatgccgccgatctggctgctccggaattagcaatgatcaacatggaaatctcttccaatgcttcctgtaattcttcgctcatagtaacctcctttgttttatatctgatatatgatcatcagcatatttgccacctcgtcgtcgctaaagataatgtgaaaggctttttccatcggtcttagcatccgaagcagctgctgaaattctttgtgatattgatgcaggattgccttgcgctttggattttcgggtaaagtctccccggatgccaagcgctcaatacaacaggcagtatgaaccaatagtcccatctgtgcatcctgcgtcatatgttttaatttctgattgacctcctgtaaaaatgcttctaccgatgactctaccttttttatctccacatggctaaactgcccggcaagataatgaaagacttcctgatgatcgacctcataatccttggactcggtctttcgcaaaagttccggcaaacgttctttgggtgtcgtaaaaacctccgtgatcgagcagaaaggaatggaatataactttggatcaaaggttcctaccacacaaagtatggttccacgccgcatcaggtcacgaaatgcctcctgcaaagccttgggatcactcatggataaaggaatgatctgcacatcctccatgtgaccgtagcgctcaatataggtctttaattcctccgcgccacccttgcccgtagtacataaagtgatgagatacttctcatggctggtggcaaaatcaccgacgcttttcatgacatcccgataaacggcatccaggttggatgagatcattgcctttctcgccagttcgatccccatggtcgtcaccggtgccgggaaaagacggatcataatacctgtctccgcagagatctcctctgccactttggacaccagatcactgtcatagactatgaacacaccttgtttttgctcaatctccaaaatacattttttcaaagactcatagatctgcgtctcgctttgacggtgcgatacctcaaaggaaaaaatatggttaaatcctgtgatctcggtgatcgtacgcacaatggatgctgcaatgtccttgccataaaaggcgtagaggataaccatctgtcccttgtccgtctgctttggcggttcgtagcacaaaaacatggtgatcaaaataacctcgtctatggtcagttgtctgccatagacttcctgtatctcctccgcaaaggcaaggcttagcatatattcctgcttgtatttggtaacgacctcagatatttcaagccgatccatggactctgtcgtctttgtaccattcactacatttttcatatgcagacaaagtccaaaaaatacggcatcgtcgatctttttgttccttgcgttctccacttttgccagaaatctctccaccatgtcgatcagttcctcatctacaatgagttccaattctttccggctgcggacttcatggatcagtttttgctgatatttgccaaaggctctttccacttcggtgctgagcagcatcttgatatcctcatcctcaatgccctccgactccagttgctttgccttttgccgcaattccttgtaaatatttttggtctctgtctcactgacacgcatccgactgccgtcaaaggtaaaggtgctgttttccgggatcagtctttcgatctcctccctcatctgtccgaaacgggacattccctgacgtatggtcggttcaaagtcgctgacatagagggtgatcctccggtcatttgccagttccctcacataagcattggcacaaccaatcttgatatcccgcttcaactgttgaaaattttcaggacattcatataaaagcaggcagcgcatcaattcttcctttacgaccagttccctgcctacccgcgaggcttcggtcgaaaaaagtgtctggatcatttccatacgttcttcgatcggtcgttctgtgatcctcggcattgtaataacgattggaaattcactctgaaactcctcctgtgccggctgtgcatccggtatgcaactggcgatcaaaagccctttccttccgggctttccgctgtaggaggcgatctcccgcaagagtccaccgtccagatactgcacattatccatgtataagataccgctctccgcatcctttaacatgccactctgccgctcgcccatgagtttttccctggcatctttggcactgccctgatagtccctgcaattcatctgtaagaaaggactctccgctgaaaaaatttgttttaccagacaatattcgtagataaggtgtgcgaactctttctttccggttcccttttctcccacgatcaggatattcaggcttctgcccggatataagactgctgctttggctaactggatcggatgctgtaaactgccctgccatcctgtcatcttgcaaaaacattcttcctcatccccccggctgacaccggcaatggaataaagaactggtctgccattggatttatgtatccttccctcttccacgagagcattcaaaagactgctgacattggttcgctgtaaagatagcgcctgtgcgatatatgtcgttgacacacctccctctttttctgccgtatcatgcatctgaataaagtcatagatcttttctttgtttgatttcataagcggatctcctctgccggttttgttactgtatatacaagaagaactatacactttatacaataagaaatctaccacgacctgtttttatcgtcaaaacgcttagtgtatggtatttttcctgtaatttatatacataaatat

SEQ ID NO: 12505 - DNA, 1468 bp, Unknown
  gut microbiota DNA sequence
ccaaggaaaaaatcggtcttagaggacctatgccgccgggagtgttatttgccgtatatgactctaagacaggacggccggattatattcccccggaatattgtgatattccagatctgttggacgaattggtaacgtatgtaaatacgacagacgatcatccactaatcgtagctgcagtggtacattaccaattagtaaccatacatccttttgaagacggcaatggcagaaccgcaagattgctttccggttacattatggatttaaacggatacggatttaacggaatcgggtcgttggaagaatattttgcctatgatatcgatgaatattacgaagccatccagatgggacttcctgcattatattattccggaagagataatccgccccatccggaaatctggatcaactattttctgaggatggtaaagttatactctggaaaggtttgtgatctgcagatggcttccaatgaggaagatgttgctgcaagtttatcgttcctaaaaggaaaggaaaaggaacttttgaggcttttgatcatggattataaaggggaatttacaccgattgaagtcagcaggaaactgtcagtcacgaacaaaacaattattaacagattagctgttttggtgaaaaatggttttgtagttcccatactggtcaaccagaggatccgatcttatgaattaagcaaatttaccagagacaatgaagaagaaatcatgaaagctattttttgcaactgaaataaatcggaatttgtggagagatttcctgaactttccttattttacaggcttttcagccaattagatagtgaaatgatatgtattttcccttatttttgcccttgtgaggaatccgcaagggaaataaggggattttttattaagcgttgctcgctactttatcaagaagtcttgccttatgaagaaaatgtattgcagaacgataatgattacagaaccaatggctttggaaacctgaagtatgctatgggaaacttcaaaaacgatatcttcggagattatatccgctacactcatgccttctgccattcatatgttgtcgtgaacataggtggaaaaatattagttgtaaatggggcaaatggaacgctacattgaatgctgtgcaaaagtcacctcgaaaatcgttcccccagtcttgcctgatttgatacaaatactgccatcatgtactctaacgatttcacggacaaaagcaagacctagccctacgccacccagctcccggcttctggatttatccacacggaagaatggttcgaacactctctccataagctcctttggtattccgcttcccgtatcttctacagacagacaaacatgcttgtttctctgatatgcggttactgtaacctgtccgagcggatgattatatttgatggcattctcaaccagattgtatacaagcctgtaaataaggatatcac

SEQ ID NO: 12506 - DNA, 32623 bp, Unknown
  gut microbiota DNA sequence
attataatctgactcaagaataaatattccattattttcagtctcttaatcgttttcagtatggtgcagcgcttaccaggtatttcttaaattctttgcaccaccttcattcaattttatagttaaaaatcggaggttattatgaaatttggttactttgatgatcaacataaggaatatgtgatcactacaccgaaaacaccacttccctggatcaattatctgggaaaccgggaatttttctccctcatatccaatacctgcggcggctataccttttatcgggatgccagactcctgcgcctgactcgctaccgctataacgacgtaccttgcgatactaacggcaaatacttttatatcaaagatggggactgcatctggaatccaggctggcagccgaccaagacggacctagatttttacgaatgttgccacggcctgggctatagccgttttaccgggaaaaagaagaacctgcaggcatcggttctcttctttgttcctttggaagataactgtgagctccagtggctgcatttaaaaaatgatggcgatgcgcctaagactttttccctcttttcttatgtggaatggtgtctttggaatgcggatgacgatatgaagaacttccagagaaatttgagtatcggcgaagtcgagattgaagattcggtcatctaccataagaccgagtaccgcgagcgccgcgatcactttgctttttatggggtcaatgcaccgatcgacggatttgataccagccgggatgcctttcttggtgcttaccggggcaatgaccatccacaagttgtagaaaaaggcgcctgctccaattccgtagcaagcggctggtctccgattgcctgccaccagatcgatctgacccttgctccaggtcaggaaaaatcgctgatctttgttctgggctatgccgaaaatccccttgcggagaaatggtctgcgcccgacatcatcaataagaaaccggcgaaagagatccttgccaaataccagaccgatgcacaggtggagcaggctctatccgccctggctgcctattgggaagacctgctatccaaatatcatgtcacatcttccaatgaaaaagtcgatcgcatggtcaatatctggaaccagtatcagtgtatggtgacctttaatatgtcacgctctgcctcctactacgaatccggtatcggacgcggtatgggcttccgcgattcctgtcaggatctgcttggttttgtccatctcataccggagcgtgccagagagcgtatcttagacattgccgcaacacaatttatcgacggcagtgcctaccaccagtatcagccgctgaccaaaaaaggaaattccgatattggcagtggttttaatgatgatcccctctggctgatcgctggaacagatgcctatatccgcgagacaggcgatttttccatcttagacgaagccgtgccatttgataatgatgtcagtcttgccgcgccactcatggaacatctgcaccggtcttttgactatatcgtaaaccataaggggcctcacggactgcctctgatcgggcgtgccgactggaacgattgcctgaatttaaactgcttttccgcacatccgggtgaatccttccagacctttggtccaagtgagggaccggtagcggaatctgtctttattgcagccatgtttgtcaaatacggaaatgcctatgccaagttatgccggctaaccgggaatacgtccgaggccacgcgggcagagaaagaagttgccaagatctatgatgtcatcttaaaggatggctgggatggcaaatggttcctgcgtgcctatgatgcccacgggcagaaggtcggctcccatgaatgtgaggaaggacagatctatatcgagacacagggcttctgccctctcgccggtgtcggcgtcaaggaaggtcttgccaaagaagcgctggattctgtcaaggaacgactggacaccaaatacggtatcgtcctgctccagcctgcctacaccagatatcatctggaactgggcgagatcacttcttatccaccgggatataaggaaaatgcgggtattttctgtcataacaacccatgggtttccatttccgagaccgtgatcggcaggggcgaccgtgcttttgagatctaccaaaagacctgccctgcctatgtggaggaattcagtgagatacaccggacagagccttatgtttactcacagatgatcgccggacgcgatgccgccttctttggagaagcaaagaacagttggctgaccggaacggctgcctggacttttgtcaacatatcccaacatatcttagggcttctgccaacccatgagggcttatcggtagatccgtgtattccgcatgattttggggattttgaactaacaagaaagttccgtgaaggaacctaccatattcaggtgagaaatccgaaacaggtagaaaaaggtgtggtcagtctgcgtgtcgatggacaggaaattgcaggcaatgtcattccttatgtaagaggtaaaaaagaatatcaggtcgaggtcacactcggctgacgtcagggacgttccttttgccataaggagcgtcccttttggctttctgagacaggcgcagataaggacaaatgggcaggcacctatccgtttgtccttatctgtgcctgtctccgtgctcaatccttggactcaatcacaatcagcgttccatcctccaccgtgatcacggcttcctcgtccacgatctcattactgatgcctaaggatgtaaacggctgcagatctacatgatccagcggatagaatacgccgctctcgcttacacctcttgcaacgccgcaaaaagaaaccacggatacatattttccatactgttcttcctttttgatccggcactccttctggatcagacggatccggttatgttcatccaaaagaaaaatatggcgatcctgtacaaagccctgtcctaaaatggcaatattgccaagcacatgatccagtctggttccggttcctcccaaaagaaagatatcaccctttgtcttttcaaacgccagatgcagcgccgcttccgaatctgtatcatcctttatgggattgagttttgttacattgcgacggtctgccagaaaggcatccttgacctgctcatccagtgaatcaaaatctcctatgacatagtccggctcaatctgcaatttcatgcaggcttccaggcctctgtccgcagcgatgatcgtagcccccgcatgttcttttatgacattttccaaaaaaggcagggataaattaccccctgccaaaatcagtgttacttcttcgtttttcatgctgtaacctctatactaccaagccattcgggacactccataagccaaaaggaacgtccctgtggtctacatatgcgtcaaaaatgcttctacattggctgctgcatccccggaaaatacggcactgccagccacaatgatattggcaccggcaataagtgcctgatcgacattatccaaggtaatgccaccatccacctcaatgtcaagtttgatgccacgctctcctaagatacgacgcagttctgtcaccttctccagggtatatgggatcagtttctgtccgccatagcccggatttaccgtcatgatcagtaccatatctacctgatctatgacatggcgcaaaacctcgatcggtgttgccggattgatcgcaacgcctgccatggtccccagttccttgatatgcgctaccgtacgatccaaatggcggcaggcctccgcatgcaccgtaatgatatcggctcctgccttggcaaaatcctccacatagcgatccggttcttcgatcatcaggtgcacatctaaaatgcggtctgtgtatttacgcaaagacttgaccaccggtgcgccaagtgtgatgtttggcacaaacataccatccatgacatcaatgtggatatactgtgctcccgcctcatcaattctctctatctcctctgccaatttaccataatctgcagataaaatcgaaggtgacaaacaattcatgattctctcctgtttactctgtttccgccaggcactaatattttcttgcctgaacgagttcttcatacaataacttgtaattgtcatagcggctctgcgcgatctgcttgcgtgctaccgcctctttgatcccgcaatccggctctcctatatgggcgcagccctgaaaacgacattccggttcatgtggcacaaattcggggaaacattcccatagaccccctgcctcgatctccggtacatacatggaactaaagcccggtgtatccatgataaaggaatccccgccaatgggaatcagttcactgtgtctggtcgtgtgttttccacgcccgatcttctggctgatggcaccggtctccatcagggtatgatcctgcaatccattgatcagcgacgacttgccaacaccggacggtcctgccaccgtagtcgtcttgccctgcaagagtgtcctgatctcctctctgccctccccggtgatcgcctgggtaaaatgtaccggatagcctgccagttcataggtctcctttaagacctgcttgtccgcccggcttcccagatcttctttgttaaagcagatctgcaccggcacatcctgataagccatcatgaccaaaaagcggtccaaaaggttgagattgggttttggagaatcggtcgcaaaaataacaagtgcctgatcgacattggcaactgccggacggatcagggcatttttgcgcggtaagatcctgactacgtttcccagatgttctgcctcatccagcacatcgatttctacctgatcgccaaccagaggctttaacccttgttttcggaaggcaccttttgccttacattcataaattccggatcctgctacgaaaacgtagtagaatccggaaattccttttactatcctgcctgtcatgtgcatcctttattgctttgtaaatgtaaccgtttttgtctcgtttacaccatcaccagtaatttcgattgttccagatgaagttgcaatatctttttcactgatattcaatgactggtttgcctgcagatcccatgacgcaatggaaacgccttccgcatcctttaagacaacggataccggtacattatgtgtattgctgacgctgccggaataactgtaatactccggttttttgccgtcactgatcaccagatcaactgcggttccggcatctaccgtcttgccctgtgtaataccctgacggataactctgcctgccgcataattatcactgtattcggttgtcacatttccaacctgtaagccgacacttgcaagttcattggctgcttcctgctgtgtcttattggtcagggacggtacctgtacggactggatgcctgcactgacaacgatcgtcacagtatcaccctttttaccaacaccggtcggtgtctggctgataacctgcccctctgctacatcagaactgtattcaaaggtacggtttgccttaaatcctttatcttttaaggtctgaatggctgcatcgccgttcatgcctaccacgcttggtatttcaagatctccttctttgcaaacggtgatcttgaccttttctgtagtagagaccttgtcgccctcatcagcactctgcttgatgacttcgccttcctctgcatcatcggaagactcataaacgatctcgtaagaaatgcctgccttctttaaggctgcgactgcctcatcctcggtcatgcccacaaccttgatcatttctacctgctctgcctgtgtcttgctgtccttatcgctgtcgctcttcttggttccaaaatggaaaagtccaaagaaactgcccacaatatagatcacaatggcaatgatgataacggctgccgcgattcccataatggtgatcgccttatcgagttttggattgaccggaccatcttcttcctcgtcttcctcatcctctaaaagttcgccctcatcgacttcctcgccctcggcaagtccttcccggatctgctcctgctcctccggtgagatcacgcgggtcttttccacatcatctgcggaaccgatcgtcacaaaatcctcattcgggctgacaagtgcttttttcagatccaaaagtagatcttcgatcgtagcgtatctgcgatccgggctcttcatggtacattttaaaatgatcttttctaaactgatcggcagttccggtgcatatgcactcggtgcgaccatttcttcctgtaaatgctgcaaggctacggcaacggtggtatctccgtcaaacggtacacgtccggtcaccatttcatacataacgatacccagagaatagatgtcgctcttgccgtccacataaccatttctcgcctgctccggtgatgcataatgcacagatcccatcacatccgcatgaatggtgttggaagtggtggccctagcgataccaaaatcggtaaccttgaccttaccttccgtggagataatgatattctgtggcttgatatccctatggataatgcccttattgtgggctgcctcaataccgcgacctacctgaatggcgatgctgatcgcctctttaaaattgagttgtccctttttctcgatataggtctttagggtgataccctcgacatattccataacgatatagtacatgccattttcactgccgacatcataaatgtttacaatattggcatgttccaagcctgccgctgactgtgcttctgagcggaactttgtcacaaaggtaacatcctctgcgaactcctgtttgagtacttttactgctacttctctacctaagatatgatcctttgccttatagacatcggacatgccgccggtaccgattttatctaagatctcataacgatctgctatataatttccttttgtcaacatttttacacctcatcagaaaatggttctattactattaccgtaatgttatctttaccaccatgatcgttcgccagatcgaccaattttgctactttatctgccacctgaccggatcccgccaagacctcttcgatctcgctctcctcgaccatagatgtcagtccatccgtacacataagtaccagatctccagcctgcagggtctcatcaaagaaatcaacacggacctctgcctccgcgccaactgctcttgtgatcagattgcgctttggatggcttctggcttcttcctttggcatctcgcccttgcgcaccatctctccgaccacggaatgatcctgcgtgatctggctcaactgtccgtccctatatacataaagcctgctgtcaccaacatttgccacacaaagatgatcttccaaaagcgttgctacaaccatggtcgtacccatgccatatttgtcctcatcctgtgtcgcttcctcgtatatgctcttgtttgctgctgtaattccctgattgataatctgaaccggttcagatcccgtatcggacgcgatctcacgttttgccagtgcgattgcctggctggatgcgtattctcctgccttgtggccgcccattccatcggcgaccacaaagagattcggtaaagagccaatggtctcttccgtggcaaacactgcatcctgattttgcgaacgcatacgtccaatatccgtcaaaacagaatagttcatgtattttacctttcttatgtctcggaaatatgtctatgtcttaattgtccacaggctccatcaatatctctgcccatttcccttctaatagtaacatttttcccgtatatttcaagtttgtttttaaaggtctcgatcgcccgcttgcccgactgcacatagtcccgctccttgatcgggttgaccgggatcagattgatatggcagttgatcccctctgtcagcgcacacaactccgcagcatcttcctcgctgtcattgacaccgcccaccaggctgtactcaaaggtcacgcgtcgcccggtcttttcaaaatagtagcggcaggcatccaccgcctcatggatatcgtatttattggcaaccggcatgagttccagacgctttttctggtttggtgcatgcagagataaagccagtgtgatctgcagaccttcctccgccagacggcgcatatttggcacgatgccacaggtagagaccgtgatattgcgctgactcagatttttaccatgtttatcggtcagcagatggataaaacgtatgagattgtcgtaattatccataggttctccggtccccatcacaacgatattagaaaccttttcccctgtatcccgctcaatggcatagatctgatctagtatctccgatggtgtcaggtttctgaccagcccatccagagtcgatgcacaaaagcgacagcccatgcgacagcccacctgtgaggaaacacagaccgaatttccatggtgatagcgcatcagaacgctttctaccatattgccgtccgctagagcaaagagatacttgcgcgtaccgtcttcccttgaaatctgacaatcgatctgttccaatgccgtataggtcgtctgctcttttaaaacttcccggaatttctttggcagatttgtcatctcatcataagatgccacattatgtacatgcatccattcatacaactgtttgccgcggaatttcttttctcccagttcttctgcaaaggtcaagacttcctcatatgataaagacttgatatctcttttttcttccatctttcttcctatctctttttcatctttgccaaaaagaaaccgtcctgcttacctgcttttggcaaaaactgcttttctgtttccaacgaaaagtccgggtgcttctctaaaaaccatgtcacattatcctcgttttcctgagacgagatcgtacaggtcgaatacataagcgtcccgcctgccttgacataagcgcagaccacatccaggatctgacgctgcaatatcgccagttccttctgggtctcttttgtcatgtggtacttgatgtccggcttttttgccacaacaccaagcccggagcaaggcgcatcgcagatcacgacatccgcctgcccgatggattcttcgtttaagatggtcgcatcccatttttctgcccgaatattggcaagccccatacgcctgatattttcttccaaaatggaaaccttgtgatccgaaagatcccttgcttccacaagtcccgtgcctgccaaaagttctgccgcatgcagactcttaccaccgggtgccgcacagacatcgatcacatgatccccttgctgaataccggcactgtgtgccaccatcatagaggaaaaatcctggatataaaaatctccggcaagaaattccgggataccgcgcagatagtcatagccactgatataaagggcatatgggatctcctcgcaaggctctaccgtgatcccctgcgcccgcagattttttgtcaactcttccacagaaatattgccggtattgacacggatacaggttttcttttcctctaacaattcctctaggatctgctttgtggtctccccgccaaactgttcttcccacgcatcaatgatccattgtggcatggaataggcttctgaaagacccttgtaagtgatgctatccttgtttcttgaaatattgcgcaacacaccattgacaaaaccggaaaggccgcccagtccatgatttttcacgatacggacggcttcgttgcagaccgccgcatccggcacaccatccataaaaacgatctggtagacactgctgcgaaggactgtccggatgagcggtttcatctttggcactttaggcttttttacaaactgtcctagaatggcatcgatctgtaaaagccgctcaatggtcccctgcgtcacacgcgtgataaaagcacgctgctgtttagacagatattgatatttttccaaggtcgcccccagtaccagatgggaatattttccttcttccagtacttcttctaagatggcgacaatgatttctctttgatttggatcagtcatcgcgtctatttcctccaaacaggagcaagagccgtaagagttgcaggattgctgctgctgcacttgcaacgtaggtcagtgctgctgcttttaagacctttttcgttcctttgagttcctcatgggataacatgcctgtatcatttaaaaagcgaagtgctctcgcagacgcattaaattcgaccggaagtgtcaccaactggaacaaaactgccagagaaaatgcgatcacgcctgccatgatcagggtctgccccatacggctgttaaagagcagtccgatgatgataagtggccaggacagggtggatcctaaatttgctaccgggacaatggcactgcgcaaagtcaatggaaagtagttgcgctggtgctggatggcatgcccgcactcatgcgccgccacgccgatggctgccacactggtagaattatagaccggatcggataagttcaaggtcttgttgcgcggatcgtaatgatccgtcagattgccggatacatgctgcaccgtcacatcataaataccggatctgcgaagcatgtgctctgccgcctgtgcgcccgtcataccggaggcactgcgcacgcggttgtatctgttgaaggttcctttgacccgcgctgatgcgatcaggcagatgatggcgccgatgacgaccaggtaataggtcgggtcccagtaaaatccataatatccgtacataattttgctccttaaataaatatattgtgtatcagcaattatgcctgcgtcatactttgctgctcccctagaatcgtgcccgccggaatatcgcggcctcgcaggaaatctgcgacaggcatacgttttttgccctccaactggatctcttccatcactaagagtccgtccccggtgactaccgcgatgccatcagcatctgccgctaccacctgtcccggcacggcatccgggacgatatttttctccacgcgtgccttccagatcttcagtgtcttatttcccagatgggtataagcgctcggccaagggttcaggcctctgaccaggcgctccagttcgacagcacttcttgtaaaatcaagatttcccatgctctttttgatcatgccgacatgagtcgcttccgcttcctcctgcgaaaccggtgtgatcgtgcctgctgcaagcccttccatggtcttaacacaaagttctccaccgacgatcgccaatttatcaaagaggcttccaccagtctcatcggctgcaagtctgacttcctcttttaaaagcatgtcgccatcatccaagccgacccccatctgcatggtcgtcacaccgctgacttcatcgccattcatgaccgcccattggatcggggctgcgccacgatattttggtaaaagcgaagcatgcacgttgacacagccaagtggtgggatctccaagacttcctttggaaggatctgcccaaaggctgctacgataaaaatatccgcatcctgttttttcaggacttccactgcctccggctcgcggatgcgctttggctggtagaccggaatatcatgttccactgcccaggtcttgactgccggaaactgcatctccttgcctctgccctttggcttatccggctgcgtcaccaccatgacgatctcgtgtcctgcctttgcaatggcatccaccgttgctaccgcgaaatccggtgttcccataaaaacaactttcattccccttctcctctatgcttcctcttcttcataatttacatcatgcagattgccttctaccttttcggtatacatatgtccgtccagatggtcgatctcatgtaaaagggctctggctaaaagttcttcgccctccacctcatattcttccatattttcattgaaagcatgcaccttggcataattcggacgggtaacctgaccggatttgcccggaagggataaacagccttcctctcctgtctgcgaaccggatgtctcaagcacttccgggttgactaaaacgatcggaccgtcccctacatcgatcactgcgatcctgcgcagaacgcccacctgcggtgctgcaagacctacaccatcgtattcatacatggtatcgatcatatcctcgatcaaggtcgcgatccttggtgtgatctcctttaccggacggcatacctttgtcaaaacgtcgtctccctgtactctaatctgtctgattgccataaaattatccctctttctataaaattacgcctgattcattggatcaaaatcgaaccagaccattacttttgcaaatcccgcatccgcctgtatggtctgcgcaacgcgatcttttatctcgatcaactgctcatagtccttgtgcttgcagtagatcacttttttgtatatatccctgacctttgccacgacggcatcggatggacccaagcaccggatctgcggtgccttttcttcgatcaggtctgccagtgccttggcacatcggtcagcctcttcttccttttcggaagtgatgaggatcaaaagcatatgcgccgccggtggatagtccatcaactcgcggtaggcgatctcctcctcataaaatgcctcgtaatcctgatcttttgcagcaaggatgctgtaatgggtcggctggtaggtctgcatcacgacattgcccggaatgtcgcccctgcccgctctgcctgctgcctgtgtcaaaagttgaaaggtacgctctccactgtgaaaatcgctggaattgagcgataggtctgctgccagcacaccgaccagggtcacgtttggaaaatcatgtcccttgacgatcatctgcgtcccgatcaaaatatccgcctgccctctgcgaaaggcatccaggatctcctgatgtccgttctttccgcgtgtcgtatccgtatccatacgcagaacgcgcgccatcggaaaggtctgtctgacgacctcctcaaacttttgcgtgcccgccttaaagccgccgatatatttggagccacaggacggacagaccaccggttttctcgtctcatagccacaatagtgacagcgcaggacatccccgcggtgcagactcagtgaaacgtcacaatggggacattttatcacatgcccacaggctctgcaagaaacgaagcctgccagccctctcctgttgacaaaaagcatgatctgctcttttttctgcagacggtctgccatcagttcctgtaatctgcgcgataggatcgaacggttgccctgccgcagttccgcacgcaggtcaacgatctcacaagtcggcagcgtccgtcccgatatacgatccggcaaagtcaaaagggtatattccccactttttgccttggcgaaagactccaccgatggtgtcgcggatcccaagaccacgctcgccccctgcatctttgccctggcgatcgccgtctcccttgcatgataccttggaacggtctcactcttataggaaggttcgtgttcctcatctataatgataatccctaaatcggaaaaaggtgtgaacaaagcactccgcgggcctatcataatgcggatatctcctttttttgcccgctcgtactggtcaaaacgctctcccggcgacatgcgggaattcatgatcgacacctgattgccaaagcgctgataaaaacgcatcagggtctgataggtcagtgcaatctccgggatcaggacaatggcactttttccgtccgccagagtctttgcaatgagttccatatagacctgcgtttttccgctgccggttaccccatacaaaagataggttcccagcctgcctgcttccatatcctgcgtgatacgcgaaacagcttcactttgcgccggactgaggacgatcggtctttccttttccaaagtcatgggcacaggattgcgataggcacgctcggcgtcgatccgcacccagccatttttttcaaaatcacggatgacggtcgccgggatctgcattttgcctgtgatgtcctcccagggcagggtagacctttccatcaaagtccgcaaaagtttctcctttgcctgactatgcctttttctggcaagcaaggtagagagttcgtcccgcgcctgctcctgcgtcagaagaaaggtgaccgtctttttttccttgcctgcctcttttttcttgatggggatgaccgtctttaatgcctggttcatggtgcatccataattgcggcggatccaagcagccagcgcaatcaactgcgattccacggcaatgctgtcctttgacacaccaaggatgggtttgatccgcccggcatcaatctttggctccgtggacatatcgaccacatatcccgtaatgcgccttttgccattgccaaaggggatcacgacacgacttccaatctgtacggtttcccgcaaatgttccggaatctcatattgaaaggtcttatccagtttttccagtgatatgtcgattatcacgtcaccatacaacatctgtctttccttctgtaaaaattattttgtccagcctaattcttccaatacttccgcgatcagaacacgttcatccatcgggtactttttgcccttgatctcctgataatcttcgtgtcccttgccagctaagacaatgatatcccccggctgtccgtgtgagatcgcatagcggatggcttctttccggtcaatgatctcgatatacttgccatcggttttgccgataccggtcttaatgtcatcgatgatcgcctgcggttcttcaaaacgcggattatcggatgtgatgatcgtaagatctgccaacttgccggacacctcgcccatctcgtaccgacgcaatttggaacggttgccgccgcagccaaagagacataccagtctgcccggttcgtattcttttaaggtcgtaagcaggctttccagactcatggcattgtgggcgtagtcgatcatcagcgtaaagtcatcggatacatgcaccagttcgatacgtcctttgacagaagcattcaaaagtgcctttttcatgacttccatatccaccccgtaatgattgcagatagccactgccgtcagagagttataaacactaaagcgtcccggtacactggtctcgatatccccctccaaaagaccgctcacatgataagcaacgcctaggtgaccgccctttcgcaccaatttcatatcggttgcacgaatgtctgcattttctgaaaatccgtaggtctgcacctgacaggtgtggttctttaaaatagcctccacatgggcatcatccgcattgacaatacccaaacggcacttctggaaaagcagggacttgcactgcagatattcctcaaaagatgcatgctcatttggtccgatatgatccggttcgatattggtaaagatgccgacatcaaaggtaaagccatccacgcgatgcatcataagtccctgggaagatacttccatgaccgcataatcacagccggcatccagcatcttgcggaaatactcctgcaccacataggattccggggtcgtattattggcagggatcttttcatccccgatgatggcttcgatggtaccgatcagaccaactttaaaacctgcattttccatgatggacttgaccatgtaggtggtcgtcgtctttcccttggttcctgtgataccgatgacctttaaggtgtctgccgggtggtcaaaatatgctgctgccagataagcaagtgcctctctggtatctgccactttgatgaccgtcacgtccgctccgacctctacatcttctgagaccacaaggacactggctcctttttccaccacttctttcgcaaacgcatgcccatccactgcggctccttttacgcagacaaacatggcatccttttctacttttctggaatcataaacaaggcttgaaatctcctgatccagatttccctgtagcagtttataatccagtttttccagtaaatttctaacacacttcatatctatttcctttccgctttccactgattttttcataacttttagtatagcaaattcagaccaaatgtgctagagggacgttccttttgccatggggagtgtccctttggcactatcgtctgaatagtctgaaaatcacttatgagttgaattttgcagtccgctattatatgatagaaaaaataccaaaaacggaggtttgttatgcgtcatcttatgaaccctctggatttttcaacagaggaaatcgagcaactaatggatctggccgatgacatgagacagcatcccgacaaatatgcggattcctgtcatggcaaaaaactggccacttgtttctacgagccaagcactcgtactcgtttaagttttgaagcagccatgctcaaccttggtggttccactcttggttttgccagtgctgattcttcttccgcttccaaaggcgaaagtgtttccgataccattcgtgttatttctagttacgcagatatttgtgcaatgcgtcatcccaaggaaggtgctcctttagtagcttcctctcattccagtattcccgttatcaacgccggtgatggtggtcaccaacatcccacacagacattagcagatttatataccattcgttctttacatggaagactggataatctgaccattggcttatgtggcgacttaaaatttggacgaaccgtgcactctctgatcaatgcactggtacgctatcccaatattaaatttgtattgatctcaccggaggaactgcgtgttccaagttatatccgtgaagatgtcttagacaaaaaacacattccatatgtagaggttgaaaaactggaagatgccatgccggaactcgacattctctatatgacccgcgtgcagagggaacgtttcttcaacgaggaagactatctgcgcatgaaagatttctatatcttaaatgccgataagatggctcttgccaaagaggatatgatcgtcctgcatccactgccacgagtcaatgagatttctgtggaagtcgatgatgatccaagggcagcctactttaagcaggcacaattcgccgtctatatccgaatggcacttatctatacattattggaggtgggatcatgttaaatatcagtggaattcacgagggatttgttctcgatcacattcaggcaggcatgagcatgaagatctatcatgatctgcacttagatcagtttgattgcaccgttgccatcatcatgaatgccaaaagcaacaaaatgggaaaaaaggacatcatcaaagtagaatgtccgatcgatgccttagatcttgatatccttggttatatcgatcacaatatcacggtcaatgtcattcaaggcgataagattgtagataaaaaggttctgacccttcctcgtcagatcaagaacgtgatctcctgcaagaacccaagatgcattacttcgatcgaacaggaattagatcagatctttattctgaccgacgaagaaaacgaagtatatcgttgcaaatactgtgaagaaaaatataacggaaaataaataaaaagaaaaagcgaagtcagcacctgacttcgcttttttacatgcatctcggtccaaagcaacagagattgcaaaaaatattcaaaaggaacatattgaaacaccaccgtgtaacaccggcatatggtctctcataagcagaaccgcgtgtctcataccagtcactgccatactccagatgctgctgatactggcgatactggaaattccccggttccagagccacagctcgtcttgcaaactccttggcatccaccatatttcccagtccttcactcgcgatcgctgcgtaataataccaacgaccattgcgagccgcatccggcatactgtttaatacatgcattgcctctgcaaaatgcctgctgttgatataattggctgcggcacgcatctcgttggactcctgcgtctgctcataaccaccataactgctactctgcgcgccctgtccgtcaaatccgccatagccatactggtaaccgccaaaactggctccctgctggcgctctttcatgatctgatcgtaggcctgctgtacttctttgaacatctcctctgcctgatccttattcggattattgacattggcatccggatgatatttacggctcagtgttctatatgctttcttgatctcatcctcggatgcatctcgcgatacgcccaacaccctatatggatccgacataaatattttcctccaactctatgatttcgtctttttctcttttaatttcaggtattcgtactttgtccagacaccggaatataaaatattgcgcaggatctctgcatgctgcaaaataggcatacgttcaaaagattttgcgcactctgccatcaaacaggtaagcgtggaacgacaaaaagtctcatattcttccttggactccatctgcacataggctagcggattgtaattgccctttttctgatcctgtttcagatcctcataggcatccagaagatagataaacttgcccatataaaagcccatgctctccagatccttggaccactcatcctgcttccactgaaaaatctgtcccagcatctcgccggtatagcccgctacgatgtcaatattggactcctttgccttctcagccacagcaagttttttcatatattcttctaccgcctgcacctgtctcggataacggatgctgatgcgtttataatccttcaaaagagcctttgccatagcctgcttgatatggctgccctcatcctcataatcatcctgcagactgtgataactgagcacgatatccatggctgccgcatattccgtcgccgcattgatataggctgtcttttttgccgccggatgcacggcacagcggtaagatatctcctcatgctccaactcatacagaccggtcaaaaggatcaaaagaaaagtcatatcgtaattcaaaagcatctgtcctttgatcccagcctcattctttaactggcggcagagtccacagtaatatgcctgatatgtcttttcatcttctgcatttaattctttccgattaacattgatatatccaaacatgaaacaacctcactaggtacgcttgacaaattccatcttacacttcgggcaggtgatcatgatcttgcccttgccctttggcacgcggatcttctgcttgcaggacggacaatagtagatcttgtagatctttttctgctctctctcatagacagccttgctcttttggtactttgccttggcagacgcaccgcggaacttgtctcggatcttatccgtcatacgaagatactgttgattttcataatatctcttggatacattgcgtgacatcatccgaaaataactatacactaaggatgcgatcgcaagcagataaatgatggcattgtgtgaaaacatcgtgatgatcacaagtaccagtgctacatataaaaagaactttgaaagcgcatctgcgccatttctccccaccataaaacgagccaatttttctctcatgacaactccgttccaagccagaaactcctaaaaaatctctgctctatcatttctttaaaattaactctatcattttgcagggcaaagtcaataaaaggacaaatgatttaataaagattttagaatctgtttacaaatcacttgtccagtttataatttcatcaaaaagccatcacagacatacctctttgcgcaattacaaatcttcctctaatacaggtcaaacaaaggcatgcccatggcgcgtatggtgaccgtatcctctgtcgtatagggcttgccctcctgggtataagatgactccaaagttgccgtataggtcttttgtcctgccaagacatcacttgctgcgatcgtaagatcataaatatcatcttttttgaccgccacatggtctgcaagtaccttgcccttttcatcacggatggtcaagcggtaggtctttgcctgattggagacagaattatcattgaccagcagatgtgccacgatatcctgcgtatctgtaccgcgatcctgcgcataaaaggtgctgatcgatccattatgtatagcctcctcatttgtcaccgtcagataaggtgccgcctcctgcgaacggaatgaactgatcatggtattgacaaacaaacggatctcatcatctgtcatactgccactgtgccccagcccggtataggtgatgttgcccttggtataaagataatagttgttggacgcatctccctctctggctgcgtaaatattggtcgcatcatccgcatcgttggataggttgtaccagacgattgcccgatccccggacgcactcgcctgctccacatactgcttggtataattggaactaaaagcctcgccactggcacagatggatgtataattactttccacttccgcgattgcattgctatccacctgcgctccgccccatttattctgatagcgcaccaattctgcgacatcgatctcatactcgatctcgacatagtcctgccatctggtcacgatcatctttccaaagacagtatcctctccgtattcattgtgaaaaagttgattgatattatcactgcgggcaaccgatccaaaataataggtataagacttgccgatctcttgtccgtccatctggacgctcttggtgatatttcccattccatccacggtaaaaggatctgtccacgtcccggtctcatgtccgtccgtatcccggatgctgataccaaaggtacgataagaacttggattgtccttgttactatcacggatctccacatgtccataggctttcatttcatcggtcgcatagaccagacttcccttgttgaccttttgctgtggattatgtccggtcgtctggcttggtacatccttccagtcgctgtaatcgccctccaccttaaagttcagtcctgccccggtcgcattttccagatccagccgatagttttgtgcatgggtcgttccgactgtgatcgtatcttccatcttgtaaggataggtcgtgatctgcccctgattggcaatgcggacagtctctgtctctacgctctttgtccagttcagggtcgtatcatctacttttttcatctgatcgaccggactgtagatcgtgcgatcaatgccattgcccgtcgccttgcgcagtcgcgcgccataggtcatgacgcggatgctgttatccatgagattgcagatggactcacctgcggatgtcagttttgacagataatcatcgcgcgtcatccacctgccttcctcgccaatgtcctctcccttatggtatggccaatagccactcgccggattccatgcgttgtagcggtgccatttccagtaataaccgacttccatatcttcttccgtcaaaagggagatctcctgcccccggctataggttttttcgtaggaaccgccctcgctctggttggaataatagcgcaccatctgtccgctcaactcgcgcagatacatggatgtcgcctgatccacgctccaacattcgccactttcccggctgtcctctccactggcatcatcataaaccggataggcaaaagatttgtcctgcacaatgtcatgccccaggatcacactcttgccggatgcgacaaacttctgaaaaccatataagaaatcttcctgatctgtaaaactggatacatctgaaaagctatctcaatccccaaatgtaatctcttataaataacaaaaaaagaagcaagacgatgagccgggttatgtctggagtaatcatctatctaggacgactgtcgccaatcgcctcaagcgaccaacctgaaactagcgggccacatacgtttccattcggtcttgcttcggatggggtttacagggacccttgctgttaccagcaaagcggtggtctcttacaccacctttccacccttactgacgggaaatcccgcagcggtatatttctgttgcactttccttggagtcacctccaccggacgttatccggcatcctgccctgtgaagcccggactttcctcacctgctgcctttcggcatttgcagccgcgattacttatcttacttcttttttatgaaattagtatatcttattttaaacgttaaaacaacttccaccgataaattcccgcactaaggaattgttgcagatatcgtccgctggcatccccagaaaataatccagcaatttgatcaggcgctttgcctcggcatattccgggcagtcttgatcgatcgccaaaagctgcggcatggcatagatctttagcactgccatctcatagatgagcgcggaattgaacatctcatctgcctgttcctgaaatggaaaaatgttcttttcctcaccacggcgcacagaatcccacatagcaatggtctcttttgcgctggtgcctctggttctggcatcccttacgatacggcggatcaatctgccgtcggtcgtcgagagcgggttgtgctcgtcgatatttaactgggtcaaggcacttatgtagatcttgaacttgctctctttcggcaaagatccggacatcttttcgttcagtccatggatgccctcgatcaccagaatatcacgtttgcccaactgcatatagtgatccttgtattcacgcttgccggtcttgaaattaaaagtcggcagaagcacacgctcaccctttaaaaggcgcaccatgtcctcattgaactgccccacatccaagccctcaatgcactcaaaatccttttgcccgaactcatccaaagggatctgatcccgatccagatagtagtcatccagtggaatcggatgcggtgtcacaccaagggcacgcagttgtgccgacagacggtgggaaaaggtcgtcttaccggaagatgacggaccggcgatcatgacaaactttttgtcagggtctgccacgatacgctctgccagcgcaccgatgcgacgttccatgtaggcttcctgcgacaggatgatttctctggtctttcctgcacagacagcatcgtttaaagcgccaacggtaggaatccccatatctgcgccccactgctcggatgcctgcatgacatgaaagagtttgtttgccggagcaaaaggagcgacctcggtcgtcaccttgtccgggaactgcaaaataaagccttcctcgtaaggataaagggcaaagtaggacaacatgccggtatttggtgccatgtagccgtaaaaataatccagacagccatctaattcatagacattgcagttggaactggagcgataatgcatcaggcgttccttatcctgcataccgcacttggcaaaaagttttctggcatcctcggtcttcatggtctttttttcgatcgtaagattcttttctaccagggcaagcatttcctttttcaaattctccagccatgcagagtctatgaccttcctgccctccatccggcaataatagcctgctcccagagaatgttccacatgcaaaatttctgtcccatccggatacatctgctgcaaggcacgctgcatcaaaaagacgacacttctgcgataggcacgtttgccattcttatccttggtcgtaagaaaagcaatgtcgccatcccccggtatgacctgtcccagttcaatcaacttgttgttaaagacagccaggatgatcgcatcctcatactgatcctgccacgcctgcgccaagtgtaaaaaagtcgtgcctttttcatattggtaagtttttccctgcacgcatacattgatttcctgcatatctctcacctcgtaacgatccaaaaaggctctgcaaaaggctctgtgacgacctctaattctgccgcctcctttgcaagccagttcttcatatattccatgtaaatgtgctcgatcccataatgtccggcatcaatgatagaaagtccgtctgccacggcatcgatcccggaatgatggtcgatatccccggtaatgtaggcatctgctcctttttctattgccaagccgatctcactcttgccggaacccggacacatggcgatactctgcaccatccgatccttatcgccaaagaccttgacatgggagagtccaaaggcatcccgcacacgctctgccagatcataaagactgaccgcctgcgtcaatttgcccagacaaccgatgcccctgccatcccccggcgaggtgacttccaaagcctcgatatccataaggcctaactgttctgccgcgatctgacccatgacacagacatcaaaattggtatgcatggcataataagcaatgccgtgctgtgccagtgccaggatccgcctgccgataaaatcatctgcattcacacgcttgatgccgccaaagatcagcggatggtgggtcagtatcatatctgccccacaatctatcgcgtgttctaggactgcatcggtcagatccaatgccacatagaccttgtggatttcctgttccttatctccgaccaaaagtcctacattgtcccaatccagcgcctgctcgcgcgggatctctttttcgatccgctctgtcagatccatcactctcatcgcaagatcacctcttatttcttctgtttaccacagacacctttgtatctcctgcaaatatgcctgcacttcctgcgtcctcttttcgatcgccggtgtctgcttttgtcctgccagacgctccaagacctctttttggatccgctcctcccggagcagataagcatgtaagaccgggtgctttttttgcaaaagcataggtccaaagaggaaatcatgctctgctacgctctgcctgcgggctttggtctccggcacatatctgactttcatcataggataatatttgccatcttccaagaccatgtcctcatccacgatctcatagccctcattacacaaaaagcggcgcacttctttcagttctgactggggctgcaagatcaagtctttgacactttgcgcgacctttcttccctcagtcaaaatatgtatgacgatacctccgcccataccggcgatcagtacggtatcgatttcttctgcactggcggcagccagtccatccgaacggcgtgtctgaatcttatcctccaagcccacttccgctatatgggtctttgccgctaaaagcggtccttccccgatatccatagcgatggctgacggaatgatctgctcctgcaccagatagatgggcagatagccgtgatcgcatcccacatcacaaagccggctgcccggtgtgaccaggtgtgccaatgcctccatgcgttttgataaacgtaccgccattactctaagtaatcctttaacttgcggctgcggcttggatgacgcagtttacgcaaagcctttgcctcgatctgacggatacgctcacgggtaacgttaaattccttaccaacttcttccagtgttctggctctgccatcctcaagaccgaaacgaaggatcagaaccttctgctcacgctcggtcagtgtaccaagcacttcttccaactgttcttttaataaggtaaaggtcgctgcatccgcaggtaccggtacattgtcgtcctgaatgaagtctcccagatgagagtcttcttcctcaccgatcggggtctccaaagaaaccggttcctgggagatctttaagatctcacgcacacgctcgaccggcatatccatctctgctgcgatctcttccggggtaggttcacgtcccaactcctgcaagagttgtctggaaacgcggataagtttgttgatggtctcgaccatatgcactgggatacggatggttcttgcctgatcggcaatggctcttgtgattgcctgacggatccaccatgttgcataggttgaaaacttgtaccccttacgatagtcaaacttttctacggctttgatcagaccgaggttaccttcctggatcagatcaaggaaaagcataccacgtcctacataacgctttgcgatggaaacaaccagacgaaggtttgcctcagccagacgcttctttgcctcctgatcgcccagttccatacgctttgcaagttcaatctcttcctcggcggtaagaagcggtactttaccgatctcctttaagtacatacgcaccggatcctctgtgctgatgccgtccggtacggaaaggtcgatcttttctacttccacatcatcgtcatcatccaagatgatgtcgtcatcattatcctgtaaacgcaagacatcaatgttgtttttctcaaggaaatccaaaattgcctcgaactgatccggcaacaactgcatatctttgaaataatcactgatctcctgatactcaaggacattctttctgtctttggcaagttccaataactcgcccaacttcttctgaaattctgcctttttggtttcatcctcttttgcattttcagcattttctgtctttttactgctcttttttgcagtcgttttcttggcggtagtcttctttgcgccggactttgtttctgctttttcctctgtctttacgctttcttctaccacttcttgtgtttctactgtgctttcgctttttttcgccatttttacatcctctctcatgtattttgcccttatttaaaggaaatatgcaatttctccatctcctgaagtctgcgtttatcgtctatgatctgtttcagaccattcatatcggtagggtctaaattgcgccgcctctgctccatgctgttctgcttgatccgcaccagagtctcgcggatggccttttcccagtcggcatcggtttccatcccctgcacatttgtgttaaagatctctgccacctgcctctggctctcctcatcggaaaagagactcacgatacgcgccggattgagttctcccccctctgcaaactgggtaaagagttcccgcgccactgtctcgtaaatgccctcggtaaaatccgccggttctatataatcccggatggctgcatagatctgcggccgttcgaccagccatgtcagaagcagacgctgtgactgcatcatgccgtcctctcgggtctttttcttttgtacaccggacttgagccgctgcggctcacgctcactgatgatcccgcctttggttcccagatgattgaccatctggcgcatattgtcaaaaccaacctgatagcggctggcgatcgcttcgatataattgttgcgttccagttcttccgggaattccaagatccgctttgccacctcatagtaaaaggctgacttgctctccgggtcgctcatgtcatagtcgcgctccaaaatacggatggtaaaaaggaaactattctctgcttcatcgatcctgtgctgatactcctccgcccctaaggctttgataaactcatccggatctttgtgcggtttcatgttgatgaccttacaggtgattccggcttcttttaagatcgggatagcacgcagggctgccttggttcccgcgccatcggagtcgtaacttagatagacatccttgccgtaccgcttgatcatgttggcatgtccactggtcagagccgttccaagggaagcgatcgcattgtcaaagcctgcctgatgcagggcgatcacgtccatatagccctcacagaggatgaactgatcttttttcgtccgccttgccagctgcagaccgtaaagagttcggctcttgttaaagatcatggtctccggggagtttaggtatttgggctctccatcgcccatgacacgcccgccgaatgccaccaccttattgttggcatccatgatggggaacatggcacggttccagaacttgtcatgtgctccccttgcctcgtctatggtcaccagtccgctgtcctttaggacttcatctgtgtagccttttttgcgcagatactggtataggtcattgctgtatttgtcggaatagcccagaccaaacttttgcatggtctccggggacaattctcttttggtaaaatattggtaggctaattttcctttttcgctgcggagcagactgtaaaagtatttggctgcctccttgttgatctcaaagaggatgtttcgcttatccgcttcccgcctggcctcggaagtcatctcctgcttggggagttcgatcccggcgcggtctgccagtgcctccattgcctccgagaaggtgaaattttcatactccatcaaaaaggtaaaaacattgcctcccgcaccacagccgaagcaataatacatctgcttggacggcgtgacagaaaaagaacctgttttttcactatgaaaaggacagagtccaaaataggacgagccttttttttgtaaatgaacatattgtgatatcacatcgacgatgtcattgcgggaacgcacttcctcgatggtatcgttatcataatatggcatagttttgcctcttttccattagtatccgtctacttgccatgatagcggcatgaaaaattcgttgaacttggtaacggcatactgatccgtcataccggcaatataatcgcagaccacacggtcttttgcctcatgcccttcctcgatcatgcgcgtatatttcattggcagttggtctatatgttccatgtaatattcaaacaactggctcagcatacgctgggctttgacttcctctgcctttgcgaccgggttctgatatacattggaaaacatgaacttgcgcagatcgtacattgcctgttccatttccgcagacatagcgatcggctctaagtcattgcgacattctttgtccatgatgtcaatgttgtgcagactgctcatgatcacatcatgaatcagattatccagtcgttctcttgtcgtatgtcctagagtattgcgcagttcctttggaatatcatcctcggtcaggatcaatccgcggatagcatcgtcaatatcatggttgatataggcgatcttatcggataaacggacgatcttgccctccggtgtcgccgggatggtgctggtctggtgattgcggatgccgtcgcgcacttcccatgtgaggttgagtccctcgccgtctttttccagatgctctacaatacgcacgctctgctcgctatgtacaaaaccgccctgacacagttcgttgagcgtccgctctcccgcgtgtccaaacggtgtgtgtcccagatcgtgtcccagtgcgatcgcctccaccagatcttcgtttaagcggagtgccttgccgatagttctggcattctgcgatacctcaagcgtatgcgacatacgcgtgcggtaatggtcgccctttggggtcagaaaaacctgagtcttatttttcaaacgacggaaagacttgcaatgtaagatacggtcgcggtctctttgaaagaccggacgaatgtcacactgtggttcctcccgatcacgcccccttgaattttcactcaaggttgcataaggactgagtgtttcacgctccatatcctcaatggtttctcttatggtcatagtcatgtcctttcaaaaaataaacactctcttattctttcttacgcgccaaaggacattttcctttatttttttgagggacactacagcagggcgctgatcttgtggaacatcaaaagaaagtcttcttctacatcttcaaacggcttggtactaaaagccggtctggtcaagatctcatgctccgggatatccagttcctcattcataaaacatttaaactcatggaaaagcatggcatcatccaccgacttgatctgtgccatttcttcctctgacggacactgccccaaaaacttttcaaagatcatattttgcagtttttcctctgccacaagataggcactcatgtgctgcttgaggggtctggtgatgtcagccatataagcctcactgccatcatggagcagacagcccaaaactacccgcgcgctgtagccgcgctccaacgcctcataagcacatccgaccgagtgctgtcccaccgaatagaactggctgaaatgcccattggcgcgtgtcatcagagaaagcgcatgggcgatgtcattgatatcaatgtccgccatcttaggctccataatggtaaaatgtttctttgtgtatgttgtaatatagtcctgcattgcttatccgtcctcttttatactgtgcctttcttttacacaaaaaaagaaaaacctcaccgcaatgtgtcagatttttcttcttcgcggcactcttcattttgagatatattctatcatatatcctatgtaaaaatgtgccaaaatatcctataaaactaatatgattttcgttccatcaaaaatggctttaactcatgatagactgacgccaccggcagtcccacaacattattgtaatcgccttcgattcctgtgatatgtcttgcaaatatgccctgtatgccataggctcccgccttatccatcggatcttttgtggcaatataatccgcgatttcctgatcggagagtttggcgacatgcacatccgtgcactcgtaaaaggtctttttcccttctttagataagatcgtcaccccggtaaagacctgatgaacgcgaccggataaaagatgcagcatacgcgcggcatccgcctcgtcctttggtttgcccaaaacaaagaatttttcttcttgtccttgttccaactgcttgctgtcagcagactggcggacgcatacgatggtgtccgctccgatcaccacggcgtcttctttttctgcatctgtcaaagtatcccagacagcctgcgccttgatctcggataattcctgtccgatctgccccggctgacttgccgtcgtgaactcctcggctccactggtacgaacctcaaactccagtccgatctgttccaataattcttttcttctcggcgatgccgatgctaaaatcagtttcattgtctatttcctatccttatttttcctaatataagaatatcatagcgaacaagatggcattttgcaatcatcccatagccccggcttcctccgccttgtccatgacatcattttccacaatggcggaaagtttttctttgatgatgcgggagttttcccctgcctggatcgacaagacgccctcgactaccagttccatggaaagtgcttctgccgctccgctcttttccagtttgcgtgcaatgggaatacagatccagttggcaatgatggagccatacagggtcgtgatcagtgccagtgacataccggaaccgattgccgaagagtccgatcccatggtcttcatcatattgatcagcccaatcagggtgccgaccatgccccatgccggagcataggcgccaaaatcctcccagaacttcacacgttttttgttacattcataggtgtgggtcagttccgcttccataatatctctgaccaattccgggtcggagccatccacgaccaggcgaatacctttttccagatagggattgcccagatcatgcgttgtctcctctaatgccagcagaccttcttttcgcgcggtgtcggacatttgcaagatcgtttttgtcagctgcctggcatcttcttccttattttgaaatgcaaccaagataccttttgccccataggcaaaatcttcaaaggaatcagccgtcgtaagcaccgcacacagggcgccgcccaccgtcaaaataaaggatggcaagtgcagatactgcacgatcgtagaaagtccaccgttggttgccacgccaaaaatgatcgccataaagcataagaaaaatcccatcattccagccttgttcagtttcatcttttatcactcctcgtttccttcgtttgataaaagcatactgaataggcaccgtagagaaaacctacgaaccgtagaataactctactcctgactctaccgcatacgttgttccagcacgaacaggacaagataggcaatcagcgcatataggacagacaagatacatactgccagattagctcccagcaaagggatgttctgcacgtttccgacaacgcagaccaccgccatcagactttcgcatatgccaaccgggagtacgatctttcgtagaaaaggtatgacttctctttttgtcctttttccggaaaagagcgtcagtgccgtacagatacaagccagaaccaaaagcgacggcagatcaagataccatgtcatattggatcccgataccggaaaaagtccagccacgcccaagaccaataaaatgccgcccaggagcagagacattctgttttgctttttggtctcgtgattttcctgcaaaagataaagcatattgtcctctgcttttgggggatattcctccggcggaagtttttgaccagaaagcaactcgttgatcgtaacatccaaggctgtgcatatattttccagataagatacatccggtatgcccttgcccgtttcccttaattaaagatattgttgggtaaaaaagaaaggtcagtcgattttgccaatgaagcggtagtagatttctacttcctgctcacggcttccgtcctcgcccttgacagcttcgtggacggttattttttcaattagagtgttcagaagttcggcggtcagctccacagggttgacatactgtttcatcagggcaatccacttttcagcgtccgctgcggtctgtacggcggcttccatcgtttcgtgaagctgccttatttttgtttcaagc

SEQ ID NO: 12507 - DNA, 35828 bp, Unknown
  gut microbiota DNA sequence
aacaaaaagagatctttctgctggtgataaaataaaggttttacccccatggggtctcggaagaggacgaccttgtggagccgtacatccgcgatggcaatggcatagccgccccgcaagagtgttgcaaagcgttcgccgtaaagatgatagagcgtaagcaggatatccggccggctcatatttctagcggaaatattctgactctccaactgggatgccagttcatcataattgtagatgccgtcatcgcagacgatatgcagatgtccaagccctcccttgccctgtgttgggacatttttccggctcatttgattggtgtatagggcattatacatgagcacgccatcgctggtggtcatgcgatatgcctgatccggtccacggtgggacaggctctttagtatcttctcagcggtctgttccagtgcgcccagacgctgcccctgcctgaattcaggcgaaaaaaatccggcaatactactcatagttcctccaataaaaaattactggaataatatatgagagattgccggaaaaaatgcaggattatgcctgctgtgatgcagcgtaggcttctgttacggctttggctaactgatcgccgcaggaagtgccgcgcccattgcaggaaattccgctgatgcgtcgtacgacttcgtcaacggtcatgccctctaccaattttggaatggcttgcagattgccgttgcagccgccggtaaatttgacatcttttacaatgtcgccatctaatgtgacttcgatctgagaagagcaggtgcccttggtcttatataagtaactcatatgatcttcctctctttcttaatacatgtatctgattatacggccgacgaatgagattggcaagatgtaaaaatcaaggctttttattgtttccatagaaaaagagtgttacaataacgccatatgggtgcaatcctgccccaagcaagtaatgagtgtttaaggagaagaacatgggactgtttgacaagatatttggaacacatagcgaacatgagttaaagcgcatctatccgattgtggacaagatcgaggggatgcgagaggatatggtcgcattgagcgatgaggaattgcgtgccaagacagatgaatacaaaaagcgtctggcagatggcgagacactggatgatcttttgccggaggcttttgcgaccgtgcgtgaagcagcgcgccgtgtgcttagcatggaacatttccgtgtgcagttgatcggtggtgtcatcctgcaccagggacgtattgctgagatgaagacaggtgaaggaaagactttggtttctaccctgcctgcatatctgaatgccttggaaggaaagggcgtgcatatcgtcacggtcaacgactatctggcaaagcgtgatgcggagtggatgggaaaggtacatgagtttttaggattgacggtcggcgttgtcttgaatgatatgtcaagagaagaaagacaggctgcctacaactgcgacattacctatattaccaataatgaactgggatttgattacctgcgtgacaatatggtagtccgcgagaaccaactggtacagcgcggtctgcattatgccatcatcgatgaggtcgattccgtattgattgatgaagcgcgaacaccgcttatcatttccggacagagcaacaagtccaccaagttatatgaactgtgcgatatgcttgccaagcagttacagcgtggcgaagacctgccggaattttccaagatggatgccatcatgggaatcgagcaggaagaaaccggagactttattgtcaatgaaaaggacaaggttgtcagcctgacccaggaaggaaccaagaaggtcgaggagttcttccatattgacaacttatctgacccggaaaatctggaattgcagcacaacgtcattttggcactgcgcgccaacaaccttatgttccgcgatcaggattatgtcgtatccgacgatcaggttttgatcgtagacagttttaccggacgtatcatgccggggcgtcgttattctgatggtctgcatcaggcgatcgaggcaaaggaacatgtgcaggtcaagagagagagtatgactcttgccaacattaccttccagaatttctttaataaatatgataaaaagagcggtatgaccggtacggcgcttaccgaggagcaggagttccgtgatatttacggcatggacgttgtggagatcccgaccaacaagccgatcgcgcgtaaggatctggatgatgccgtttataagaccaagaaagaaaagtaccatgcagtcgtagaggaagtcaaagaggcttatgccaaggggcagccggtactggttggtaccattaccattgatatttcagaggagatcagccgactcctcagcaaagagggcattccgcacaatgtattgaatgccaagttccatgaaaaagaagcccagatcgtcgcagaggcaggtcgtcacggggcagttaccattgcaaccaatatggcgggtcgtggtacggatatcaagttggatgatgaggcgaaggcagccggtggtctgaagatcgtcggaacagagcgtcatgaatctcgccgtattgacaaccagttgcgcggtcgtgccggtcgacagggagatccgggacagtctcagttctttatctctctggaagatgatctgatgcgtctgtttggatctgagaagttgataaatatgttcaattctctgggtgttcctgagaacgaacagatccagcacaagatgctcagcgatgccatcgaaaaggcacaaaagaagatcgagagcaacaactttggtatccgtaagaacctcttggaatacgatcaggtcatgaacgagcagagagaactgatctacgcacagcgccgtcgtgtgctggaaggcgagaatatgaaggatcagatcctttccatgatcgcagacaaggtcagcgagagtgtcaatatgtgctgcacagatgaggttgcaaccgaggattgggatcttacagaattaaaccgtgtgatccgtcagatcatcccattacagccgatcacttctgagaccttagagggtattaagaataccaagcagttgatcgagaaactgacggatgaggcaaatgccttatatgcagccaaagaagcggagttcccggagccggatgccttccgtgagatcgagcgtgtcattcttttgcgtgtgatcgaccgcaagtggatggaagagattgacgatatggagcagttgcgccagggtatcggtatgcaggcttttgcccagcgtaatccgatcgatgaatataagatggcaagttatgatatgctggatgccatgaatgatgctatccgtaccgagacggtacagatgctgtaccgcatccgcattgagaaaaaggtagagcgcgaggaagttgccaaggttaccggtaccaataaggatgaatcagcaacaaaggcaccaaagaagcgggcaaatgtcaaggtatatccgaatgatccgtgtccttgtggcagtggtctgaagtacaagcagtgctgcggacgcaaggcataggatagatgcagggcttcctgcaagtcgtgaagcccatgaatgaagaaaatgacgattggagtcaaaaaaagaggaactacatttccactgtggggtgtagttccttttttgacataagccaagatattttgcatgcaggtcatccgcaagatgcaggaatgtttgcatgtttacggagcactggtctcctcgacgactggatccggctttggcggataggtgaagccttcgcccacaacagcactgacacggttgacgaccataaaagcggttgggtccatttgatgcacgatacgctcaacgcggctcaactgacggctggaaataacggacatgacaacttccacatccttgcccagatagccggagcggcctttcatcatggtaacaccgcggtcaagatcttgtaagatgaactgacggatctcgtcgctcttgtcggaaacgatctggacttccacacggttctttccgatcagactgatcttatcaatgagaacggaatatacgataaccagtacgacaccatataagacattgtcacccggggtctgcaaagcctgtaaggcgaggatgatgacatcgacgatatagacgccgaccgagagcggaatgcgcaggtatttgttcatcaaaagagaggggatatccataccaccggaagatgctcccgcacgcaggacaagaccgacaccggcgccgatcaggataccgcccatgatggtgcataagaaaatatcattggtaactgcatgcccgtgcagcgcctgttccataattgccattgccagcggatagcagaaggtgctgaggatcgttgagagggcaaagcgtttgcccagaaaaatgagccctacaaccagcatgacagcgttgatgataaagacatagacggaagtcggtatgccggtctgccggctcaaaaacagtccgataccggaagtgccgccggtgatcagaccggaaccggaaacaaacaaaacaaagccggctgcgtctaagatatttcctatcaggatcatgagtaatcgaagcaattctttagatttcctattcatgttacgtccctttctatactatatgtgatagaatgctatggtttcccacacgtttgctattatatgacaaatgggtacaaaataacaatagtagaacaaacattcggtttttcctgtacttttgccagtcttgatgttatattataggaagaatatgtgcaaactagatagtcaggagtatgaaggatatggatcattttgaactgcattcccaatttgaaccgaccggagatcagccgcaggcgatcgcagaactggtcgcgggctttcgtgagggcaaccagtgtcagaccctgcttggtgtgactggctcaggaaagaccttcaccatggcgaatgtcatacaggaattgaataaaccgacactgatcattgcgcataataagacgctggcaacgcagttatatggagagtttaaagaattttttcccaataatgcggtggaatattttgtatcctattatgattactatcagccggaggcatatgttccttcgaccgatacctatattgccaaggattcctccatcaatgatgagatcgacaagttgcgtctgtcggctacggcagccctgacagagcggcgcgatgtcattatcatatcttcggtatcctgcatctatggtattggtagcccggatgactaccagaatatgatggtttccctgcggccgggggatgagaaggatcgggatgaggtgatccgacaactggtagatatgcagtatatgcgcaacgacatggattttacccgtggtacttttcgggtgcgtggtgatgtgctggagatcattccggcggatacctcggattatgcctatcgtgtggaatttttcggggatgagatcgatcgtatcacggaactggatgctcttacgatggaagtacggtgtgagatgaatcatgtcgctctttttcctgcctcccattacgtcgtaccacaggacaagatcaacaaagcctgtgtcgagattgaggaagagttggaggagcgcgtgcgctttttcaagggagaggacaaattgatcgaagcgcagcgtatcgcggagcgtaccaattttgatgtggaaatgctgcgtgagacaggcttttgtagtggcattgagaattattcccgtcatctgaccaatcagaagccgggagagccgccacagtgtcttttggactattttaaggatgattttctgatcattgtggatgagtcccatatcaccctgccacaggtgcgcggtatgtatgccggagaccgggcgcgtaagacgaccctggtagattatggcttccgtctaccgtcggcgctggacaaccgccctctgaatttttcggagtttgagtccaagatcgaccagatcttatttgtgtcggcaacaccggcagagtatgaggaagaacatgagatgttgcgtgcggagcaggttatccgtccgaccggtcttttggatccggaggtagaggtgcgtccgatcgagggacagatcgatgacctgatcggcgagatccgcaaggaaacggcacagcgcaacaaggtgctcattactacgctgaccaagcggatggcggaggatctgaccgattatatggcagaactcggtatccgtgtcaaatatatgcattccgacattgataccatggagcgcgcggagatcatacgagatctgcgactggatgtctttgatgttctggttggcatcaatctgctccgtgagggactggatatcccggagatcacgcttgtggcgatcctggatgcggacaaggagggcttcttacgttccgaacgttccctgatccagaccatcggtcgtgcagcgcgaaatgcatccggccatgttatcatgtatgcggacaagatcacagactctatgcggctggcattggatgagaccgccagacgtaggcagatccagcaggcatacaatgaggagcatggcatcacaccgcagaccatccagaaatcggtacgtgatctgatcagtatttccaaagaagttgccaaggaagagatgcagtttgagcgtgatgcggaagagatggatcgcgaggaactggaaaaacatatcggtcagatcaagaagaagatggaaaaggctgcggcagaacttaactttgaggctgcggcagaatatcgtgaccgcctgatcgaactgaaaaatatgctgcgggatatgtagcagataaatattaagatagagataagatagaggtttagaatcatgaaggacacaagaaaatacatcaagatcagaggagccaatgtgcataatctcaaaaatatcagtctggatattcccagagattcctttacggtattgaccgggctcagcggatcgggaaagtcatctttggcttttgataccatctttgcagaaggacagagacgatatatggagtctttgtcttcttactccagacagtttctgggacagatggaaaagccggatgtggagaagatcgagggattgccgccggcgatatccatcgaccagaaatcgaccaaccacaacccgcgttctacggtagggacggtgacggagatctatgattatttccgtctgctctatgcgcgtatcggtattcctcactgcccgaagtgtggacgggagatccgcaagcagaccgttgatcagatggtcgatcgtatcatggcactgccggaacgtaccaagattcagttattggcaccggttgtgcgcgggcgaaagggaacccatgaaaaactctttaccaaggcaaaaaagagtggctatgtgcgtgtgatcgtggatggcgatttatatgatctgtctgaggatatcgttctggaaaagaatatcaagcacaatatccagatcgttgtcgaccgtctggttgtcaaagagggcattgagaagcgtctgaccgattcgatcgaaaatatcctgcacgtgacctcgggattagtcgaggtggatgtcatcgacggtgagaacttcatgatgtccgaaggctttgcctgcccggattgcggtatcagtgtagatgaggtggagccgcgtagtttctctttcaacaatccttttggagcctgcccggaatgcttcggacttggctttaagatggagtttgatgaggatctgatgatcccggacaagcgcctgagttttaatgagggctgtgtcacggtcatgggatggcagtcagcatccgacaaaaagagtttcacgcatgcgatcctggttgcactggcaaaggaatacggattttctttggatacgccttacaaggacctgccggaggagatacgccatcagttcatctatggatttgaccgcactgtgccggtgcattataaggggcagcgcggtgaaggcgtttatgatatctgttttgagggattgatcgccaatgtgaaccgccgctatcgtgagactcattcggagaccatgaaaaaggaatatgaggaattcatgtatatctgtaagtgcccgctgtgtaagggacaacgtctgaaaaagtcctctctggcggtcactgtagcagataagaatatctttgaaatgacggagctgccgatccgcgacctgcaggtatttttgcaggacatgcagttgagtgatcagcaggaaaagatcgggcaccagatcttaaaggagatccggggacgcgttggttttttggtggacgtaggtctggattacctgtccttgtccagagcgaccgggacactttccggaggagaggcacagcgtatccgtctggcgacccagatcggttccggtctggtaggtgttgcctatattttggacgaaccgagtatcggtctgcatcaaaaggataatgacaaacttctggcatctttgaaaggtctgcgtgatttgggcaataccctgatcgtggtcgaacatgacgaggataccatgctggcggcagactgtctggtggatatcggaccgggggcaggcaagcatggcggcgaggtcgtagcgatcggtacgccggaggaagtcatggcaaatccgaattcaatcaccggggcatatctgagtggcaaaaagacaattccggtgccaaaggagaggcggcagccgacaggatatctgaccatccgtggggcaaaagagaacaacctcaagaatattgatgtgcagataccgcttggcgtgatgacctgtattaccggtgtgtccggttcgggaaagagttcgctgaccaatgagatcctatataagcgtctggcaaaagaactaaaccgtgcccataaggtgccgggcaagcatgatgatatcgaggggatcgaccagttggataagatcattgatattgaccagtcgccgatcgggcgtaccccacgatccaatccggcaacttataccggtgtgtttgatatgatccgtgatctttttgcggcgacagcagatgccaaggcacgcggttacagcaagggacgtttcagttttaatgtcaagggcggacgctgtgaggcatgttccggagacggtatcatcaagatcgaaatgcatttcctgccggatgtctatgtgccgtgcgaggtatgcggtggcaagcgctacaatcgcgaaaccctggaggtcaagtacaagggcaagtctatctatgatattttggatatgacggtggaagaagccttacatttctttgaacatgtgccatctatccatcgtaagatccagaccctttatgatgtaggtttatcctatgtaaaattgggacagccgtctacgacactttccggcggagaggcgcagcgtatcaaactggcgaccgaactcagccgcaggagtacaggacgtaccatctatgtattagatgagccgaccacggggctccattttgatgatgtaaataaactcgttaccattctgcggaaattatccgagggtggcaatacggtggtcgtgatcgagcacaatctggatgtgatcaagacggcagattatattattgatatgggaccggatggcggagaccgcggaggcagggtcgtagcctgcggcacacctgaggaggtggcacagcatccgacttcatatacaggacaatatgtaaaacgttatctggaagcagataagaagcgcttataagggcaaaacaagggcaatccctaagaaatactccgggattgcccttgttctttctgcaagatgcaataaaaaaggaaccgcaaaagcgattccgttatttttggggagtgctccggaagcaaagcctccggagctgagttatgaaaaatatattagcactatttgctagtacgattattataatatccaagaaatgtgtccattatgtgaaaaaagaataaaaaaataaaaaataaatataaagatttgtttaaggttatcttcagaaaaaattcattgaaaaatggtaacatttgtatataattgaaattagaatgcaaaactatcattaggtggactaggttcacgtttcatatacaaactgaaaggagaaacagtatggtttcaagtgatatcggaattgatttgggtacagcaagcatcctggtttacgttagaggaaaaggtgtcgtattaaaggagccgtccgtggtggctttcgatagagataccaacaagatcaaggcgatcggtgaagaagcacgtctgatgttaggtagaacaccgggcaatatcgtagccgttcgaccactgcgtcagggagttatttcagattatacagtaacagaaaaaatgatcaaatacttcattcagaaggcaatgggcaagaagagttatcgcaagcctcgtatcagtgtctgcatcccgagtggtgctaccgaggtagaaaagagagcggtagaggatgcaacctatgcagcaggtgccagagaggtttccatcattgaggagccgatcgcagcagcaatcggagccggaatcgatatttccagaccatgcggaaatatgatcgtagatatcggtggtggtacggcagatatcgctgtgatctctttgggtggttctgttgtcagcacttccatcaagatcgcaggggatgactttgatgaagccattgtccgttatatgcgtaagaaacacaatcttctgatcggtgagcgtaccgcagaagacatcaagatcaagatcggtacctgttatccactcccgacaccggagaccatggatgtcagaggacgtaatctggtcacaggtttgccaaagaccatcgaggtttcttctgaggagaccgaggaggcactgcgtgagccaaccttacagatcgtagaagccatccactctgtactggaaaagacaccacctgagttggcggcggatgttgctgaccgtggtatcgttctgaccggtggtggagcattgcttcgcggcttggaggaattgatcgaagagcgtaccggcatcaatacgatgacggcagaagaggcaatgacttgtgttgctatcggaaccggtaagttcgttgagttcctttccggcgatcgttctgaagattaaatttcagatcttatataaaaaatacgacagatctatccgatatatagatagaagtcaatatctagttttgcttgcgtaggaggaattatggtaaaagggctgtacaccggatataccggcatggtcaacgaacagaaacgcttggatgtgattgccaataatctggcaaattccgcgacgaccgggtacaaaaaagaaggtatggtaaatcagtcttttgatcatcaactggcgatcaagatcaaggatacatcgaattatgatatgccgcagcgtatcggttcgattagtctgggcgtgaaagtgggagagacctttacaaactgggatcagggcagttttcagatcacagacaatatgtctgatctggccctttccggtgagggattttttgccatcgcttttacatccaaggacggagagacttctatcaaatataccagggatggtgctttttctgtagataatcaaggatatctgcgcacatcagacggagattatgtcctgaatcggatcggtgcgctgaattccgatgatgcacttgccaattatgtacggattgacccggatcagtcttacgagattgatgaacagggatttatctatcaaaatggtcaggttgtagaccgtatcggtgtggtgcagtttgcagataataattttgtttcaaaatatggcgagaatctatatgatctggttccgggcggacaggtcatcgccagcgatgcttccgttgagcaaggatgcctcgaagcttccaatgtcaatgtgatagatgaaatggtcgacatgatcacggttgccagagcctatgaggctgggcaaaaggtgattcagaccgaggactctacactggacaaggcagtcaatagcgtaggacaggtgtaaaattcctaaattgacaatgccgatgagactgcatgacagtattcagtcatgctgacagagaatttggaaaggagatgcattcattatgatgagagcattatggacaggtgcgtcagggatgaaggcgcagcagacgaacgttgacacgatcgccaacaatctcgccaatgtcaataccgtgggatataagtcccaatctacgcagttcaagtcacttttataccaaacccttcgtacagagacgacaacagcaaacggagaaaataaacctacgacagcacaggtggggttgggtgcaagagtggcatctaccaatacagactatacacagggaaccatgcaggcgaatgccagcaagacggcattgtgcatttccggttccggttttttcgcagtgcgtggtgcagacaatggaacctattataccagaagtggtgattttacatgggcactggataatatgggcaatcgtgttctggctacatctaagggacaggaagtcttggattatcagggcaatccgatcatgttgccggatggcgcttcgggcgatgcggtttcctttggaacggatggttctgtggcatataaggcagcagacggcacctatataccgaccgggcagcaggtggcattgtaccagttcaacaatccaaaaggattggaaaagaccggggacagcctttttgaggcaacccaggcttcgggtgtaccgctgagtgagattgcgaccgccggcgtgaccagaagtacgatcgcacagggctatttggaagcatccaatgtcaatgtggcagatgagatggtcaatctgatcgtggcacagagagcctatgagatgaactccaaggcgatcacgacctccgataccatgttggaacaggcaaacaatctcaagcgataggaggagatagggtatgagtttttcagtagatggtttatcttcttattacgatacggtttcttcaaatgcacagtcgtccagcaggtcggacaaggcaaccagcgcactttccgggctttcttctgattcctcagaggaggatctggtaaatgccgtagagtcttttgaatcctatatgttagaacaggtcatcaagcagatgaaggacagtgtgacttcggatgatgatcaggattcgaccatgagccagtataccgatatgtatatggatgcgacgatccagcagcttgcaggcgagatggtatcagaatatggcggtagtctgacagaccaactggtcgatcagatgaagcgcaattacggaatagagtaggataggactacataatcgatggaagatttacaaggctatgtggaacacatcgtgttccgcaatgcggataacggttataccgttctcaatttaataagcgaagaagatgaaattacatgtgtaggaatcttccctgtcgtcacggagggggagattcttttattacatggggaatatacatcacatccgacctatggcgaacagtttcagatgaaatcctatgaagcaaaggcgccggaagatgtcctttccatggagcgttatctggcatccggtgccatcaagggaatcggtgtggcactggcatcccgtatcgtgcgacggttcaaaaaggacaccttccgcatcatggaagaagaaccggaacggcttgcggagatcaaggggatcagcgagcgtatggcgatggagatttccagtcagatggtagaaaagaaagacctgcgggatgctatgatctttttagaaaaatatggcatcacgagcaatctggcggttaggatctatcaggcatatggacaggaaatttacagtgttattcgtgaaaacccctaccgcatggcagaggaagtgccggggatcggctttaagatagcagatgagatcgctgagcgtgtgggtattcgtaccgattcggactttcgtatccggtgcgggatcctctattgcctgacaggggcatcgacactggggcatacttatctgccgcgggaagaattgctccgctatgccaatcagttgcttggcgttgcatcggagcacattgaggaacatgttatgaatcttgccatggatggcaaggtggaattaaaggatgagggcgtgtatgccaagaacttttaccgtatggaacaggtgtcggcaggacttttacacgctttgaatgagacctatgatgtgacacctgccaaactgacccaggcgatcgcgagaatccagaaagaagaagatatggaattggatgagtggcaggcagaggcggtcagacaggcggcgacgcatggcctctttatcctgaccggtggaccgggaacgggaaagacgacgacgatccgagccatgatctcttatttcgtgggcgagggctatgatatttttctggcagcaccgacagggcgcgcggcaaagcggatgagtgagactaccggatatgaggcaaagaccatccaccgtttactggaagtcaatggggcgatgagcgaggcgaaagatgatgccaaggcggtcggcggtttgtttgaacgcaacgagtccaatcctctggaggcggatgtcataatcattgatgagatgtctatggtggatatcactctcctgtatgctctgttaaaggcgatcgggcatggaacgcgtctgattctggtgggggacatcaaccagttgccgagtgttggaccgggcaatgttctgcgggacatcatagcgtcagagtgctttccggtcgtgaccctgcaaaagatctttcgtcaggcgagtcagagcgatattgttgtcaatgcgcataagatcaacgacggacagcatatcgtactggataataagagccgggacttctttctgctgaaacgttatgatgcagatgtcatcatcagtgttatgctacagttggtcaaacaaaaaatgccaaaatacgtagacgcgacaccgtatgatgttcaggtgctgacaccgacccgcaaggggttactgggggtagaacgtctcaatggcattttgcaacaatatttaaatccaccgggaaagggaaagaaagagcatcaggtgggtgagcggatcttccgtgagggtgacaaggtcatgcagatccgcaacaattaccagttagaatgggagatccgcagccgttatggactggcaatcgacaaaggactgggcgtattcaatggggatgttgggatcattcaggagatcaatgactacagcagcacggtcagtgtactctatgatgaaaataaattggtgatatatccttttaagggattggacgaactggaattagcctatgcgatcaccattcataaatcgcagggaagcgagtatccggcggtggtcatgcctttgctgccgggaccgcgtatgcttatgaaccggaatcttttatatacggctgtgaccagggcacgcaagtgtattaccattgtgggggatgaaaatgtaatttaccggatgatcgataatacgacgcaacagcgtcggtattccggcttgaaagaaagattaaaagaggcctcgctcatataagcgaagcctctgaaaaatatcttttattctgctgtatcatcactactgattcttgtagtggtggatccaatttcgtaatttgcaaaataatcattgatctcgtggaaagattttggaaatgtcattccaagactttcggcacgagatgcgttgtagagtttgacgttctcggcaggagaattggtgatcttgatatcacccggatctgccccgtcgactaaaatgcggtagaccatcttgcctgcggcatagcccatagcataagggtctttatacatagataccagcgtctcttgtccgagtgaggcatcaccaccgacggttctggtaccggatgccgtggcgatatcaacgatcgtctggacttcgctggtcaactggctttcggcaggaaggaagagaacgctgcactcgttgcaggcgtattgtactatgtcttctaaggaagcatccgctgcaagcggttctgcgttggctatggataagtccggcgtccaggtagcagaagtgctggcaacgtgagcactgcttggagaaaagataccactcaaaagatcattccctgcgaaggaaactacgtcattattgctgccttctgtgacagaagaagcgatctgcttggttggagcaatggcggtcgcatcggtcagttcatcactgatgctgctgtcgatatcatccgaaggaagtgcgtattctttccaagggatacctgcctgatccagatatttttctaaaagaacattctggtaaatgccgtccgtatcttccgggttatacaaaagcccgacagactgcagatccggtgttgcctcgatcaggagtgataattgctcctccagatttggcttggatgaaataccggtcacattggtacctgtttttttgttccaggaggaatcagaggcggtggctaagtgaaggacactctggtagtccataacagcagcgccgacgatcggaatgtcctcggttgccgtggcagcggaagacaggctctttttgccattggcaaagatcagatctgtgccgccggtgacataatctgcgcagatgctgtccgtgccgatcgtatcgttggcgaccatggtcgtgacattgacatgagcagatccgaaaagatctgtcagggcatcgttaaagccctgtgagatattgttgtaatagtcgctgtcttcatcctgacagagactgatattatatactgtgtcatcttcttccggcaggggggtatagccggaggacttgtccttgccgcaagccggaagtgatactaccagaatggcggcgagcccggtgcaggcaaaacgttttatatttagcatagttagaaaaacctccatatgaaactgttatacagcatttttaaataactctgaaattacattttaaagagaggggagaaaaaagtcaatgaggggtcatagaaaatacacactgccgggcaaattgctggaggggatccgacaggaaatcttcccggaacgctgtccgggatgcaatgagatcctgtttgccaaggagaaagaaaagggcttttgccaggcatgtgctgggaaaatcatttatataggagacgggggctgcgtcaaatgcgggaaagccctgacagatcttacgcaggatctgtgcggggattgcgggaaaaaagcgcatgcatttgtgcagaacagggcggtctatgcctatgacggtcctatgaaagaggctatgtatcgctttaaatatagtaattgccgtgcatatcggcgtatttttgcaaaggatgcctggcgtatctacggtgactggctcagaaatttggaggtggatgcggtcgttccggtgcctatgtatgcgggaaaagagcggcggcgcggctacaatcaggcagaggtttttgcaggggagatcgcagttctgatggattgcaggatggaaaggtcactggccgtgcggaccaagaatacggcaccccttaagaacctgaatgatcagagaagaaaaaagaatttggaaaatgcttttaaaatcagaaaaaatggtgtaaaattaaacaaaattctgttaattgatgatatctatacgacagggagcacattggacggcgtgaccgaggctcttttggcatcgggcgtgcgtcaggtctattgcctgacggtctgcgccggcagggaaaaacatgtgtgactgggaggaggaaaatatggacgtacgaaattgcagacaatgtggcagattatttaactatctgggaggaccgccaatttgtcaggcatgcagagaggctgtagaggagaagttccagcaggtcaaggaatatgtgcgcaataatccgggttccaacatccagatggtagccgaggataatgatgtcacggtacagcagatccgtcagtggatacgtgaagaacgcctggagttttcagcagactcacaggtgggaatcgaatgtgagggctgtggtgcttctattcgtaccggacgtttttgcgaggcgtgcaagagccgtatgcgtggggattttagcaacgcgatccagaaaccggagccaaaagaagatctatccaagaacaaggctctgcgtgatgcagacaagatgcgtttcttaaaaaaataaatatgagcaggatcataccccttttcactcggttggagaaggggtatttttgtgtttttcttgtgtattccccctgcgaggttgcgccgagatttgattatgttataatgtgatgtagtggtgagcagtgtttgtatgcgcacgagcaaggaaaatgcaggaggaagccagatgctaagcgaacagcgtgtcatgcatatgacaaagatggcgatgatcgaagacaaacaaggccgcaaacttggtccggcaatacattatcgcaaacgtgattatctttctctttgtaccttgggcggtgtctttctgggtactttgatctatgcggcactttatgcaggtcttattgtcctgctggccagcactttggtagtcaatatccatctggtcggattgatacttggcattttattgggattggttctctatatattatatatgtactattatcttcgtatggtgcgcagacacgcagccaagcgatatgacgagggtgtgacgcttttgcgccacttgcgcaaggactatcgggaactgcgcgagatgtatcaggaagaggacctgtcgaaaatacctgagggatgggactaatatgacatttttaatacagatacgaacgaagatcaggcattttatcataacaagagaagaatgggtggtacgcttgctccgctttgcgatcgtgctggctgtgctcttggtcatgaatcggtgctttggttatcaaaagatattgaatcattggtgggtctctgtggtgatcgcgggtatcagtatgctgcttccgctggcagggtctacttttattgtgttttttgtgggactcatgcatctgatgaccttgtcgacagatgcagcggtcatagccttggttctgctggcgatcagttatgcggtatctgcatattttcggtcagatgatacttataatatgatggtcataccggcttgccgttatctcaatatcccctttgtcgtacccatggaagcgggtctgatgcgcagcatacatgaactgcctacgatcatatgcggaagtgtattatcatactatctgaagacggtcgtggaaaatgcctcatcttttctggatcccaatacggatctgagcgcggcagagttattacagggacagatcctaaacaacagcatgttttacatctatttggtggcgatgacggcaatgtttctggtggtctacaccgtgcggactaagggcatagaacatgcatggctggtgggcgtactttccggtgtagtcgttgaatttgtgctgatgctggcaggcatcctctttaccggagaaaaggaaaacattccgcttctggtgatcggcaatgttgtgaccctgatcgtgggacttggcatggtattttttgccagaggatttgattatacacgtaccgagcatgtacagtttgaagatgatgaatattattactatgtgacggcagtgccaaagatgcacataccggagcaggaaaaagagatcaagcgtattacttccgagacattaccgctcccggtggatgatctggaagaaacagaagagacgcaggacaattaagaaaggggtgagatgatatggacaacatcataaatagtctggatgcattctttggagattattttggaatcaattttccgaatgtgcagatcacggatatcgtggaaattatcatcattgcttttttcatttatcaacttttgatctgggtgcagaacacaaggacttggatgctctttcgaggtctgctggttgttgtagcattctttattttggcagccctgttccagatgagtacgatcctctggctgggcgaaaaactcctgaatgtggcactgatcatggtgatcgttgtgttccagccggaactccgtaaggctctggaagacctggggcgacgacggctgtttacttttcttgccaatctgggtgttggcaagagtatttccaagcgttttgaggataagaccatcaatgacacggtcatggcatgctttgagatgggagccgtcaagacgggagccttgatcgtggtagaaaaccagatgcgcctggatgaggtggaaagaaccggtatcacactggatgccgttctgaccaggcagcttctgatcaatatcttcgagaaaaatacacccctgcatgacggcgcgatcattgtacgaggcgatcgtatcgtggctgcgacctgttatctgccgttgtccgagaatatgaatttaagcaaggcactcggtacaaggcatcgtgcggcgctgggcatcagcgaggtctgtgatgcgctgacgatcgtggtttccgaggagactggcggggtatccatagcgcagaacggacatctgacggagaaagtgactgacgatcagttaaaagaaaaattgatcgagttgcagaatccggtaaaagatgtagacgagaataacaaaccgcgtttgggaaggagggtaaaagatgaagcagagcataactcctaagatcaaacgaatgtttttaaataactggggactgaaactgttagcacttttcttttccatcctattgtggctgatcgttgtcaatgtggacgatccgacccagaccaagacttttacgacgagtgtaaatgtggtcaatgcggatgttctgaccgatgccggacgctactatgagatcccggagggtggcaataccgtcagtttccgtgtgacggcaaaacgttctgtgatggaacggttgtcgggatctgattttacggcaacggctgacatgaactatttagaggatgattcccgtgttcctgtgacgatcacggtcaacaataacaacagcagtattacggtctcagccaagagactgtatctgcaagtcatcatcggtaataaaatgacgactaagcatgatgtggaagtcgagaccaacggcaatccggcggagggctgcgtgatcgacaagacggaagtggatccatccagtgtgaccgtatcgggaccggaagatgtagtcagcaccattgcgaaagtggttgcatatgttgatgttgacggtgtcaacgaagattttgatacggatgcatccttgcattttctggataaaaacggtaatgagatcgatcagagccgactgaatgtaaaccatgagacggttaaggtcagtcttacgatctcccatatcaagacagtagcggtacaggtgcagacgacaggaagtctgccacagggattgtatctggagtctgtcagtgtggatccggacacaatcgagatcaccggagaggcagatgtgcttaatgagatcacggagatcacgatcagtggcagtgcactggatctgtccaaactcacatcgagtctgacgactaccgtggatctgaatacttatctgccgagcggagccaaggtcgcagacagtaatgctgcgcaggcgacggtcaaggttaacgtatccggggatgagacaaagacttatcgtgtgccgactgccaatctgacgatcaaaaatctggaagatggcagcaaggcagtatttgatgctacaacagtagaagtaaagattaccggaaaggcatcggatctggcagaccttgtcgcagagaatatcacagggtcggtggatgtcagtggtctgggagccggtaagcatacggtgtctgtcacgttggatctggacagcgggatttcagcgacggcagcaacgacgaatataacaatcacaacggagtaagaaggagttaaacatgggaagattatttggaaccgatggcgtaagaggagttgccggttcagaacttacgatcggactggctacgaaactggggcaggcgggagcatatgtccttaccaaggagcaggcacacaagccaacgatcatcgtaggctgtgatacgagaatatccggtggtatgctggcaagtgctctgatggcaggcatctgttctgtcggtgcagatgcgattttcgccggtgttatgccgacacctgcgatcgcgtatctgacaagaaaacacaaggtggatgcaggtgttgttatctctgcgtctcataatccaatggaatttaacggtatcaaatttttcaatggcgagggctataagttgtccgacgctctggaggatgagatcgaggctctgatcgccaacgatatgaaggatatcaatctgccgaccggatccggtattggcaagatcgaataccgcttcgatatgattcgcgagtatgtggactttatgaaaaagacagttccggtcgatctttccggcatgaagatcgtgatcgactgtgcagagggcgcgtcttataagacctccgtggagaccctgcgtgaactgggagcggatctggtagccatccatacaaacccggatggaaccaacatcaattccaattgcggatcgacccatatggaagaattgcaggcgagagttgtctatgaaaaggcagctctgggtctggcttttgacggggacgcagatcgtatgcttgccgtagatgaaaatggcaagatggtagatggcgatgagattatggcgatctgtgccaactatatgaaggaaaaaggaagtttaaaacaggatacggtcgttgttacggtcatgtcaaatctgggatttaccctgatggggcaggagaagaatcttcacatcgaaaagacaaaagtaggcgatcgctatgttttggaaaatatgcttgcaaacggttataatttaggtggcgagcaatccggtcatgtgatctttctggatgacaatacaacaggtgacgggctcttgagtgcacttcatctgttgcaggtcatggtggataccggcaagccattatcggaacttgccaaggtgatggaagtcctaccacaggcactggtgaacgccaaggtgcctaaccataagaaagaaagttttatggagtatccggagattgccagtgccgtgaaagaactggaggataagtttgccggagagggacgcgtcttgatccgtccatccggaaccgaaccgcttgtccgcgttatgatcgagggcaaggatcaaaagcagattgaagaagaagccaagaaattagcagaactgatcatgaatacaatgttataggaggttgtcatggttacgcagaaggtacagattatcaatcccacaggccttcatttaagaccagcgggaatcttttgccaggaggcaatgaaatacacatccagtatcacatttcattatggagcaagtggcaccgccaacgctaagagtgtcttgagcgtgcttggcgcctgcatcaaatccggtgatgagatcgagatcgtctgtgagggcgaagatgaagaagaagccctgaaggcattggtggcattggtagaaaacggatttggagaataagggtaaaaaggctgatttcttgccgcaagtataagaaagaaggaatttagaaatgttaaattataagagatataagagaaacccggttttaaatttctcggagcgtacctggccggataagcagattgaaaaggcaccgatctggtgtagcgttgatctgcgtgacggtaaccaggcgctgatcgagccgatgaatgtagatgaaaagatggaaatgttcgatcttttgcttcgtttaggttttaaggagatcgagatcggtttcccggctgcatcacagatcgaatatgatttcttgcgcaagttagtagcagagaataagatcccggatgatgtcaaagtacaggtgctgacccagtgccgtcaggaactggtggaccgaacctttgaagctatccagggaatcaagaatgttgtggttcatatctacaactccacatctactctgcaaagagatgtggtattcaacaagagtcaggatgagatcattgacattgccatcgcaggaacacgtatggtcaaagagcatctggcagattttgacggtaatgtgcaactggaatactcacctgagagttttaccggtacagaggtagattttgcccttcgcatctgtacggctgtgcagaaagaatgggatcatgcgacggatgcaccgatcatctttaacctgcctgcaacagtggaaatgaatacaccgaacgtatatgccgatcagatcgaatggatgagtacccattttgaggatcgtgataatatcatcttaagtgtgcatccgcacaacgaccgtggtaccggtgttgccatcacggaattagcactgcttgccggtgcagaccgtgttgagggtactttgctcggcaatggcgagcgtaccggtaatgtggatattctgacggttgcttacaatatgttctcccagggtatcaatccggaattggagatcgaggatgtcaaggagatcgttgagatctatgagagatgctgcaagatgcatgtagatatgcgtcatccttatgccggcaaactggtatttaccgctttttccggatcccatcaggatgccatcaataagggcgtccatgcgatgcaggagcgcggaaatgaatattgggaagtcccgtatcttccgatcgatccggcagatattggcagaaaatatgagccggtggtccgtatcaacagccagtccggcaagggcggcgttgcctttgtgatggataccgtctatggctacaaactgccaaagaagatgcagagagaatttgcagatgtcatccagtatatttccgagcaggaaggcggcgaggttgagccgcagaagatgatggaagccttcaaaaaagaatactttgagaacaagatgccgtttgaactcgtctttgtggatatcgatgacaatatggcaaatgatgagacacatgtatctctcgattttaagtacaatggcaaggcaatccattccgaggcagatggtaacggaccgatcgatgcggtaaaacttgcagtcaagcagtgtgtaccgcaggttgatttctctgtgctggattatagcgaacattctctgggcaagggctcaggtgcaaaggcagcagcctacattgagatgcgtgacaaccgcagcggaaatatcacctttggcgtgggcgttagttcaaacattacgagagcatccattcgcggtatgttctctgccatgaaccggcttgcaaaaaaggcaaatgattatgtatagacagaaagggtagatgatatgaaaaaggtacttgtgacgggctgtaacggacagcttggacgagcaattcaaaaggaatatgcaggtcaggtggaatttatcctgacagacgtagcagagggagagaatatcacttctttggatattacagatattgatgcagtcatgaccttggctttggataaaaagccggatgtcatcatcaactgcgcagctctgaccaatgtagacggctgtgaaaaaatgtgggatcttgcttacaagattaatgcgatcggaccgcgtaatcttgcgatcgctgcaacgacagtaggggcaaaactggtacatgtttctaccgactatgtctttgccggaacagagcgtgcgccacgtacagagtttgatgagccgaatccgatcagtgcctatggcaagaccaagttagagggcgagcattttgtacgtcagtttgcagagaagttctttattcttcgtaccgcatggctgtatggcgatggcaagaattttgttaagactatggtacgtgcatccaagacacatgacgaggtgtctgtggtatgcgaccagtttggatctccgacttcagcagtagaacttgccaagatgatccatttcctggaaggaacagacaactatggtatcttccatgcgacctgtgaaggtgagacaaactgggcggatttcaccgaggcattctataagaaactgggaatcaagactaaggtcaatcacattaccagtcaggagtatgccaatatgaacccggatgcagcaaaacgtccggcatattcaaatctggataactacatgctgcgtctgacaacagatcagtttgccatggcaaattgggaagatgcattagacgtctatttaaaagattttgacatggagaattgctaatggaatcgccactcgtcagtgtttgtatcccggcatataataatgcggatacgatcctggaaaccatacaatccgttctgacacagacttatcagaatctcgaattgatcgttgtggatgatcggtcaacggacgatacctatcaggtggtgaagacttttgcaaagcaggcaggggacgatcgtctgcatctttatcagaatgaaaaaaatcttggtatggcaggcaactggaaccattgcatggaactttgcaagggggactttatcaaactcttatgcgcggatgatctgatccatgaaactctgctggcaagggaagtggagatcatggagaggtatccggaggcaaatctggtgcagacggatacgcgctttgtggacatgcatggcaagaccaccggctattataagcgctatcacgcaagtggtcttgtggagggcaggaaagcctgtcgcttctccgcttttaccagagattatctgggggcgccgcttgccaatctgatccgtagaagtgcctatgaggcatggggcggttttgatccctcctttgtctatatcattgattatgatttctttatgcgcatttgctgtaagggaaagatctatatattacatgagccgctcaattccttccgtatccgaaacgattcgaataccagtcaggttatgaatggcgacaaaaaagatgtctatctggaagaacataaaagattggtagagcgatatgccaaggaactacacctgtctagatggcaggtgaatctgagtgttatgatacgccggctgatgagttttctcggaggcatttatctaaagatttttgtgaggtaacaatgaagaaacgactggtgatcataccggcatttaatgaggtcggttcgatcgagaggacagtagaagatatcaaaaaaaatgcgccgagttttgattatgtcatcatcaacgatcattccatggatggtaccaaggaactatgcgatcggctgggctataatatggtaactctcagtatcaattccggtattggtgccgccgtacagacaggatacttgtacggacaccggtttggctatgattatgcgatccagattgatggagatgggcagcacgatgccaagttcctggaaaagatggcagatgtcatggaggctgaggagatcaatatgctgatcggctctcgctttttagagggtgagggatttcagtctaccggtctcagacgcgttggtatccgtttttttacctggctgatccgtttattgacagggcagacgatcacagatccgaccagcggcatgcgtatggtggataaggaagtcatgcatatgtttgccaacgattatcctaaggactatccggagccggagacggcagttaccgtcctgaaaaaagggttttatgtgaaggagatcccagtggaaatgaaagccagggcatccgggaaatcatccatttccttcaagaaatctatttactatatgatcaaagttcctttggcatgtatcatgactgccatcgggaattaagaggaggctgtatgagtctgagattacaggtggttatcgcgatcggtgcgatcatcgctatcttatatattggaaatctggtacgtatccggcggctggaattgaaatacgctttgatctggttttttgtgggacttttgctgctgatctttgatctgtttccgggactgttgacgatcatgtcgcagacactggggatcacacttccgatcaatatgctgacatttttgggacttttgtttgtcctgatgatcattttcagccagacgatcgttatttccaatctgaccagaaagtgtaaacgcttgacacaagaggttggcttgttgtataagaaagtagaggatttggaagaaactgtaaaagaagagacaataaagtaatcaaaaaggagaagattatgagaacatacttagtaacaggtggagcaggatttattggaagcaattatattcattatatgttccgcaaatatgacaatgagatccgtattatcaacgtggacaagttgacctacgcaggaaatctggagaatttaaaagatattgaggacagggacaattacaccttcgtcaaggctgatatctgtgataaggaagccatcagcaagatctttgcagaaaatgacattgaccgtgtggttcatttcgcagccgagtctcacgtagaccgttccatcaagaatccagaggtttttgtacagacgaatgtccttggtacagccgttatgttaaattgtgctaaggctgcttgggagttgccggatggaactttcaaggaaggtaagaaattcttacatgtgtctacagatgaagtatatggctctttggatgatgatccaaacgcatatttctacgagacaacaccatacgacccacatagcccatactcagcaagtaaggcatcttctgatatgcttgtaaaggcttatatggatacctacaagttccctgcaaatattacaaactgctccaacaactatggcccttatcagttcccggagaagttgattccgcttatcatcaacaatgcattacagggcaagaagttgccggtatatggtgatggcaagaatgtgcgtgactggttgtatgtagatgatcatgcaaaggggatcgatatggtccaggaaaagggtaaacttttcgagacttacaatatcggtggccacaatgaaaagcagaacattgagatcatcaatatcattatcgagacgttgcaggaaatgcttccggcagatgatccgagacgtgccaatgtcagcacagacctgatcacatatgtggaagatcgtaagggacatgacagaagatatgccattgctcctgacaagatcaagaaggaagtaggctgggaaccggagactatgtttaaggatggcattaaaaagacgatcgcctggttctttgagcatgaagattggatgaagaacgttacttccggtgattatcagaagtattatcaggaaatgtataagaatgaataatgcagtcgttattgtaacttataatcgcgtagaattattaaaggaatgtcttgcctgcgtatgtgggcaaaccattcctttttcgcgtgttattgtggtggataatcacagtacggatggaacagcagaattccttgctgcccgggaagatctggacgtgatacgggagccggagaatcttggtggcgcaggtggattttatgatggcctgcagcgtgcaagtcagggggaatatgactgggtgctgattattgatgatgatgcaatgatcgcaccggactacatggaaaaacttctggactatgcaaatgcgcatacaggtatttatggtcttgcgggaaaggttgtgaccgaggggcatattgatgtcagccatagaaggcggatcacaaaccgattactttatgtggagagcaatgtcactaccggggaataccaaaaggagagtttctcctgcgatgctgcaactttttgcggacttttgctacagggaaaaaagatgcgggagattggtctgccccaaaagggatattttctttggtacgatgatattgaatattgcctgcgcttgcaggagtgcggtggtgtgacggtggtgccggcagcggtgcttcatcataaaacagtgctttccaaggagggcatggtgaccaaaggggtcttacatcggatcggctggcggcagtattatggttatcgcaatcgttatgatacggcaaaacggcatttgggaagcctgtctgcctgggtgatcttgtggcagtatcgggtcttttggcttctcagtttttttatgacctggaagaaagagacgagagaacagggcaggagcaaccaaaagatcctgcatgatgtgataaaggattgcaaagcgggaaaactggggaaacatccggagtatcactattagataaataaagtaagattgggaagaacgttttgaagaaggaagtaaaatgggatcgtacagcactgatcgttgaggtatgctgtattgtcttagtggggttattggatctgtccctgtgttggatggacggtatgctggcataccataaggtgttggtggtgctggttaatgttgtggggatcataatctttccatggcttttgctgcattttgcatggacacgcgatgccgtggaaaaagccttggcagatttggaacaaggctggcagaagatcaggaaggatcatcaaaagattatcaaatatgcagcctattatgttggtttgtggcttgggctgggagttattgtccggatcgcaacgcatgggacagttttcccatggtggaaatactatttttttgcagggtgtgccagtctgatcctgacattctggctcatgcgcaggcagatggcggaaaagacggaaggggcatttgctgtaacggcactgatcctggggctgacttttatcctgtcatcgccaaggattgtgggtgtgtgttgggatgacgaaacacattttgtacggacaatctctattgtcagtatgtttgattctgtaaagtatgaagcagagaacaagttggttgaggattttccgcagttgaaccagcagattacggataaaacatattcctatgagtcattgcgggaatacagtcagacattggatgggctttatgacagagcacatgcagacaatcaggaagtcttacgtccctatgatgaagcaacgattggctataaaagtctgggtggaatttattccattgcatatattgtgccggcgatcgcgatcattattggaaaaggcctgcatctgagttttgcccatgtttttttactagggaaaataagtatcttactggcatatacaatgatcatttattatgcgatcaagcgcttgcgttatgggaagatcctgatgtctgtgatcgctcttttaccgacttccatggtacttgcatcatcctatagttatgattggtgggtgattgcgttgacattggcgggaacctcctactatatcggaaatctgcaaaggccagaggagaccttgcaatatcgggatctctttatgatggtcgcctgttttgcgcttagcatcatgcccaagtgggtttactgtgtgatgctattgccactgtttttcttcccaaaggaaaaatttaaagataagcggcagagaggggtatggtacgcttttctgatcggcggtatggcaatcatatttttcctgtttgtacttccggttctgcatcatgggatcggaatgggagacacaagaggcggggaggggatcaatgccagcgaacaattatggtggatcttacaacttccgggcagttatctgcaaaagctgatcggttttatggcaggttatctgggatttaatgtagcaccgctttacacaacgaatatgggatacttagggcagggagattatggaattcttctcctgatccttattgcggtgattctgtatctggatcgtggtgaggaaaagcgaaaagttacatggcttaggatcagtcagtgggcaacgttccttatcctggtggcggtgattgtaaccgtgttttatcttgtttatacaccagtaggaggacaagtcttacaagggtgtcagggaaggtatttattgccggtgctgttcccattggcttactctctgggaattgatggcataagcattaagtttgataaaaaccatatggtcatggctgccctgggtttgacatctcttgtgtttttgctggattattacacgctatatatttcatatttgtaaaagggcagaaaatggatggaaaggtaagagtgtgagagcaggatgcaacatgtaacagcagtagtagtcacatacaatcggatagatttgttgaaagagtgtctacaggctcttcgagagcagaaagtagaccgggatacacaattagatatttttctcgtggataatgccagtacggatggcacaaaagagtggatagatggcatggtatcggcaggcgatgccgaagacaggcggatctatgcgacccatctggcagagaatacgggtggagccggtggattttataccggtatgaaatgggcgtatgaacatggggcagatgcgatctggatcatggatgatgatacgataccgcaggcagatgccttgcaaaaattattggatggcatgatgtgcgctggaaatgaggtcgcaccgcaggacgagattggttttgtctcatcaacggtcctttggacagatggaagtccttgccagatgaaccgtcagcattatgtgggacaggaagtgactgtgtcaggcaagggtgcagaagaaagtgccttgaccctgcaggcggtggatagtgcaacctttgtttcacttctctttacaagagtggcagtggaaaacaaagggctgccggtcaaagagtatttcatctggggcgatgataaggagtatacacttcgtgtgtcggcaagttatccatgttatcatgtgaaaaatagcagggttatccacaaaatgaccaataatgcaggcagcaatattgtcattgacgatataaaacgtgtgccacgttatttttatgcttttcgcaatgatttttgtaccgcgaaaagacgtggagtcaaggaagtctgcatttattttgctgcattcacgttaaaccttatgcgtgtcatttttaaaagcaaagatggaaaaggcctgcgtataaagactatgtggcaggggatgcgtgcaggcaagcgttttgcaccggagatagaatatgtgaagtagagcataaataagacgcaaaattagaatttatgatggacgaggaaatgaaagaatgattattcaaaaactgatcggaccaagcaaggaagtttgcaatgagtggggaatgtattttagaaaagtagataaagagggaaatgatattataacctatccatatgatgatggggatgtcatgttccataaactgatcgatggcgtgaaagcatcggaagtggcagcagaatctttcccacttgagattaagcagggagagatattatccctggatacgtatttcaatgctttttccattggaaaatggaagaaatacaccaagttgtcgaatctggcattggagatcgtgaccagtggtccggtagatgtcagagcctatcagacggttggcatggtagaaacagagcatatgtggcaggagttcccggatgaggagaccatgtacagtttcttgcataacaaaagacgggaattggactgcccacaggaagcagaagcatttgtaacggaccaggggcagcaggcgatcaggacgatcattcatttctccgaattagccgatgagggcatttactatattacgatggcgccgtgcgaggatgcagtttctcttttgtcgggagcatataccacagacgtagagaaagaggatgtcaatccggtggaactggtacttggcatctgcactttccagagagaagaatttttaaagaaaaatgtgaatctggtactggataaggtcatcaataatgccatgtcgccattgtgcgatcatgtagaaatttatatatcagataacggacagacggtgccgcaggataccttccagagtgacaaggtgcatcttttcccgaataaaaatgccggtggagcaggcggttttacaagaaccatgatcgagtctcttttccatcgccaggactcgccatttacccatatcatattgatggatgacgatattattctttctacagatgtgttggagagaacctatcatttcctgcaattcgttgatgaagagcatcatgatatgatggttggcggtgaaatgttcatgttaaatcttcgctataagcagtttgaggctggggcaagatggcgtggcacgcaggtgactttttacaataagatgtgggatctgcgcagacaggaatgtgttgccaccaatgaatgtgaaaatccgatcaattacagtggctggtggtacagtgttatcccgacctctattattacggaagataatctgccgatacctttgtttatccattatgatgatatggaatatggggtgcgaaatgagaaaaatggcacaattcttctgaacggtatctgtgtatggcatccacaggggatcaacaaggcggcaacgcgtatgacctattacgatatccgcaatatgctgatcggcatggcagggtccgaaacctgtgcaacagcaggcgatgtgatccatcatttatcaaaccgtattgtcggtgccttgaaccgttatcgttatgaagatgcagagatcatctatgaggctatcgatgatttttacaagggaccggacttctttaagacattggatccgcttgagaagcacgcagcactgaccaagtataattataaatacgaggaattgtctgcctatgatctgaccgaggatatggtagaagaaaatggattccacagccattatctggcatggagtgtctgggcgatcatacgctggattcttccgagcacaagggcactcaaggtcgtcggactgcgcgatagtggcattgcttttggtgctaagaagatcttccactatgatgaagaaaagcgcaaaggttatatgacagagaagagttatgcaagaggctggaaagatttttgtgactatctgaagatgacaaagaaaatcagaaagaaccacgatgtcatgatgcagcagtgggcagaggcgaaaaaagagatcacgagccttggatactgggagaagtatctggggttgtgactatagtgtgtatatatttctttgattgatggtataaaagcctggttgcataggttaaagtgaagaaaagtgaacatgaatttgataaacgaagggagatgtatatggtaagacgaaggaaaaaaataagatcgggtcgtgtaatgtcagtttttctgctgtgtgcgatcatgctattgggggatgcagggatgatgacgattcaggcagcaccatcgacaggccgggcagcgaacctggttgtcattgtacgttatcagggagatactgtgggagacgacgatacgggttataatacaccatatacctcacagatctcgggagccccgacaacttattggggcttgttgcaaaggcgtttcaatggagagaatgacacctttgcgatcggatcatttcgggaatatctgtcgaggctttccggtggggcacatcaggtggagtcgcttttcccgcagactgtgtcaggtgaaagagtggaatatatcacgttggacaagacactggcggaataccagggatcaaatgagatttctctggttgctgaggtcgctcaaaaactgacggaaaagtatccaacttatgatgggacacttctggatcgggacggtgatggggcaatcgacaacctgatgattctggcatctgtaccaaagacagggcagtttacaccgcacacaaccaatgccggaaatagctatacttttgccggcaagaccataggttattataatatacttgaaacttgtacaacgacactttcgtcgggcacattttgggattcttttgatattgcaactgcagcgcatgagtatgtgcacacatttggtgtgccggattattaccgtacatcaggaatgaatggaacaccggttggaatgtgggatcttatggcaggatcactgggcagaccatcacttttggcaacgacaagagagaatataggctggacaaagattgcccaaaagacagcgacaagctcaacctacacattgtatgatatggatagtgcatatgcgaatggcggaaagagtcaggcttataagttttatacaccattt

SEQ ID NO: 12508 - DNA, 9057 bp, Unknown
  gut microbiota DNA sequence
atccagtgaatattttgtggtggaataccgtagaccgggcaaaaagtattcagcggacttggatcagaacatgtcaggagccgggcttatcgtatatcgtgtgaatccggcatatgctacggatggaaatctgcgtggtaatgactatatctatgtatttcgaccggatgataccggggggaatgcatccgcgggcgatattacaaaggctgcggcagggatgccgacctacatatccggcagacagtctatcggattggaggatttgtcaaaaacgattgttgataatgccatctgttacagtgacgggcgcaattccggcatgacaatcagtgtgactgcgcagacggatgactcaatcacattcgatgtgacatttccagattatgcaaatatgaatctgtgggagacggtgacgagtcaggatgggacgacaccattgtccacgatgaatgccagtgctacacagttggctacagatggaaacgctatttatgttttggcacagaatacaaattcttcgactgttttacagtatgatggagcgaattggacgaatctaggcaagcctatagataatgtgtcatcatctgtgagcatagagagttgcaatggtagtttgtatgcgttgatttctgattatcgcaataactgcagcgtcttgaaaaaatatagcgggaatgcctggaaggaaataacgactatgaatgcatatgctactaatcatcccgtgctgggggtgatcggagataaactggctacgatcgtcgctaaggacaataaaaatccacagttatatcttttagagaatgattcctggaaggctgtgggaccgcagctaaatgtttcttatctggtaagtccggtattgttttcgtataatggatttcctgctctggcatatggtgattttacagagcggacaacgagtgtgatggtatataaaaatgatcaatggacttctacgcataagaataccgatgcgtatgcgaagaagatcgtggtcaaaacaacaggggatcatgtatatcttttgagtaatgaaagcacaggtagtgccaaattaaccacaatggatatgtcaggaggcgttacagaaacggttatgtcttcactgggcagtaaccttctggatatcggtctgacagcaggaaaacaaaatctttactatgccattgtaactgtagatgggaaagtaaatgtatatagttctactgtggcagatccgaccgacacgacaatgctgggaagtacggtttattctccggcgtttggaactgcgctgggaagaatggatggaattctatactgtgcatcgacaccacagagtgatgggacgatggatgtaaggcgttatcaggctctggatgatgagataccatctacaccggaaccaacgcctgagccagagccagagccggaaccaaagccggaaccgacaccgaagccaaatcctgagccgacaccaacaccggtggagcgaacctacaatgcggtatataatggagtggattacagtagtgtttttgatccatactattatgcggatcagtatgctgacttgaaacaggcatatggttatgattgcagtcaactgttacagcactttatcaattatggcatgagtgaaggacgtcaggccaaggcaagttttaatgcgacctcatatcgtctgcagtacagtgatctgcgtcgcgcttatggaaatgatctgaagccttattatatgcattatcttcagtggggaagaagcgaagggcgtcagggaacaggatgtaatgtgctgcaaaacggactgacaaggtatgatggtatcgattatgcagcagtttatgattataatacttatgtgagccggtattcggatgtatttcgggcatatggctacgatgatcaggcggtacttcttcatttcatccattatggaatgaatgagggacgcattgcgaaagcgtcttttgatgtgacctcatatcgcctgcagtatagcgatctgcgtcgtgcttacgggaacaatctgaaatcttattatttgcactatctgcagtggggaagacaggaaggacgcaagggcagtggctgcatacgcctgcagggggcgataacaacacttaatggtactgattacggaaaggtttatgattatcaatactatatagataaaaacccggatgtattccgtgcatatggctatgatgatcaggcagtactggctcattttgtaaattatggtatgaaagaaggtcgtatcgcgaaagcatctttcgttgtaaataattataaagcgcgctacgcggatttacgccaggcatatgggaacaatacagtcatgtattataatcactatataaactggggatacaaggaaggacgcaaaggaaactaacttacagagggcagaagtcaaaggatgacttctgccttttctatatgggtgaggaggctttatcccgtctaattgctagcataaggttgtcaaaatgttacaaaattgctacaatacaattaactatgttcggatttaaataagaaaggaagacagagatcatgaagcattatgactatctcgtagtaggtgctggacttttcggagccacatttgcatacgaagcaaaaaagagaggaaaggaagtacttgttatcgataagcgcgatcacatcgcgggtaacatttataccaaggaagtagacggtatcaacgtacatgtttacggtgcgcatatcttccatacctcggacaaggctatctgggaatacatcaatcagtttgcagaatttaacaattatatcaactctccgatcgcagtttacaaggacgaactttataacctgccattcaacatgaatacctttagcaagatgtggggcatccgtacaccgcaggaggctaaggatattatcgagaagcagaaggcagagtatgatatagacgagccaaagaatttggaggagcaggcattgtctcttgccggtaaagatgtctatgagaaactggtcaagggttataccgagaagcagtggggaagagactgtacagaacttccggcattcatcatcaagagactgccgatgcgctttacttatgacaacaactactttaacgaccgttttcagggtatcccaatgggcggttatacacagatcgttgagaagatgctggatggcatcgatgtcgttaccggagaggacttctttgatctgaaaaagtccggaaagttatctgacggcactgaagtctcttatgatcggatactctttaccggtcagatcgatgaatactttgattctaagtttggaccactggagtatcgttctgtccgctttgagacagagaaactggatatggaaaactaccagggcaacgctgtagtcaactacacagagcgcgaagttccatatacccgtatcattgagcacaagcattttgagtttggcaagcagccgacaaccatcatttcaagagaatattcttctgagtggaagccgggcgtagagccatactatccggtcaacaacgagaagaacaatgctttgtatgagaaatatgcagaacttgctgccaaggaaggcaatgtgatctttggcggacgtttgggacagtacaagtattacgatatggacaaggtgctcatggcagcgctggagtgtgtaaaggaggaattctaagatgaaaggtatcattttagcaggtggttcaggaaccagattatatccattgaccaaggcgatcagcaagcagatcatgccggtatatgataagccgatgatttactatccgctgtcaacactgatgttggcaggcattcgtgaagtgttaattatctctacaccaagggatgtggttgtctttgaggatcttcttggagatggtagtcagttaggcatggatatccagtatgccattcaggagcagccgaatggacttgcagaagcgtttattatcggtgcagactttataggaaaagatgcagtggcgttggtacttggcgataatatcttctatggtcagagtttttcacaggtattaagacgtgcagcagatagaactgagaacgaacctggggctaccatcttcggctactatgtcagagatccgagagagtatggcgtggttgagtttgacgaaaatggtaaggctatttcgatcgaggaaaagccggaaaatccaaagtcaaattacgcggttccgggtctgtatttctatgataattcggtcgttgagattgcaaagacaatcaagccgtctgccagaggagaacttgagatcacagcagtaaacaacgcttatttagagcgtggagatttgcacgtagagacattgggacgtggatttgcatggcttgatacaggaaaccatgacatgcttcttgcagcagcagactttgtatctgcttttcagaagcgacagggactttacatttcttgtattgaagagattgcatacaagagaggatttattgataaggagcagctggtaaaactggcacagccgcttttaaaaacagattacggaaagtatctgatggagattgcagaagggttatagttttacggcatgattagacgagcagcgagaaaagcaaaacgtattataaaacgaatattgcgcattggtaactatcagaatattgatgtattccgacagtggatagaagaagtagagccgacggtctggaatcagggggtcttgtcatatgcccctctgatttctgttgtagtaccggtttataatgtttcaagccagatgctgcgcgactgcatcgattctgtcagaaaacagacatatgaaaactgggaactcatcctggtggatgatcattcttcatgggaaaatgtgcgacaggtgctgtctgagtacaatgacatgccgaagatccgtgtgatctatcggaaagaaaacggcaatatttcagaggcgaccaatacaggacttgcacaagtgcaaggggagttcattgcctttatggattgtgatgacgttctggctccgcaggcattatatgaggtggcatatcttttgaatgaaaaccaggaattggactttatctatagtgatgaggataaaattaccgaggagtgtcaggcaaacagggaaggcacgtttgcaatacctgtaaaagatcgtcatacacctttctttaaaccggattggtcaccggatgcctttatgtgtctgaactataccaatcatctgtctgtgtatcgaaccgagatcgtcaaagaagtaggcggtctgcgcacaaagtacaatggcagtcaggattacgattttgttttgcgctttatggagcatacgacaaatcggcgcgtgggacatgtagacaaaattctttaccattggcgcgaacgaaaagaatcggtggcgtatgatccgaattccaagccgtatgcactggaagtggcaaagaaattaaaagaagaaatgatcacacgacgcggactgcatgccgatgtggagtatgtggacggcgagtaccaataccgtctggtctaccacaatgacacaaacgagaaagtaagtatcatcattccgtctaaagacaattttgatattttaaagcattgtctggctaccattgcagagtttacggattatccgaactatgaggtcattattgtggataatggcagtgcgcaggatgtgcaggacaagatcaatgattatattgccggcaagaatatacactacatctatgaaaagcagacctttaacttttcacatatgtgcaatattggtgcggagcatgcatccggaaaatatttcttattcttgaatgatgatattggaatcctgcatcaaggctggttggatcgtctggcaggacatgccgcacaagagcatgtgggtgccgttggagccaaacttttatatccggattcgacagatatccagcatgatggtgtgttaaacctgacttgcggaccgtctcatgcatttagtcatatggatgatgcacagtcttattatttcgcgagaaatcgtgtggaatatgactggctggcagtgaccggcgcctgtttgatggttgatagggcaaagttctatgaggttggcggctttgatgaagaatttccggttgcctacaatgatattgacctgtgttttaaactggcagaggctggttattataatgtatgtcgtaatgacgtcatcttgtatcattatgagtctgtgagccgtgggcttgacaatcaggatgatgaaaagatgcttcgacttgcgatggaacgcagcaaattgtataaaaatcatcctgcatttgagagttatgatcccttctataatcgcaatctggggggatataatatctcctttagtatccagatgcagggggctggcgatcatgagccgctgcagacagagagcagcatggaagattttgtcattgattttgatacagagtctatcaattttatggcgcgcattaatagtgtggaatatctgaattcacttgtgcgtgttgttggttggttctatacaggtagtcttcgggtggatagtaagagagaattgtatttggttttacgcggtgaatccggcaggtgttatcgtgtcgaggtcgaaagatttgtatcggatgaagcgagaagaacctatgacagtcgttatggaaatgttggttttgagatactggttgataaggataaattggaggaatccgatcagaagtatcagataggtgttatgatctccggagataagcgccaggattggttcgtgcagtggacggagagatggattttgagataggtgatagaatataattatggatcaagtgcaaaaagaaaaatatcaagccagaatacttgatttgttaattcttgacaagaaacaaaaaattcttgtggtcaataatgaaaatcccatttttgcagaagacttaagagaacgagggttatctgttgaagaaacagatgacaagattgatatgcaggcatcctatgatgttattatcctgtttggaatgcttcgggggggattgacgcagtctacgatggaagaagtgatgaaatttcttgcggcaagattggatgaacatggacagttgttgtggtgtgttgataataaatttggcttaaaatattggtcagggatgcaatatgaaaagggcggttttttccgtactttggaatcgacagagaatgaggatgttatttcatatcagaaaataatgaatctgctccttgagatgcctgaagtagacagtacagtctactatccgtatccagattatcgctatccgatggaaatctattctgatgaatggatgccgagcaagggaagtctggaaaattatgactttaattttgaatactttcgttatcgtttctttgatgaaagcaaggtgtgggataatataattgaggaagggctgttctcggagttcgcgaactcatttgctgtaaagatagaaaggcgataggtaatggagaagacaatctatataaaattttcagaagatcgagcgcctgaattctgcagcaaaacacggattgccatcgcagatggaaacaaagtcatatataaaagtgatccaaatggacagatctcagaacatctagcgttaatgccggaaaaacatcagtggctggtggaacgttatggggatacagcaatcgatattaatgatgtaaagagaacagacaagggaatgcagttcgcatttgtatctggagagtcgattcagtcaaagttagatttgtatatcttgcaaggaaatgagaaaaaagtacgtcaattgctcaatgaatatgttgaaaggctgttgaggcacggctcgtatagaggtgatttccaaccgaatgcagatgaacagaaaattttcggaaacgtagaaatgagagatattgacttggcgaaagtcagcaatattgacatgatttttccgaacgttctggtagatgaggaaaagtggcatgtaattgattatgaatggacatttgactttgaaattccacagaagtttattttgtatcgagcacttttgtattggaacagtacatcgaatgcgctgaaaaatcatacttgggaagaggtattggatctaggagagatttcgcttattgaagcagaaatatttgaaaaaatggaggcctgctttcaacgatatgtggcgggcgagacagaaactttccgaacaaaggccaattatgaatgcaaaccgcagttcagtatcaatcagatcaatcaaaagattataagaacgaaaataaaaaaagaaccactaaaagtatactatccaacggaaaaaggatatgacgaggaaaatacttgcactttctattgggagagaagagatgatcaagcgataaaaatagatataaaagaggcatacgataaattgagattggatccaatagagcagtcgtgcatgattcggatagataaagtatccttgaatggagaaccacttagttactcatataatggtgtggaaatgtctgaaaatgtgataggatttgatcataacgatccacaaataattgttgatctggaaggaaaaaaaggaacgttttgcgtgagatatgaaattatgtatgctgatgattttgaatggttgaatgaagtggtatcatatgaaagggcactacgtgaagaaaaacaacgctatattgaaaaaatagaaagagaagcacaatcaacaattctagaacagcaagagataatcaatgcaaagacaacaatgatagatcagtttatgcctactgtttggtataaagcatatcatttaacaaggctaataaaaaattatttgaataggaaaatgggagattagtatgtggaaagaaccccaactcgaacaattaaaaagtggaattctgcaagcagacataatatcttttgatgtctttgatactttaattgtaagaatgacgaataccccagaagatgtgtttacattactggaaaagaaaacgggtattcgtggattggctaattggagacagagatgtcaaatgatggcaagtcaggaagtggaagaaacagaacaaaaagcacatgctgatttggatgacacctatgagtatcttgccaaaaatcatggatcaatagtg

SEQ ID NO: 12509 - DNA, 13833 bp, Unknown
  gut microbiota DNA sequence
ggctggtgcagtatgcgggcagcccatcccctgcccccctgccagccatctgctcctctatatctgataacacatcgccctatccccaagacgaaaaaaagacagtgcgacgagcgcactgtcttttatgtacagtcgacttagttgttgaccaacttgtcttcttcgttattccagctgtaaagtttacggatctcctcgccaaccttctctgaaggatgctcagaagccaactttctcatagccttgaagtgaacctgacgacctgcaggtgacatatccagtaagaactccttagcgaaagaaccatcctgaatatcagaaaggatctgcttcatagccttcttggtgtcttctgtaacaatcttaggtcctgtgatgtaatcaccatactctgctgtgttagagatagaatatctcatgcctgcgaaacctgactgataaatcagatctacgatcaacttcatctcatgaatacactcgaagtatgcatttcttggatcataacctgcttcgcaaagtgtctcaaaaccagcctgcataagtgcacaaacaccaccgcaaagaactgcctgctcaccaaagaggtctgtctctgtctctgttctgaaagttgtctccaaaagacctgctcttgcgccgccgatggcaagaccataagcaagtgccatgtcaagagcctttcctgtgtaatcctgctctacagcaaccagacaaggagtaccctttcctgcctgatactcagaacgaacggtatgacccggagccttaggagcgatcatggtaacatctacattctttggtggcttgatacatccgaagtgaatgttgaaaccatgagcaaacataagcatgttgccttcttccaagtttggctcaatgtctttcttatacatatcagcctgtaactcatcattgatcaagatcataatgatgtctgctctctttgcagcttctgctgctgtatatacttcaaatccctgcttttcagcctttgcccaagacttagagccttcgtacaaaccgatgatcacgttgcatcctgactcctttgcattcaatgcatgggcatgaccctggctaccatagccgatgactgcaatcgtcttaccatctaacaatgataaattacagtcttcctgataaaaaattcttgcttcctgtgacatcttttttcctcctttaatatcaatcaattataacaacatccttagtacctctggtcagaccggtaagacctgtccttgccaattccaaaatctcataatcagctaacatatccaagaatgattgtaacttgtcctgatggccggtaacctcaatgaccatggaatcatgggtcacatccactaccttgccgtgaaaaatgtccgtaatggtgagtaccgactggcgatcctcagccttagcggagatcttgacgatcatgagttctctcgtaacggatgagcccggctctaagatcttgacatctaccacatcctctaacttggcaagctgcttctcgatctgctctaagatcaattcgtcaccgcttgccacgatggtaattctggtaaatctcggatctgctgtcactccggcagaaaaactgtcgatattgtagcctctacggctaaaaagcccggatacatggctcaaaagccccggtgtattttctaccaaaatggacattacctgacttctcatacgaaaaaacctctcctctgtcatttgcagacagacacttgtccgtctcgcgcttaaaaattattctagcacaacacttcgttttgtcaacgaaattctatgatgaaatatatgccggctcacaataaaatatctttttcgacaggcgtgtaaaatatctccgcgatctcttttggatctctggtaatgcccaggatccacatcaatttggtcacgatcgcctctgttgtcatgtcaaaagcctcgatcagggacagtttttgcttgatggtctgccccactgcatagacctccatatcactaccctcatgcgccacctgggtggtgacgaccaggacttttttctcctgcgtccacttgctgatctccgcctcaaaagcatggtcaccgtaataaggcacaccgcccacaccaaaactttccagaacgaccgcgtcatagtgctctttcagataatcaaaaatggcaggatcgatccccggtatcattttcaaaacaaataccctcgccgaaaaatcatggtaaaaaataggattgccctccggctttggctcctcgatataaaagaccagtcggtgattgcgaaagatggcgatctgtggataatcaatgctggaaaaagcattataactttttgtccgggattttcttgcccgcgttcccaggatgaccttgttatcaaagatcacatgcacaccgcatgcacggtcatccgccgcatagataaaagcattgagcaggttgtctctcgcatccgtattctccgccgcgatcgtcacctgggatcccgtaataacgataggctttctgctgttttggataaaataggacagggctgccgctgtataagccagcgtatccgttccatgcgtcacgacaaagccatcgtaagccgcataattttcctcgatacaggaaaccagtgccttccaatgcttggcatagacattggtgctgtcaatattaaataactgaatggcgtcgatctgacagagttttgacacttccggtatataggtcaggatctcctctgaggtgatctccggtcgcaatccttcttttgtctcaacggaagcgatcgttccgccaacagcgatcatacaaatctttttcattttctatctctcttttcttctcggcatagacaatatgtggcaactgcatcttttaaacatatggtctcaaaatatatatcatatccaccgtaggtcaggtttccaagtccatgcatgccttgtgacggctttgtttttaaagtttgtaaaagcggactcatgttgcaattttggcacacttctgtcaatgcgatatccagacattttgctagtgcttccttgcatgtccaaagaagggtaaaataaaaatcagcctcggttgtcttttgcaaaaagacctgctccgcctcagtaaaaaagcgtctgcacagactgtcccgatagcgtcccagcatctcaacatccactcccaccatctgatccgccacgatacaggcacaccagcctttacaatgtgacagggaaaattgaacgtcctctaaaaaaggtttgcccctctccgacatgccataggaaaaaggtgcagacagcccccggactcgtaacatatcttccaaaaggtgaccagcgcaaatgctctgcctacgggaagatctgctttttatggcatccgccttttcttttctggcaggacttaacgatgcgtagtagtctttgatcttggcatccgcttcttccgtatccgcaggcgggatctgctccagcccaagatcagcaaaatctgaaatcttcataatgacaaagcccctgtttgtaccattcacacttactgcaagacgactcaaatacttcttttgtcagatacttgtccgcctgctgcatgagctgaccatatgtgtaggtctgcccctccaaaagatgcagaggttccagcagatgctgatccttgctcttgacatgattggtcgcatccatgcaatatttaccctccaccagattcggacattttttgcagatctcatccggatcactcaccagtaaaagcggctcgtctgcgtgatctttgagccatgtgaccatcttagtcatattctggcaaaatgccccgctgtaaccatagccctgatataaattggtacacataatgtgatgtacacgaaaatgcttcatttcttttctccctcgtataccggctcttctgtatccagcccaaaatacgctatcttttccacgtcctgtgccaagatctgacttcccagatcatacacgatattggaaaggacatactcatcctgattgacatagatttctataatatttgcatccacataaatatcaagatgtctgccatcctgcaagatgggcgtgcaaaactccttgcccacttgggcttcctcgccaaaaagatccgctctttctatggccaagaccttgcttctgtccgtatagaccttttcctgataaaagcggatgacatagcccccgatatctatatgtgctccctccaaaagatccagacggatctttaatggtccttgatcccgcaggacatcttctgcctgtttcttttgcaaaactcttgtaaaaaggctctccaccgccggatgcagtccaaaacgcaagtcaccctctttttgcctgaccagacgcggaaaggtcagcataccgatcctgccgtctgcaagcggacgcggcatacgcatccatgccatgacaatgcgtctgcctttttcatccagtgtactttgcggtgcataaagatccatgccataatctatgaaacgggggtgtgacaggatctttgcctgcttttttcccggatcaaaggacaattttgtccagactgactgattgggataacttgtcccggtcttttctatgccaatgggcgacatgatcagataatgttctccgtctatggaaaaaatatccgggcattcccatgtatggctcttgatgcgctcgtcgcttaccacggatgcaaattgccagtgcagaccatccctgctgctatagagcaaaagatttccctgctcccccttacggctgcccaggaccataaaatactgttccctttcctgccagacttttgggtctctggtatctccgggatgaccgacctcattttccgaaaacgtcgggatgataatgcgtttttcttccgccggaaaatgcatgccatccgggctttccagcattgcctgacatgcgatcagcccactgccgctcacatgaatatttgccggatccatggatgcatagacgatcgcagtgtagtacagatacattttcccatcgatctctatggcagacccggaaaaacagccattacggtcaaaatccctgctgggatataaggcgatcccctcatctttccaatgcacaaggtctgtcgaggtcttgtgcccccagtgcatggttccccaccggctttcgtagggaaaatattgataaaatatgtggtatttgccccggtagtagataaatccattgggatcgttcatccaatggtctctgggcagaaaatgtaacgttaccgccatctcttacgcctcctcatgcgtcagtacgtccgatacctccgtgatcgtcacataggcatgccgatcctgttcctgcacgatctgtctcactttattgatctggaaacggttgacaacaaaatagatcatggtcttatccttatccgaatagtagcccttggctcccagaagcgtgatcccgttaccaaattcagaagaaagtgcctcgcagatattgtcgggatggttggtgatgatcatgacggatttcgccttatccagaccttccgcaacaaagtccactgccttgagcgcgatcgcatatgtgatgatcgagtaaagcggcaggatccaactgcccatgacaatgcccgcaaacacatacaaaataacattgtagcccataacaaaagttcccaccgtaatgccaagtttttttgaaaaaaggatggctaagatctccacgccatcgatggcaccgccgtagcgtatggtcagaccactgccgataccggagatcagtccgccaaagatggcacagagcaaaagatcctgctctgccaaaggcgaggcgatcgtcacatccaccggcaggatatccgtgatgatccaggttcccatagaatagacaaaaacggcatagaccgaatagagggtaaaggatatgcccatttttttgtaaccatataaaaacaaagggaagtttaagagcaaaagaaataccgacagggacagatagcccggtgtcacctgcgccagcaacatggaagtacctgagatcccagagtcatacagattgaccgggtacaaaaaacaggtcacgccaaaggcgttgatcaaacctgcgatcgttagcataacaaagtttttgggttgtaatacgtcttttttcatctagtctcctctcatttcaaacggcgtttacaagacttcataaaaactaaaatatgctttattgtaccaaaaaatgccccttgtctcaacctatgcttactctctttgactgtcgcctgtcacataatcaatgacaatgcccggctgcacattatagcaaaagacatcaaagcagatgccctgtcctgcatcttctaccgaccatgcttccatgtgcacgccccgcgccacaagatcgtctcccgaaaagatcggccttacccggtacaaaacatggtttccggtctcatccacatacgcgtctaccatatcctcaaaaggcagcatgccctccacattcagataacgcgtacctgtaatgagatttttttcattggcattttctccggtcagttgatagccgatcagatggcagcggttatacagataattgccgtcgatcagatcgttatatttgaccgtatgccagccactcggccgtacctgtccgatctccccgcgcttctctgtcggctgggtctggggacagacattggcaaaggtcagtgtacatcttcccatatcgtctagatctccatagtaggtaaatgcctcagtggtcttcttttcctcctctgtaaaatccggcacattgtcccctaagactacatagggggctccactatagtccggtatgtcacttagttcttccgcacctacttctgtcgtaatgccgttcgggagtttctggtccgtggtatcctgccccatgcgtcccagattcatgccgatcaaaagtgccacgatcgccatagcggttgctgtcatcttatttctttttagctttttatatctgctcatcatcttttccttgtcatgtattttattctttttatgcccgtctattatagcgcatttttcctctgccttgcatccccttttattttgtgatttaataagcgcgaagatgcaaaaaggaggttgatttccaatgaagaaagaattgaactgggcagtgatcggtaccggcgtgatcgctaacgaaatggcacaggcactgcaaaaaatggacaaaaaactctacggtgtcgccaaccgcacacaggaaaaagcccttgccttccccgaccggctccgacgagcaggcgaccatgcttttacaaaatgatctggggcagatggctaccgtagccttatccatgcattccaagcagccaaaacgcgccatgatcagtttagaaaaaggctatatcgagatcatggaatacccacgagccgataaagcctttatcgtcgatgccgcagcgggcgacagacgcgagatctgcgccggtcaagcggcaaatgccctctattatgaaatgaaggatatggaagatgccatcctttccggggatgacagcatcatgcgccttgcccagtctaaagatgtcatggatatcatgacaaaggtccgtaaagactggaatctaaagtacccgggcgaagtctggtaattagtgaacgcgcacctttcccacacattttttgaccggggatgcctgacttccagcgcgcatgcccggtttatgggcgatgcttggcggcaaaatagcgtaagaaccattggataataccatgtgacacatttcctttggttctttccaaaacgccacatcgcgatcggcatcataggcttcctctacaataagtcctgccacatttaccgtatcaatggcttcctctccggaaatgatccactgaatatccgtatagttcttgtgggtttccaggcgacaatctgccgcttccttggtctcatactcctggatcataaaatagaaatctccatccacttcataagtgccgactgccatagtggctaagtcctcttcttttaaatatgctactgcttcctctaaagtcatttgtattctcctttgtcaaaaatcttatcctctactctagcactttttctatctgtatgcaaaattgctactccagttttacctgaatgctacctctcgcatggcttcccttacaaataatgcgatacctgccatccttaggaaccactatggtctggatatcctcactccaatcttcataagattgatttgcaaggacttgaccctcgctatccttgatcgtgatctcaatataaccatcatcaatatcatgcccgatcgcgatctgatcccctttttgcgcctcatactcgcgttccagttccgtattcatccgtttgctctctatggaaaaaccattgtcccggtctgtgaccgaataatcggaacgattggcatataggatcagaataccggtcaccagagccagcgctacccaaagtaccgccaatcctatatatttgtacttaacgccttctgccgcctctgtttcctctgccagtttcttttcacatttataaaactgcattgtcaatactcctaagtataagagcgccagcagaatggttatccaaagtatcatggtgatgatgagtccgctttttccggatcccatgtagatcagtgaatccaagccgatccaaaaaataatatctgatacgcaaagggtaaggtaaggaatatatcttgccttaaagacacgccgtaccatggcaagccgggatgcatcgtcacaaaaaatatcttcatcctctgcgatatcctcttttttcttccgaaaataagaactctcatcaaaatcaaacaaatattcccagccgcagtccgcaaacatctgtatataggcgtctccaccggtctgatcatagtcgatgcggtagatcacatcctccggctgacacttttcaaaaatataggcacggacatagagataacggagtgatatctttaccagtttccagccttgctgatgcattttgcgcaaatatgcttcttctttttcatattctgcaatggaaaaatacttaaaagtgatcttcttatctttcatagctacatctccttcatattccggtacaatcggtcaattcgtttcttttcggtttccagcacttccctgccgagtgccgtgatctcgtatattttccgcttgtcctcctctcgcacaaaagagatcagtccgtccttttccatctttgacagactgccatacatggttcccggtgccaatacaatgtcaccacccgtcatagtttttaccttttgcacaatgccataaccatggttgggttcctgtaaacacagtaaaatgtaaaaacctgtctccgtcattggcacgtatacttttttgatatgcgcatccatgataaaacctcttatattccagaatatatatcgcacttcgatatatcatattgtatcgcagtgcgatatatgtgtcaaggagtttctgtgcccatacaaaaaggcaggaatttcttcctgcctttcactgtactttcttcttttaatgatattgctttaaatatactgccactgaccttgtcatttccttagaaaagtctgaattgtatttgcgctcgcagaatgctgcgcaccaatcttcaaaagatctttgcttacaatggtgtgccaacataccacgcagttctgctccatccatactgtgatacgtgttttcatgcacaatgtattcctgtgggcagcgttctggtttcttgcgcatcttttgctggtcggtcggccatccgtagaccaacatggctgctggaaatacatagtccggcaaatgcaaaagttttgcgacatcttcctgattttctatgatgtcaccgatatagcaggatccaatgccaagactttctgccgccacgaccgtattttgcgctgcgatcgtcgcatccgtgaccgcaagcatgagatctcccacaccgggatgtcttgggctgcagcctgcctctatataggcatcataccatttcttacaatctgcacaaaatacctccaccatatctgcctttgcgataaaaggctgatggtcacaaaaatctgccagcgtatccttgatcgcctgatccgtcacatcaatgatcgtatataactgctgacatccggcagaaggtgcctgcgccgccgtctctaagatcgtctttttcatgtctgccgggatcggtctgtcctcaaacacacgtacagactttctgtcataaaggctttttatgatctcattcatgcttcctgtcttcctttgctccctataagtacatacacccggatcttcccggcatatcatcaccttttacataacgggcattgaattccatattgatttgtcgaagttcctttttcccgtcaatataatcctgatacatttctgctaatcccggcatacagccgtcacaacttgcttctatatttccaagtgcatctgcaacgattttctcccgttcttcctttgttgtttctgcaatcaaataactcatatgtttttcgtccttctatatctgcactaatttatacgttctcgttccaagccccatcttttgtgcatgatcaagacaagattcccattctgtatccgggtgtgtcatcttgaaatgatcgtgtccacaatgtgcatgcacttcttctggtaaattcctttcattttcatctaacagacttcctgacatcgcaggcattttattgcaaaggtccgcacatgcctggtctaatgctaccgggtcaaaagatgcaagcattccgatattcggaataattggaatatcattttctgcatggcaatcacagtttggcgacacatcacagatcaatgaaatatgaaaacatggtctgtctttgcagactgcatatgcatattctgccattttacaattcaacatgaaaacagaatctgcaaaattcgctgtaatcgcatcctttggacaaactgctagacatctgccacagcccacacacttatcatgattgatcgtcgccttgccgtttgctatgaccggcgcaccatgtgcacagatacggctacaggcaccacagcccacacacagatccttatctgcactcggcttgccctcacagtgctgttccatcttaccggctcttgatccgcagcccataccgatatttttgatcgcaccgccaaaacctgccgtctcgtgtcccttaaagtgtgtcagagaaataaagacatctgcatccataatggcatgtccgatcttggcttcctttacatattctccatcgatcggaacaatcgtctcgtccgttccctttaagccatcaccaatgatcacatggcagcctgtctgtaagggtgaaaatccgttgacataggctgtatccagatgatccagcgcattctttctgctgccgacataaagggtattgcaatccgtaagaaatgcctttccgccgagttccttgacataatctgcaaccaccttggcataattgggacgaagaaatgcaagatttccatattctccaaaatggatcttgatggcagcatatttttcattaaaatcaatgttttcaaatccagcctgcttcataagacgatgcagtttctggatcaggttctcatgttctgtcgttttaaaagatgtgaaatatacttttgattctcccatgatcttcccttttccttctcttaaatacttatatgtactataaaatccccgtgccaaatagcacggggatcccatgatcccagaccgggatattattgtctatttttagaacttgccagcgtcagcagcctcttgaacggatacagcaacagcaacggtagcacctaccattgggttgttacccataccgatcagtcccatcatctcaacgtgagccggaacagaagaagaacctgcgaactgtgcatcagaatgcatacgtcctaaagtatctgtcataccataagaagcaggacctgctgccatgttgtccggatgaagtgtacgtcctgtaccaccgcctgatgctactgagaagtactttttaccctgctcgatacactctttcttgtatgtacctgctaccggatgctggaaacgtgttgggttggttgagttacctgtgatagatacaccaacgttctcaaagtgcatgatcgcaacaccttcctgaacatcatcagcaccataacacttaacagatgcacgaagtccatctgagtatgccttttcatatactacattaagttttgcttccttgtagtcatactttgtctcaacgtaagtaaatccgttgatacgggaaatgatctgtgcagcatcttttccaagaccatttaagataacacgcagaggtttctgacgaaccttgtttgccttctcagcgataccgatcgcaccttctgctgctgcaaatgactcatgtcctgctaagaagcagaagcactctgtctcttcctctaataacatctttccaaggttaccatgtccaagacctaccttacggtgatctgctacagaaccagggatacagaatgcctgaagtccttcaccgattgcagctgctgcatcagcggctctacggcatcccttcttgattgcgatcgctgcacctactgtgtatgcccagcatgcattttcaaaacagatcggctggatcttcttaacctgctcatatacatcaagtccagcatcctttgtgatcttctcagcttcttcgatagagctgataccataactatttaaaacagcattgatctggtcaattcttctttcatatgattcaaataaagccatcttcttacgtctcctttctactactctactcttgggtcgatgatcttaacagcgccctgctctggtgtaacacgtccgtaagaaccggaagccttttcccaagcagtatttgcgtcatcaccctttttgatgaagtctgtcatctttccaagggaaacgaactggtaaccgataacttcgtcgtcagcatcaagagcaatacctgtaacatagccttctgccatttccagataacgaacaccctttgccttggttgcgtacatagtaccaacctgtgaacgaagaccctttcctaagtcttccagaccagcaccgatagcaagtccatcatcagagaatgcagactgtgtacgtccataaacgatctgtaagaataactctctcattgctgtattgatagcatcacaaacaaggtctgtgtttaatgcttcaagaattgtcttgccctgcaagatctctgctgccattgctgcggaatgtgtcataccagaacatccgattgtctctaccaatgcttcttcaataacaccgttcttaacattcaaagacaacttacatgcgccctgctgaggagcacaccagcccacaccatgtgtaaagcctgaaatatcttcaatcttcttagaatgcacccattttccttcttcaggaattggagctggttcatgttttgcgccctttgcaacaggacacatgttttcaacttcctttgtgtaaatcattataagactcctttcataatacataaagcatgcatcatatggctatgccttgcttagttaaaaaaataactaacacactctgcttattttctcacattttctgcggttcgtctagacctttttctctttccgtgcgctttcctacgcttctttttttaccacgtggtctttatctttaaaaatggagtttgccgggatgactccgcgtacacaagatactggataaatattagaatgtgagcataccaccgtacctggatttaatacactgttacatccaacttctacataatcgccaagcattgcaccgaattttttaaggcctgtcgcaatctcttccttgctttcatagcggtcttttacaaccacaagtgtcttatcactcttaacattagaggtaa

SEQ ID NO: 12510 - DNA, 356 bp, Unknown
  gut microbiota DNA sequence
aatctgaacggaacaagatttccggctgctgttgtgagtaaaaaggattttgattttatgcgccaagatggggatattggttctatggactatgatcaggtggtaaagaatggtgatattttctttggctggtcggcgtggatggaacaagatggatatgctccgggtgaatccattgtatttgactttaagaatggaagtgaaacctatacctatcagggaaagattgcaggatcttttgtaagtgcggacacttatcttgtcattccggaaggtgtataccgttccatgaatccgagaggaacagcctatggctatctgtgggtggactgtgataaaaaagatgtggcatctgt

SEQ ID NO: 12511 - DNA, 228 bp, Unknown
  gut microbiota DNA sequence
atgaatccgagaggaacagcctatggctatctgtgggtggactgtgataaaaaagatgtggcatctgtagaacaaagtctgaatactttgatttctaatacttcgcatataaaaatggatacttatcatgcgcggttacaatctgccgaatttgcaagcagcatgatgaagcttggctgttatctgtttatggctattgtaggactcatcggttttatgaatatggca

SEQ ID NO: 12512 - DNA, 3440 bp, Unknown
  gut microbiota DNA sequence
tttggtccccatccgcacttgattgtaacgccatcttctcctgcttctcttacttcttcgtccgatgccggcatttctttttccgactcgaggcaaagctgtgtcacttcagaagcaccatttctagcactaacacgggaagcatcaattgcaacattaccaccaccgacaacaacgactctgccattgtaatcagcgccaccgcagtttgcattcttcaggtaatcaatggctgtaaaggtgccctctgcatcatcccccggtacaccaggacgacggcctgcagagcatccgatagcaatatagaatgccttgtatccctgtgcacgaagttcgtctaaggagatatccttaccaacttctacgccggtcttgatctcaacgcccatctcgcgcatgatgtcgatctcagcctcgatgacgtctttttccaacttgtaagatggaataccatagcgaagcataccgccggcattctcgttcttctcaaatacggttggcttgtagcctctctctgccaagtagaatgcgcaggaaagtccggctggtccaccaccgatgatagcgatcttttcttcccatccgttcttgtggatgctggctggaacaacgatcggaggaacgtatctggtatctgcatgcagatcgcgctctgcgatgaaacgctttactgcatcgatagcgatcggttcgtcaatggttcctctggtacaagcatcctcacaacgtctgttacagatacgtccgcagacagccgggaatggattctgctttttgatcagtgccagagcctctgtgtactcaccctgtgctgccttctttaagtatccctgtaccgcgatatgtgcaggacatgctgtcttacatggagcagtaccggtcttgtgggaattgatacggttgttgtctctgtaatccgggtcatagtattccttgccccattttaccttatccggaagcaactgctttggataggtcacttcggttccgtctgccttgcaaagtttctgtcccagtctggttgcacctgccgggcaatactctacgcagcgtccacaagccacacacttgtccttgtctacgtgtgccacataagcggaacgtgacatatttggtgtattgaataactgtgatgtacggagtgcattacagatatttacgttacagttacagataccaaagatcttgttctcgccatcgatattagtgatctgatgtacgaaaccattgtcctcagcacgttgtaagatctcaagtgcttcttcttttgtgatgtcatgacccttaccggtctcacggcagtaatctgcgaaatcgccgacaccaatacaccagccgtaatcatcatctgcaacaccttcaccgatcactttacgggaagcacggcaagagcaacgacctacaccgatcttaccttcgtatttagacagccaataagataatttctcgatgtcgatggcttcattttccatagagatcgctttctctaccgggataacgtgcatgccgacacctgcaccaccaggaggtaccatctgtgtaataccatccaatgggatataagtcatacgctcaaagaaagaagcaacatccgggtgctgttccaatctaggattgcccttgacatcccccgggatttcttccatgttgaaaagttcagcagaaccaggtacaaacatcggaagtgtgtagcgtctttctgactgtggtgctgtacggccattgtggtcataatgatagccgtaatcatactccaaaagtccgatataagacatttcatccaataacttctggaatccttctttccctttttctgctaccttgtctttgttcatttcacagagttgatcaaacgtgtaatgcacacgtcttttcatggtaagacctacctctgccatttcctctgtaatgatctctgcgagtccccagtattccggatcctctgcggtaacgccaccgatcatatgaccggcaacatctgtgattcgctttcctaaagcgatgatctttggacttggattcttgtcgcctttgtgattcgcaggccactcattgtacttattcatgtccatgtctatactctccttttctcatttcttattgcttgtttctattgtctgcaccgatgcggtgctaaacattctcttgtaattacttatgtatgttcttcgctcatgccaaaatgcatttcccgcagaccctcgacctcgtcgcagatctcctgtaagccacaggaaccacaatccatattgacatcttttagcatatgatcgatggtcgccgtgatctgcttggtctttttgagcccttcctgcagaccgacgtaatcagcacccggatctgtgataaagatgatctttactgcctcgacttccttgtgcaggtggagtgccttttgcatggcattaccgatcgctgtaaaattcagcccatcttccagtgcatctgccgccacgcgcacgctctccctgtcattggaagatgaaacgcgaagcataaatcccttagggtagatgtggtaacggaagtagccgatgttctggatggtattgtataacttgtctcccgttccaatactatcctcggcaacacgtaccagggcgatccttgcatatggggtgtcctctgtgatctgtggcagatcttttcctatgaggatgatctcatcctcccctaccagatctgtctccgtcgtcactaaggtattgcccacggcaggaagattatgcccgcccagttcatatgccatatctgcctgtaagatcatcattgcttttccggcatcctgccagtctctgctgatcggatctgcagcgtcaccgaccggaagtttcacgacatcctgacctgaaaggtcagtcagaatgtcattgataatctcatcataaagtctcatagatgtgtgtctctttctatcttatcgtaatgctttaacatcaacggttcgatcgctgccgtaagtttcatatccaagttaaagaaatatacgataaaactcaaaacaaagaggcaaaccaaaacgatcgcaatgatcaaaagtacatgaagaaatgttgccatattaaaccgctccttccttagccattcccttttgacgtgcaaactctgccgccccaagtgctcccatcaactgtgggtcgatcggaagatcgatgactttcaaattcaataccttttcgatggcttccttcaagccgtcgttcttggcacatccaccggtcaaagtgatggaatctacagcacctgccttcttggacataacgaagcagcgctttgcaacggataactcgatacctgctgcgatctcatccatcggcttgccctctcctaccaaagagataacctctgactctgcaaatacggtacactgtgccgtgatcgggatcacattctttgccttcaaagataacttggaaaactcagacagatccatttcaaat

SEQ ID NO: 12513 - DNA, 15908 bp, Unknown
  gut microbiota DNA sequence
catctgaatcaagataggaacaatgcaaagaagcagccatatgcacagatatccacggcgatattgtaaatattttttcatatgacctcctattccaatggcaaaagatagccggcgccaacctttgtcacaatatagtcatgaaggccaatgccgtctaattttttacgcaggcgattcacattgacggtcagcgtattttcctccacataatcatccatctgccacagacgcatcataagcgtatcgcggctgacgatttcacctttgtgctccatcaatgtctgcaaaatgcgaaattcattctttgtcagttcgattttctgtccatcataggtaatggtagaatccatcaatcccagcatcagaccccgatgctccaacataggaagctggtttcccatgtcatatgtccgccgaagcattgctgtgatttttgccatcatcacatccagatcgatgggctttgccaggaaatcatctccccccatattcattgccataacaatattcatattatcagaagctgacgataagaatacgaccggcacttgcgaaacctggcggatctgcgtacaccagtgatatccattaaaaaacggaagcatgatatccatcaaaacaagatgtgggtcgtacgccgtaaattctgtcataacattttgaaaatgctctacaatcctggcttcattgccccaggactctatcttttctttcatggcgtttgccatggtcgggtcgtcttctacgataaatatgcggtacatgtggtctccttctacatttcagacactatttcctatcattctatcactttacggcaaaaagaaaaatccccgcagggaaaagtccctgcggggtgacatagtatttatgttgtattttaagatatggaagttcgttctcattaagttgctttctgacacgactcgactagcgttctcgcttcgttatcactcgcgacaactaagtctccctgcgggcctcgcactaaattcgaacttcgcttatgctcgttctcattaagttgctttcggcctatctctgcacgcgagctccagcaccacccatgattgcttcaacttccttcttgctagccattgtagtatcgccaggtgttgtcatagcaagtgcaccatgtgctgcgccatagttaacagccaattctgcatcgcctgttgtcataagaccataaatcagtccggatgcgaaggaatctccaccacctacacggtccatgatctcaagtcccttgtaatccttagccttgtggatctcaccatctgcccagcagattgcactccagtcatttacagttgctgtcttaacttcacgaagggttgtagcaacagccttgaagttaggatatgtcttagcagcctcgttgatcatcttcttgtatccgtcaaggttgagttcctttaagttctcatcatttccttcgatctcgaatccaagacatgcggtaaagtcttcttcgttaccgatcataacgtcaacatacttagcgatctccttgttgacttcctgagccttagcctgtccgccaatagcgctccacatagatggacggtagttcagatcgtaagatacgatcgtgccgtacttcttagcagccttgatcgcagcgataacagtctcgcatgactgctctgaaagtgctgcatagataccgcctgtatgcaaccaacgagcaccaagttcaccaaagatataatcaaagtcgaaatcttccggtgtagcctttgcgattgctgtgtttgctctgtcagagcatcctactgcaccacggataccaaatccacgctctgtaaagttgataccgttacgacagattcttccgattccgtctgtatccatccacttgatcagagaggtatcaacgccaccctgaaggatgaaatcttccatcaacttacctacttcgttatcagcaaatgctgtgataacaccggtattcatgccaaagcatctgcgaagaccacgaactacgttgtattctccgccgccttcccatgcacggaactgtcttgcggtgcgaattctgccttcgcccggatccagacgtaacataacttcacccaatgaaactgcgtcaaacttgcactcacttgctggtcttaaattcaaatccatttctcttctccttttatttaaaatattacgatgcccacctagacatctttttctacataacttacaaggtggagtatagcacgaaacaaatttcttgttttacttttttaccaacaccacaacttgtgcaatgttttccacaaaatttgcaatccgcacctcgcaaaatcttcgatgtttctggattacaaaatttgtaaaaaaagagctgcccaagttgtggacagctcctttaaaactcttatgaaattactttcggatacaacgtaaccaagtttccgtgcggattactcagcgatgtcagcgtacatgaagtaccagtatccgttagatgcatgccatgcacctgtaaccttgtcgctcatgagatagaaatcattgtagtatgcaactgggatacatgcagcatcatccataagcatatcttctgcttcgtgaagtgctgcagaacgctctgctgcgtctgtagttgttctagacttctcgattactgcatcgaattcagggttgctgtatttaccatcgttgttaccattgtctgttgtgaacagttcaaggatgttagatggatcagagtagtcacctacccaaccattacgagatgacatgtaatcaccattacgacgcattggtgtgaaggaagcccattctacgacttctacatcaacatcaataccaagttcgccccaagccttctgtaagtactcagcaactaccttatgatatcctgcatcatttgtagaatatgtgatctttggaattccctttccatcagcatatccagcttctttcaagagatcctttgccttctgaaggtttgcatcataatctgttgtgctgatatattccttaccgccattagcgttctcagagaaatcagaaccatctgtatctttccatcctggtcctacaagattaccagctggagaatatgttccctgcatcaaagtgtttgcaacatagtcacgatcgatagcaagtgaaagtgcctgacgaacctgcttgttgttaaatggctctttctgaaggttcaagcttaagtagtatgttccgatgattggctctacatggaagtcatcagaatccttaagtgaaggaatctcttctgtaggaacatccttgatcatctgacattcacctgtctggtatgcgctgtatgcagcgtttgcatcttcgatcaagttgaacttgattccgtctaacttaatagaatcagcatcccagtaattaggattcttcttcattaatacataagatcctggaacccattcagttacatagaaaggtccgttagaaatatatgtatctgctgctgttgcccaagcatcaccatttgcatcgattgttgccttctgaactgggttcaatgtagcaaatgctgcaatagattcgaagtatgggcatggatttgcaagatgtacaacaaatgtcttgtcatcctttgcttcaacgccaagcttttcgatgtctccagctgctgcctcatcaaatccttcaaccattccaagaacagttgatgcatatggagctgctacgttaggatcgcagacacgctgccaactgtaaacgaaatcttctgctgtcaaatcagaaccatctgaccacttaagaccatctcttaaatggaatgtgtaggtaagtccatcatcagatacttcccacttttcagcctgtccagcttctggatcgccattctcatcgagtttcaaaagaccctcgaatgcgtgtaagatcatctcaccaccgtcgattgcggagttaagtgctggatcaactgtctctggatccggaccagtctcaacagataaaatcttttcatctgatgaagcactagacttcttaccatctcctgaagatgatccacatgctacaagacctactgtcattgcagcaacgagtaataaggaaatcactctctttttcatattttttcctccttaaatatgggcagtttcttttatactgccaggtttatataaacactgcgaggggaaaaacctcgcaaggtttaccataaattactgtaccttatccaggttgtggcatgctgcataatgtcccggagaaatctccctgaattcaggaacttcctgcgcacactgttctgtggcatatgggcatctggtacggaaacgacatccggaaggtggattcaacggacttggtacatccccttccaaaacaatacgtttgcttgttctcgcgatctttggatctgcgatcgggatcgcagaaatcagactctttgtatatggatgaaccgggtgtgttgtcaattcataactgtctgccagttctaccattcttcctaaatacataacaccgatacgatctgagatatgctttactacagataaatcatgtgcgatgaaaagataggtcagacccatttcttcctgcaagtcttcaaacatgttgatgacctgtgcctgaatggatacatccagtgcggagatcggctcatcacagacaataaattctggattgactgcaagtgctcttgcaataccaacacgctgtctctgtccaccggaaaattcatgtggataacggttcgcatgttcagagtttaatccaactttacgaagcatgtcaataattaattcatatctttcttgtttatttgcagcaagattatgtgtatcgatcgcttcaccaacgatatctcctaccgtcatacgtggatccagacttgcgtatggatcctggaacacgatctgcatcttcttacgatatggaagcatctgtgcccactgattcttttctacatcaaatacaacgtcgccgtcatatgtaaaacgtccgcctgttggctgatacaaacgcaacagtgcacgacctgtggtagtcttaccacatccagactcacctacgagaccaagtgtctcgccacgattgatgctaaaagaaacatcatctaccgcctgaatgtactttttatgcttaccatggcctcctgctggaaagtactgacgcaaatgttctacttcgataaatttatcactcatttgcttctcccttctccatggcttctttctgattgagccaacattgtgtatagtgaacatcatcaaactgggttaccggtggcatctcgcgcaggcaaatcttcatacatgcttcgcaacgaggtgcaaaaggacaacctgccggagggttcaaaagatccactggagttccttcgatcggaaccagtctctcatgttccttggtatccagtctagggatagaacggatcaatcccttggtatacatatggtgtggacgatagaaaatatcatctgtcgtaccatactcgacgattcttcctgcatacataaccgcaatgcggtcacacatggaagcaacaacacccagatcatgtgtgatcatgatgatcgccatgccgagtttgtccttgagttccatcatcagttccaggatctgtgcctgaatggtaacgtccaatgcggttgtaggctcatctgcgatcaataactttggttcgcaggcaagtgcgatagcgatcataacacgctgtctcataccaccggacaactcatgcggatactgctttaatctcttttccggctcgttgataccaacgagttccagcaattcttttgcacgggcatatgcctgttttttatctttgtcggtatgcagacggataacctccgtgatctgattaccgatggtgtaaaccggattcaaactggtcattggatcctggaaaatgatagagatttctttaccgcggatcttgcgcatctctttttcacccatttcctcaatctcgtgaccgttaaactgtaatgtaccacctatcaatttaccaggatgagccgtcagtcccatcagagaatatgccgtaacggatttaccggaacctgactctccaacgataccaaggacttctccctcttttaaatgaatggatacatcgttaagcgctttaacctctcctgccggagtaaagaaggaaagacgctcgttctttatatctactaagtattcttctgccatgacgcgtcccctttctaattctttaacttcggatcgaatgcatcgcgaagtccatcacctaacaggttaaaactcaaaatgatcaaactgatcgcaacagcagggatgaacaaaaggtatggataagttccgataccattgattgcatcacttgccaaacttcccagtgaaggaagcggaactgcaacacccattcccaagaaactcaggaaagactctgtaaaaatagaggatgggatctgcaaggttgttgtaacgatcaatgtaccgatacagttggtaagcagatggttcttgatgatcttaccattgctgacaccaagtgcacgggctgcggtaacatactcgctttcctttaacatgaggatctggcttcgtaccatacgtgccatacctacccagtacaaaagtgcgaatacgatgaaaatactgatcaggttggttccgactgtctgtacccacttaaatccaggtgcatttgccagattgttcagtggatctttcaaagcgaaagataaaagtacgatcaaaagcacgtcaggaaccgtatatatgatatctacgattctcatcatgatcagatcgacccagccgccaaagaaggctgcgatagatccgtaaatagatccgatcaccaggatgatcgctgtagcgatcaaacctaccagaagtgagatacggctacccatcataacacggatggcgtagtcacgtcccatcttatctgtaccgaagacatgtgggaatacggattccccggcatcgattcttgcctgctcgtctgcggaatatgtaaacggtgcaaggttgttggcacccttgatctgctcatcgtatgtatatggatagaacgatggaacaataaatgagaaaatcatgaccaaaatgataacaacgatagataccattgccactttgttctttctcaatctgcggaaaccgtctttccagaaactaacgctttcccgcatgatgacctgactctgtttttcctcctcagatgcagggagaaaatcatcaggattcaaatctaactgaaaacttaatggattcttcttcatctcatttctccttacttgagtgtaatacgtgggtcgatcaatttatacacgatatctacaaccacattcatgacaatgataagggttgcaaggaagattgttgttcccatgatcagtgtatagtcacgtccctgaatggctccgataaattcgccgcccagtcccgggatcgtgaagatcttctcaactacgaaactaccggttactgtgtaagcaagcataggtcctacataggtaactaccggtaagatagcattacgaagtgcatgcttaaacaactgtactttaccggaaagaccctttgcctttgctgtacgcatgtaatcctgtcctaatacatcaagcatagaagaacgcatcagtctcatgatatatgctgtcgggtaaaatgccaatgctgcgaccggcataatgtagttctgccatgaagaaagtcccatggtaggaagtatcttgaacttcacaccaaagaaatacatcagcacggtacagataacgaaactcggcaccgcaatacccatggtcgatatgacgctgatcagactatcgaggaacttgccacgcttcaaagcagcgatacttccaagcagtaccccaagtatcagggaaaccaatacagaaatcccaccaatctttgcagataccgggaacttcgcctgaatgatacctgcgacggtacgccctctctgttttaaactgtcaccaaaatctccgtgagctacccctgaaatataagtgacatactgctcacctaatggcttgtccaagccatattttgcctcaagcgctgcggttgcctgcgggctgatcgctttctctgaaaggaatggtccaccaggaaccatgttcatcaggaagaaagtaagtgtggctactgcccagatcgttacaattgcaagcgctattctctttacaatgtactttaacatcttgttaatattctccttccaaggtaaatcttaatacctaaaaagaacgcaaaaacagcgtttcgcttccgccccattgcgttcaatcgagggttattatagcacagtgttgtgctaaagtctacaccaaattttcatgctttcacattttcaacatatttgttttttcgcgtatttacggcgtttgcgggactttttgccccgcaggatttccataatattcacaaactgtatatctattcatttattaccagtttcttcttattaaatggtatatttatacactttttacgatattgcatacaatatctgtgcagacatccatcccctcaacggtaatgtgttcataaggaccgtgaaatccataaccgccggtacccagattcggacatggcaagcccataaaggaaagtctggcgccgtctgtgcctccgcggatggcaaccgtctttggtgtcagaccagccattctggtggcctcctttgcccagtcaatgatctccatacatccttcgatctggctgcgcatgttccgataagactccttaatctccagttccactgttccctgtccgtatttttcatttaattttctggcaatacggcgcatattttcttccttggcgtgaaatttatccagatcatgatcacgaatgatatataaaagttccgttttttccacatctccctgcatatcggtcagatgataaaaaccttcgtatccgcttgtcttttccggtacctcctccttcggaagcatactgtgaaattccatggcaagagtctgggaattgaccatgatatctttcgcactgcccggatgcacattattgccatgcacggttaccttggcaccggaagcattaaagttctcatattcaatgttgccttccagatcaccatccagggtataggcatagtctgcgccaaaatgcgccacatcgaaagcatctgccccctcgccaatctcctcatccggggtaaagccgatacagatcttgccgtgcgggatcttgtctgccacaatgcactccattgccgtcatgatttctgcaatgcccgccttgtcgtctgcgccaagtaaagttgtgccatcggtcgtgatgagggttctgcccacataatttttcagatgtgggaaatccttgacggacaaagtcctgccgctcttgccaagcacgacatccccaccgtcataattttcatgtaagacaggcttaactccctgtccgcagaaatccggtgccgtgtccatatgcgcaataaaaccgatcaccggcttatcctccatgccctgcgtcgccggaagggtaccatagacatagcacttatcgtctacatgggcatctgcaatgccgatctccttcatctccgccaccagtttgtgcgcaagatcaaactctctttctgctgacggcacagtctggctcttttcgtcacttgtcgtatataccacgacatagtctaacaatctttcataggctcttttcatctttttatcctccactcgtttatgctatctgattttatctattttttctatcaaaaaactaagccatccagttttctgccaagtgtaccttggctgcccggacacttccctggatcatctgcgttccgccaccgcctttggcatcgaaagtctcccgcagatgcgcggcttcctgcctgcagtctttcgtccggcttcccacgatgaactgatatccctgctcatcaccgcccgcaaagatcgcacagtagcccgcatggtcttttaccatgtcattgacgatgctgcgcattgccttactatcacaggcatccgcaaaaaggaccacatcctctgcatccgcatccagaccttttgcctcctgcgccaggatcttctcctgtgcctgcctgagggcatacgccagattctggttttctgtctgtaaacgcttgatatgacttctcagttcttcttccgatgaactgagcaatcccatcatttcatccacagtctttgtcttctgccgaaaagcatccaacgcacggaagccacataagatactgatccgcacaccgcccttataattctgcacatgcatgaccttgagtccgccgacctctccggtacgtctgacatgcggcgcacagcaggcacagacatcaactcccgggatcgtaacgatccgcacctgaccttccaattcctttttgctgcggtattccatgctctctagcatctggggtgtcgggaaagcgatctccaagaccagatcatccgcgatcacctgattgacccgcgtttcgatcgccgtcacatcctccggggacaagacgccgtcaaagtccatggtcaccacggaatcactcagatgaaatcccacattttcatagccaaaggtagaatacacgataccggaaaaaatatgttctcccgtgtgctgctgcatgttggaaaagcgataatcccaatcgatctgtccatgcacctgatctcccggctccaacttctgttctatgacatgcacaatcacaccgtcccgaatctgcacatccaagacttcgcacttagtagccgggcgcagtccgtgtccaacagacaaccatccctgatccggtgtctgtcccccctgttccgggaaaaagagggtctgatccagaatcacttcgtaacgatcctgtgcctctttcaatgcctttaccgcaaggacattggcatcaaactccgtctcatatgggaatttatcatacaaacattttgttttttccattcgatcacctcacaaatatccggcttttacgccacataatatcctatcatagcacaagcatgggatttatggtatgataaaagacacaaaaaaagaaatgagaacacaaaacatgaacgaagaaaaagatagagccattctcgttggcttacaattaaatgacggatcttcttttgaacacaacttagaagaactggaaagtctttgtcaggcttgtgatattgcgccggtctttaccatcacacaatccctggatgccccgcaccaggcgctctatatcggttccggtaaggtgcacgaggtcaaggaggctgctgccaatttggatgcagaccttatcatctttgacaatgccttatccccatcgcaggcacgcaacttaaacctcgagatcggacttcccatcttggatcgcacagcactcatccttgagatcttccagtccagagcgcgcagccgcgaagccaaattacaggtagaactggcaagactccaatatcttctgcctcgtttatccggtatgggaaccgccatgtcaaggcagggcggcggcagtggatcacgctccaacaagggtgccggggagaagaaactggaactggatcgcagacatatcagccaccgcattactgagtgtaaaaaagaactccagacgatcaaaaagcaaagggtgacccagcgcaagagccgcaacgcttcccagaccccatccgtggctctggtcggatacaccaatgcaggcaaatccaccattttaaacgccatgctgtcgcactacggcaatgatgagatcacagacatctcccacaaaaaagtcttgcaggaagatatgctctttgccaccctggatactacggtgcgcaagatcaccattcccggcaagcctgccttttacctatccgataccgtgggatttattgataaacttccccatcatctgatcgatgctttccgctccaccttggaggaggcgatcggtgccgatcttttgctgcaggtggtggatgtatcagatccttactaccgcgagcatatgcgcgtgacccaggataccttaaatgatctgggtgccggcgatattcctatgatcatcgcctacaacaaggcagaccgcctgcctcagtttgctcatgatcttccgatcgttaccggaaaccatatccatatggcagccggtgcagaccttggcatggatgcccttgccgacttgatcttatccaacctctttggcaagcctgtgaccatggaacttttgatcccttacagccagggttcgcttgtgcacagaatctcggaagccggcgaagtcgccaagacggaataccaaaatgacggcacttatatgcaggtcaccttcacaccatccgccaaagatcatgcccttatgcaggaggtcgcatcttaccgcatcggataagcagcattttctgtcatacaaacaaagacccgacaacctgtcagcgccataacgcttagcagaatgtcgggtcttttattttcatcctatgccggaatgtctacctcatcagactcaatatagatcttgtgccatactaagaatacatagattgcccagatcttgcggctgttatcagccttgccatctctgtggtcagccagcaacttcgtcaaaagggtctgatcgaaatactgtgccgctacatccgaagaaaatgcctcctcaaccctgtgcagatacttcggttctctcaaccacacacggatcggaaccgggaatcccagtttctttttatttgccgtcgactccggcaaatggcgttttgccgcaatacgaaaggctctcttggttgcctcatctgtcacacgataatcgatcggcagattctttatgtattcaaataccttgatgtcaagatacggaacacgtgcctccaaagaatgtgccatactcatcttgtccgctttcagaaggatgtccccctgcagccagaagttcatatcaatatactgcatctttgcaatgtcattcaagcccttgcacttttcatagtaaggtgccgtcaactcctgtggtgtcacatgggtcagtttggtctgtaagatctcctcacgctcctccacagagaaaagattggcattgccgataaagcgttcttccacgctcttgcttccacgaatgataaagttcttgcccttgaaattaggcagtttcttgacaatggatgccaagcccttgcggagtcccaatggcagtttctgataaccagccaaagacaaaggctcatgatagatattgtagcctccgaaaaattcgtctgcgccctcaccggacaagacaaccttgatgtcctttgctgccagttcatctacaaaataaagtgcgatacaggacggatctgccaaaggctcatccatgtaatacataacctttggaatgctgtcaaaatactcatccgcactgatggtcttattgatattctttttgccgagttctgccgtcaggctctctgcgtaacggatctcgttgtacttgctctctttatccaaaaatccgacggtataggtcttttctcccgggaactcagccaccagataagaagaatccacaccgctggaaagggaggcgccgacctctacgtctgcaatcatatgcgccatagtagactcgtgtacaatctcctcgatctcgtttactgtcttttccagagactctggttcttttgccggctgcatgagcggatcgtaatactgatggatctcgatctcgccgttttgcatgagcatataatgtcctgccggcaacttaaagatccccttgaagaaggtctccggcaatacggaatactggaaagacatatactgctctaaggctgcctcattgacctcgcgcttgatgtttgggtatgccagaatactcttgatttcagatgaaaataccagatttccatcctgctgtgtataataaaacggcttgatgccgaagaaatccctagcggcaaataccagatcctttttcatatcatagatcacaaaagcgaacatgccacgcaccttagaaagcaggtctacaccgtactcctcatagccgtggatcaggctctctgtgtctgcattgttagcaaagacatgccccttggcaatcagatcctcacgcaattccagatgattgtagatctcgccattaaatacgataacgacatcccctgtctcattaaacatcggctgcataccgtgatccagatcaatgatactcaaccggcgaaagcccagcgccacctgatcattgacatacatgccctcctgatccggtccacgatggatgatcttgtccatcatcttctttaagacggcttctcgatcccaatcctctttgcttcttccaataaatccacttattccacacatatcataatcttcctttggtcttgtatttgctgtcaatatagtatgcacgttttctgcttgtctatgcgcatctatccatacgattataatggtttcctaagatgaaatcaaggataagaaatcccccttagccaccggcttggaatagtaataaccttgataataggttggatgatactgctgcagatacaactccagcgcctgatcttcaataccctcaatacagatatctgcatgaatcgtccttgccccatcagcaattgccgatacaatgatctgattcataggatgattctgtatattctgcacaaaagaccggtcgatcttgatctcatccagcggtaattccagtatcagttgtaatgacgcatttcctgtgccaaaatcatccatagcaacacgtattccattgctgcggaaaaattcgatctctcctcgcaggaagtcagtatccagttctcggcagcgttccgtcagttccagacaaagattctgcggcgggtaaccggtatcatgtaaagcattgagcacctcataatgaaaatcaggacgttccagttgcggtgccgcaatattgacattgataataaaatcaggaatgatccgacgaatctctgttgcatcctgcaaagcctgccatataacccagttacccagttcaaaaatacaggcgttctgctcaataaaaggaataaaacggtctggcgatacaaatccatacttgtcatcctgccagcgtatcaaagcctctgcacctatgatccgattatttctggcatctacgatcggctggtagtagagggaaaatccggaaaaatcagtcataatctgctggtagatcgtgccgatcatatcccgatcgccaaattcatgcttatgtttttccatattgtaaaaaacaatatctccatgatagatggtcatggactgtccgatcgcataacccagattggctgtaatacgatctgcctctccatgtgcattgccaaaaatagcagcgctccccagcacacgacaggttacatgcttgtcaccgatgtcaaacccccgatatgccatggctcgaattgcctcatagagcagtttggtctgtgcccgatccatatcatgcatgcagaccccatacatggacgtatccatgtgatagaccgttcctcgttcaccaacaatcttctgcagttctgccccgaaaaaccgcagcacctcgtctccaaagcggtagccatacaaggtattgatactgctcaatttgtcaatgaccagcatcatgaccgtagttgacctatcttcctctgtcatttcttccaagcgctctaaaaaggcggatttgctggaaagatgtgtcacattgtcaatctcatccatgataccataattagtaatggtaccggcaaaataatctatctccccgtccttgctcttgaagacagaactctcacatgagcacatgacgtatttgccctcagtgttttttgcacgatacataaggttctgactcatgcttgtaccatcaaaaatacgcttcatgctctcctgatacatggcaagatcgtccggatgtatccgtttttcccagatagcgccggcatcatacatatattctcccggcatatcaaaatccgccatagcacgtctggaccagcgtgacacattggttttcatattgcaga

SEQ ID NO: 12514 - DNA, 1650 bp, Unknown
  gut microbiota DNA sequence
gaatcattgcaaaataaaaggagcaggcacatgagaaaatatatcaagcgtttaaaagcgagaattgccttgaacaaaaagcagtttattacatattccatactcagaactctggtcattttgacagcagtacgctgcatttttacacggaattacgagagtctggcgatatgtattctttctcttatcctgtttctcctgccatccctttttgagcagcttttgaaaatagagattccgccggtatttcagatgatcatttatgtattcatctacgcggcagaaatcttgggagaagtcaacaaatattacacggcgattccgggatgggacaccatgttacataccatcaacggtttcctgtgtgcggcgatcggcttttctcttttcaacatcttaaaccgcggtagcaaatccatgcagttgtcacccttttatctggcaatcgtcgccttttgcttttctatgacggtgggtgttatctgggagttcgtcgaatttacctttgatcaggtatttctcttggatatgcaaaaagatttcattgtctcaaatatcggttccgtgactttggacgaaagcaaaacccagactccggtgcggatctatgatattacaaagacgatcatagaaacaaaaaatggagatacctatgtagtggatggcggttatctggatatcggaatcattgacaccatgaaagaccttatggtcaattttgtcggtgcccttgtctttagcgtgatcggctatttttatgaggcaaagcataaagcaaaatcgcttgcaaaggatcttttgatcgagccattgacggaagatgcgatcaaagaatacgatgacgatattgaaaagagtgtcaacagcaagggcatcagaaacatccatgactctggaggctatggctgccagcgaggacaccatcaacgctgaaatggaaggtatcgaggcctagtctcgttgatttcggtattgcagaggtgtgatgccgtagtgttttttgaacacattttgaaaataactctgactggagaagcaaagatagctgctgatctcaccaagcgatttgtctgtatatcgcaggagagaggcagcttctttcatgcgccgcagggttatgtagtcgtttacagacataccagtttcctccttgaaatggcggagcagggaggaacgactatgggaagaatgcgctacaacatcagaaacaccaatgggctggttgatatgtgttgtgatatattgcaggcactgcttggtatcagcagagatcgtccggggggatttctgcatggctacacggttggcaaaatccatggtcatattgtattggagatttttgaccgcatcttcactttgcagtttttcacattcctgtgtataggtatcaatcaactgataggtctcttcaatgtccatgccgcctggaatggcagcgtctttaccaacactgacaaccagtccgatcaataaattcttagcctgtcgcaagggagtttccgccagttttccttctttgacattcaatgttttggcggttcttagtaaaaaattctccagaccgattacatcgccctgacggaccagggaaagcatctgttgctcaaagaggtaggtgccatgctgtgcttgttcttctcttgctgtgta

SEQ ID NO: 12515 - DNA, 11216 bp, Unknown
  gut microbiota DNA sequence
gatagcaggcatataaaagcggcgcagtttgacatttttatggaggcagtatataatctcacggagaactttgacaagtgaataattgataatatgtgacacattgtcctcagtttagcgccaggaccttagaaaaaggtcgacgaggagaagggttatcgaaaattcggcggatgcccttccgtagatctcaatgcgacatatattggcaaatatgtgggtaactacaaaacaaatccaatataatgagagtaagaaaaaataattgcagtccggtggatcatccggctgcttcgtatagaaagaatgaggatttaaaatatgtgtggaatcataggatttattggaaatgatgctttaaatggcattttaaacgggctggaactgctggaatacagaggttatgacagtgcgggatttgctatccgaagagccggcgagagcctgccggagattcacaaatgccagggacgtgtcaaagacctgcgggagatttctccgaaaaccggtgactatacctgtggcatcggtcatacaaggtgggcgacccatggcggcgtgtctgatacaaatgcgcatccacatcgtgtgggaaaagtaactctggtccacaacgggatcgtggaaaattacaaggaactgagtgaagagtatgaggtggaagaccagttggtatcagagacggataccgaggtggtagcggctcttttgaacaagttttacaagggagatccgaacgaagccatccgcagaacggtcaagaaattaaagggtacctatgctttagtggtcatgtttgatgatatcccggataccatttatgcgaccagaaacgtaagcccgatcgttgtggcaaagaacgaggaactgaccattctggcatccgatccggctgccttgtacgagtattccaaggagttttttgtcttggatgaaaagtgcatcttaaaggcgaccaaggcgcaggtttctgttgttgatttcaatggacaggaagtgcagccgaaaatgcaggtcgttgactgggatgcaggaaacaccggcaagcagggctatgcttattatatggaaaaagagatcaacgagcagccggaggctttgaagcggatcctgacaaactacttggtggatggcagtatcgatcttggctatgaaggggctgtggataaaatgctgacctcttttaaccgcgtctgcatcgtagcatgcggaaccgctttgcatgcaggcatgatgggagctcatctgtttcggaaatggctgggtattccggtcgagacagagatggcatcggaatttatctattcggacaccgtcttggataaggacacactctttatcgcagtatcccagtctggcgagaccattgataccatggaagcattaaagaaagcgaaaaaagaaggcgctgcctgtctggcagtcttaaatgtcagaggttcatccatttcccgtatcgcagattatacgctttataccgatgcgggacctgagatcgcggttgccagcacaaaggcatatacgacccagttgatgatcttttatcttctggtattgcgctgtgcatctttgcggggcaggatgacagaggcggatctggagcatgcactggaaaatctcagaagagtgccggatgctattacccaggtcattgccatcaaagacgacatccatcgtcaggctaaggaagtgatcatggcaagcgacctctttatgatcggtcgcggcatggattatctggttctgctggagggagccttaaaactcaaggagatctcttacatccattccgaggcatatgctgccggagaattgaagcatggaccgatcgccctgatcacagacggaacaccggtcattgcagcagcgacccagaccaaactgatctccaaggaactttccaatgtaaaagaaatcaaggcgagaggtgccaatgtcgtgctcctgaccaaggaagaactgaaagcggactttgcccagagcgatgagtatcatgtgatcggtctgccaaatctggacgacgaatatatgtcattcccggagatcgttgctttgcaactctactcctactatgtgtcagcagataaggggctggacgtagataagccaagaaacttggcaaaagttgtaactgtagaataaaatcgaaaaaaataaggacaatgtcatattatcaacacaggtcaaagaattgggaaagcagatatatctgctttctcttttttatgcagatatcaattatttaataagtttaaaaaatatacttgcattttactgatctaggttctataattagttaaacaaattaaaaaattaaagcgagggggtttttacaataagaattgaagagattttaaaaatggaagtaagcattggttccggggagaatcagttttccatgtccagaggaagtttcaagtacaaacagaagatttccgggaaaagaaaactgaccttacagaatcaggagaagaccgaggagggctatcttttgacctatgtagatccgaaaggaagcagtgccaaagagcaggtacatcagtttgccgtgacccagcagggttcacagatccgtctggcttatgtgggagaggaaaagccgggggtcaatcgttactggctgacctttgtgaccaatccaaaggagcatatctacggttgtggggagacctattcggaactagatctgaaaggacaaaatgtacgtatctgggtggcagagcatcagaacaccggacgtatttccaaaaagatcattaaggaaaagttactgggtaagcacccggacaagaaactttcctttgacaaatacgaatcctactatgcacagccgacctttgtttccagtgacaaatattatgtgcattgcgatatcaatgcctacagcgagtttgattttaccgatgccggaaagatcaccttatatttccaagagccgccggtcatcatcacagacagcggtcaggattttgcagaggtatcccgcaaactgacaggactccttggcagacaaaaggcattgccggattggttatatgacggcgtgatcctgggtatccaggagggaacagatgttgtagatgccaagatcaaaaaggcaaaggaagcaggcgttcctgtggtcggtgtctggtgtcaggactggtcaggctgcagaagaaccggtttcggctatcaggtcatgtggaactgggagtgggatcaggaactttatccgggactggataaaaagatcgcagaatggaaagaagaaggtgtccgtttcttaggctacatcaatccattcattgccattgaaaaggacttatatgcatatgcatctgagcacggttattgtgtccaggatcgcgagggcaaagattatctggtgaccattacgactttcccggcagctatggttgattttaccaacccagaggcatacgagtggtacaagggactgatcaaggaaaatatgatcggacttggcatgggtggctggatggcagattttggtgagtatctgccgatcgacgctgtgctttacagtggagaggatccggcgatcatccataaccagtggccggcgatctgggcaaagatgaatcaggaagccgttgcagaatgcggcaaggaaggtcaggtattcttctttaccagagcaggacataccggaacgatcgcacattcccatatgatgtggacgggcgatcagcatgttgattggtctattgatgacggactgccggcagtgatcccggcgaccttatctcttgctatgagcggttacggtatcgcccattcggatgtcggcggttataccaccatcatgcatatgcgacgcagcaaggaattgctcttgcgttgggaggaaatgaatgtattttcaccactcttccgtacccatgagggcaaccagccggtcaacaacgtgcagtttgatgatgacgaggaactgttggcgcaacttgccaagtgcggcaggatgcatgtcgctttaaaagattatctcaagggtctggtggctgaggagatcagcgatggcacaccggtcatgcgcccactcttttatcattatgatgaggcagaagcctacaccgaaaagacagagtatcttttaggcagggaccttctggtagcaccggtttatgaagaaggcgcaaagagccgcacgatctatctgccaagcgatggctgggtcaacatttttgacggcaaggaatatgtaggcggacatatgatcgtggaagcaccgatcggcaaaccaccggtatttgttagaaaagacagtaaagactacgaagcactcatgcaagtagcccaagcataaaatttataaaaaggagattacgaaaatgaagtattttttagacagtgcaaaaattaacgagatccgtgaggcatatgacacatttggtattgatggtgttacaacaaacccaaaccacatcatgttgtccggtaagccattcaaggaagttttaaaagacatggtagagtttgtagaggaaaaggacatcgtaggttatgaaaagttcccaatctctgttgagatcaacccacatctggatgatgtagatgaaatggtggctatgggctctgagattgctgccatgtgcgacaactttgtcatcaagatcccttgtacacagtccggtatcacggccgcaagaattctggagaaaaagggtgtcagaaccaatgtgaccttagttttctcagcatcacaggctatcgttcctgcaaagaatggttcccttttcgtttctccattcatcggatggaaggaaaacagtggtgaagactgcaaggaatatatccaggatatcgttgatatttacaagaattatggattctatggcaagacccagatcatctgtgcagccgttcgtaacggtaagcagtttgttgactgcgcaagagcaggtgctgatatcgtgaccgcaggattgcaggtatataaggacagcatgtatcatccatttacagattacggcatggcaaaattccagggcgcatgggataagacagtcacagagtaaatttgcaggaaaatcaggaggttaggtaatgaagatcggatttatcggactcggcatcatgggcgagtccatgtgtgaaaatattgtaaagaagcatgacgacaaggtatatgtttttgactttgtcgaagcaaaggtaaagcagttggaggcagtgggagccgtagcatgcagcagttccaaggaagtagcggaacatgcagatgtcatcatttccatggtgccaaagtcagaacattccagaagtgtctacaatgaagtccttccggtactggatgctacaaagacctgtatcgatatgtcaacgatcgatccgtctgtttctgttgagatctcagagatggtcaaggcaacaggcgcacagtttatcgatgccccggttgttaagagtaaacctgcagctattgcaggtaaactcggtatctatgtcggtggtgacgaggctacttttgaggctatgaggccaatcctttcttatatgggagaaaatgtgatccgtatgggagacaacggcaaggggctggtcatgaagatctgtcacaacgctttggtttcacagatccagaacggtgtcaacgagacatctactttggcagcagccaacggcatcgatatcatgacttttgcacaggcaatctcctatggtggaggtcagaacttctacctggattctaagaaggagccgatctcaaaagaggattataccacagcattttctatcgaaaatgaatacaaggatgtcaatatctgtatgaaccttgcaaaagaatgtggcgtatccatgccgggcgaggaaaatgcacttcgcgtttatcaggcggctatggatgcaggctatggaaaggaagatttctgcgcaacgatcaaggtcgtaagagagcagtaaagggataaaaagatggagttattggaagcgttaaacgcatgtaatgatgtgaagatctattcggttgaggatgaagagttttcctccttcggacggattatcaagggatatgattttgaagaactggaaacctatatgaatctgacgtcacagatcccggaagatggaaatgtctatgtggcatcggtggaagagatggagagcgggccggtagcagaacagatcgctgcaagtttttacggtggtatgccgatccagattggttattgtaatggcagaaatacgacatacaatggctttgaatatcataaaggcagtgagatcaatatcgcgatcacggattttatgctggtcttaggacataattatgatatctgtcacaatacttatgacgtatcgcaggcgacggttttctttgtaccgaagggaacggcaatcgagatgtaccagaccacgcttcacctgtctcctctgcgcgtgacggacgagggatttaaggatatcgttattttgccgcggggaaccaatacccctttgagccaggtagaaaagcaggcaaagcagcaaaccggggatgaggaagccattcttttgttacagaggaacaaatgggtcattgcgcacccgggtcgtgagcctctgatgaagcagggagcccatggcggtgtgaccggggagaacaaggaattgttctacccaaaggagtaagttatgtccgaaatactgttttacatagtgatctttttggcaaacattatccagggtatcacagggtttgcgggaacgatcctggcaatgcctttttctatccatctggtgggctatttggtcgcaaagccggtattaaatgtgctggggatcatcgccggcatatatgttgtcgtgggtggttataagaatgtaaatatcagagaactaaagcgtgtgacctgctatatgggcattggtatcatcgtcggtattctggtaaaacatttctttaccggacacgaacgtctgctgtatgcggcgctgggcatctttgtcataggtatcggtgcacgaggtctgatcgcttttggcaagtacgcatgggaaaacggctttggtatcatggataaaagtccaagaaagtccaaagggtctaccgaagaacgagagcattacattgaaaagggcatgacggcgagtgccagagccttgcttcttttttccggtgtcgtgcatggtatctttgtctctggcggaccactgatcatcacctatttgtccaatcacaccaaaagcaaggaggaattccgcaggacggtatctgcgatctggatcatcttaaacagcatgatccttgtcagcgacatcatggcaggttactacactatgaacaccatacggatccaggcaatctctgtgccgtttttgtttggcggcatgtttttgggcggtattttgtttaaacggatgagtcagacggtttttaccgtgctgacctatattctgctctgcattgccggaatcagtcttttgtgtaaatgatgttttgcggcttttggttgaccagagcaaatactatgaagaaaaatgtacatagatgatgtgcaaaaaggagttatagaaagatgaaaaaagaatttcagatagcatatgtaccgatcggtgtgccgacctttcatttggaaagtgcacagaaggaatttgataaatcggtggctttgatcaagagtctgacggatgcctgcgtctttccaaaggagatgctcttatccattgaccttttggatgcatttttggaagagtgccaaccggatctcgtgattttacagaacattacctttgccaatgcagcctatgcaagcgaggtattaaagaaactggattgcccgatccttctttggaccctgcgtgagccggtcattgatggcggcagactccgcttgaattcgctgactggtgcctactctgcagcaaatgccattaaggcgttccgtaaggagccgctcaactatatctttggctcaccggaggaggaagaagtcagggcgaaagttggcgcaaccatacgcactgcaaaattaaaatacgatatgcgtcatctgacggtagcagcggtaggacatacaccgcagggctttgggtttggacgcgcgctggatctggaaatgctggaaaactttggagcaagtttagaatccattgaagcaagggaattgatcgacatcgctaagggatacagtgatgaggatgtaaaagactatctggcagatgcaggagagcgtatgtgcggtctggaaaatacaccggagcaaaaccgcaaggattttgccagactctatcgtgcttacaaggaatatgtgacagaccatcatgtaggggcattggcatcccgctgctggccggacttctttaccgcatttgggacaccggtctgcgccgtgcttgccatgttaaatgaccttggcgtggcagcaagttgtgaggcagatacttatggagcactttccatgtatctgggtatgcagctgacacagcaggcaactttctttggcgatccggtttccatggatgaaaaagaaaataccatcactttctggcattgtggaacggcagcctgctctttggcaagagaggataccggggcaaaggtcgatgtacactgcaatcgaaagattggtccaacccttgattttggatgtaagccatgcaaggaagttaccattttccgtatcggtaaggatagtgacggagacttccgattctttattgccggcggggaagccctggacaaaccaaagcagtttaatggtacatctctggtagtaaagacgaacgcagatgcaaagaccattgtctatgaaagtgttgaggctggatgggagccgcattttgtggttgcctatggaaatgtagcggcagaacttgaaattttggcaggaatgcttaatatggaagtacagagatattaaaagcgtcacaggcgatcgtgtctggcgcaatcgtgtgtcatgctagattttatttaaggagaaaggcgggattatgattcgacataccggtgcaaatatggaaacggtacgcaaaagaaaccgtgcggcaatcttaaaatttataaacgaccacggcccggcatccagaaaggatttggcagatgcgcttgggctgactccagcggcagtaacgcagatatgtaccgatctttttgcagaaggaattcttgtggagaccggagtcaatgtgaaaagcagtggggcaggacgtaagaaggtgcttctggatattaactatgaagcgtcttatatttgtgctatgacgatcgaaccggaatatacgaccgtggcgatcacggatctgcgcgggcaggttgctgcaaagaaacgctgtaagactaatacttcgatcacaccgcaagcctatttggacaagttgagccagaccgccgagaaactcttgcaggagtgtgggacaggtgactgcaggctggctgcgatcggcgttggtatcacaggtcttgtggacaaggcgaccggaagcagtattaaggcatatggcatctgggatgagccggtgccgatagcaaagattttgggacagcactttacagttcctgtatatgtggaaaataacgtcaatgcctttgcagtggcagaacttttatatggcacaggaaaagagcacgataaccttatggtcatcaaatggggtcccggtgttggctgtgccattatcatcgatcaggagatctatgagggacggcatgccaaagccgcagagttgggacattttatcgttgaaaaaaacgggcaactatgtaaatgcggcagacgcggttgtctggagacaaaggtttcctatgcggcgctttgcaagatcgcgccttttgccgaggatgcctttggtgagactttctgtaaaaatctgggaaatcccgttggcagacagtttgtggatgcgctggatctttttgccagaagtattgtcaattcagcgacgattatggcacccaatcgtatcattctgaccggcaatctctttgaaagcccggaagtgcgcaaagcattgataaaggcttgtgcatcttatgatgcaagtttgggacaggatagaatcatttattctgaattggcgcagaaggaacactatatcggtgcagcagctatctgtaccaagatgttattgttttcctagtttttagtgcgtgcagtgtcattgacattgccggatttgcgataagcactcggcgtgatgccgaaattttgtttgaaacagcggctgagatgtgccggtgtggaaaatccacataaaaaagcaatttcctcaatggagagcgcagtgtcattcagatactgcgcaaccatttttagtcttgtatggagcaaaaggttctgaaatgtattccctgatttttcttttatgattttacagatatactgcttggaaaaatgcgttttttctgccagttcactaagagagagcgtttggtaattacggcgtatctcatcaaggatagtctgatacaatgtatcgctgccactgataggtgttggagattcaattctggtgttggaatcccgcaagagatctatcatgagaagtgaaaagagatttttcatagcagcattgctaaaactttcctgattgatatattcggcaaaaatatcaagtatacggtcgcgatgcatagatgatgcgttcgtatggatggcaagatgtgtggaagaactatcctggttcagagaatttataaaaaatctttccaaccgggcatcgtcctgaaacaaggacttgtagttagaattgagaaaactttttcgcatatcgaggaaaataccgatagactccggggctgccgtagcagcgtaaggggtattgggaggaatcaggtaaaagtcccctggcaaaacatgaacactgacatcttgaatttgcagatgggcatttccttccataagatagagcatactgtaataattgcactggtgcgtggcagacttgggaaaattaaaaagtttgctgacggagatatcaaatccaggcaaaaatgtcaaggaatctgaaataacatcaaaattagagatgtcatttgggtattctaaatgttccatatctttaggaattggaaagtagaagcgtgttaaattgtgattttgaatcacatagttgttgaaataatcaaaatatgtatgatattcgttgtagttgatttcctgtcgggagtaatccacataggaaatttcaagattacttaaattttgcagaatatgataaatctgatctctgttgtttatttccacttttatatacctcttagcacaatctgtttatatcataggaaagcc

SEQ ID NO: 12516 - DNA, 30807 bp, Unknown
  gut microbiota DNA sequence
aatttgcaacaacctatcatttttttgacaggatcaacatattttaggagagatatatggaatgatgttcctgtaattgtataaattatccaaaaaatttcagaaaattacaagaatttaggaatattgttgcagaaaaaatagtcaatatgctatactttatatacaaattacacctgtagtttagggaaggctataaagtgagctgacagacatgaggaaagacgtgaggtgacagactatgattcgcaaagagatgattgccatgcttctggcaggtggacaaggaagcagattaggagtgctgacttctgacgtggcaaaacctgcggtgtcctttggggggaagtaccgcataattgattttccgctgagtaattgtatcaattcggggattgataccgttggtgttttgacccagtaccagccgttggtgctgaattcacatatcggtatcggtattccgtgggatctggatcgtaacaatggtggcgtggcagtgctgccgccatatgagaggagcgatacgagtgaatggtacacaggaacggcaaatgccatttaccagaacctcaaatacatggagcgttacaatccggaatatgttctgatcttatccggcgatcatatttacaagatggattatgaggctatgctggatttccacaagcaaaagaatgcggatgtgacgatcgcagccataccggttcctatggaggaggcaagccgctttggagttgtcttgacggacgaggataagcagatcacagagtttgaggaaaagccggagcatccgagaagcaatctggcatctatgggtatctacatatttagttggccggtcttacgggattctttgatcgccatgaaagatcagtgcaactgtgattttggcaagcacatcattccttattgtcatgagggcggcaagcgactgtttgcatatgaatttaatgattattggaaagatgtcggaacacttggatcttattgggaagccaatatggaattgatcgatctgatcccggagttcaacttatatgaagaatattggaagatctacaccaagcaggacatcatcgagccacagtacattgcaaaggatgcagtggtggaacgctcgatcatcggtgcaggagcgcagatttacggacaggtattcaactgtgtgcttggtgccggcgttaccgtagaagagggagccgtgttaaaggattccatcatcatgaaaaatacctatatcggtaaggacgcctatgtggaaaaggcgatcatcgcagagaactgtacgatcggtgagggcgatgagatcggtgtgggagaagaagccgagagcaagttaaatgcaaagatctatgcctttggactggcgacgatcggggagcattctgtgattccgccgcatgtaaagatcggaaagaatacagccatcaagggtaagacaacaatggacgattatccggacgcagcacttccaagcggcggatacatcattaaggcaggtgaaacatcatgaaagcattaggaattattttagcgggcggcaatagcagcagaatgcagaacctttcagaaaagagagccatttctgcaatgtcggtagcatgcagttatcgctgtattgattttgtactcagtaacatgaccaattccaacattcagacggtggcagtcctgagccagtataatgcccggtctttgaatgagcatctcaattcctctaagtggtggaattttggtagaaaacagggagggcttttcctctttacaccgaccgtcacctcagacaactcttggtggtatcgcggcacggcagatgctatgtggcagaatattgatttcctcaagaaacgccatgagccatatgtagtcatcgccagcggtgattgtgtatccaagatggatttcaatgagatcctggaatatcacatcgcaaagcagtcagacattaccgttgtctgtgcaaaactgccggagtgggaagatccaaagcgtttcggcctggtcaagctggatatggaaggcaggatcatggagtttgacgaaaagcctatggttgcagactccgatatcgtatctaccggtgtttatgtgatccgccgcagaaccctgatcgagttgttagagcagagcaatgaggagggacgttacaatttcgttaccgatgtcttgatccgccagaagggcttgaaaaagatctatggatacatgctggacggttattggagcaatatcgcatctgtggagagttactatcgcaccaatatggactttttgaaaaaggatatccgcgattacttcttccatcaggaaccgcagatctactccaaggcatatgatctgccgccagccaaatacaatgcaggctccaaggtcagcaacagtctgatcgcgagtggctgtatcattaacagtacagtggaggattccgtactgttcaagaaagtctttgtgggcaacaacagtgttatcaagaactccatcattatgaatggagcctatatcggtgacaatgtatatattgagaattgtattgtggagagttcggagaccctgctgagtggcagcaagtatgtcggtgaaggtcagatcaggatcgtttccgaaaagaaaaaacgttacgaagcacaccaggcaaatggggaggggtaagatatgcagattacagatgtacgaattcgtaagattgaaaaagaaggcaagatgaaggctgtggtatccattacgatcgacgaggaatttgtgatccatgatatcaagatcattgagggcgaaaaaggcatgtttatcgccatgccaagccgcaagacagctgagggcgagtacaaagacattgcccatccgatcaagtcctctacgagagaactgatccagaatctgatcttgcaaaagtacaacgaggagttgttacatagcgaagcagtatagaagatccgcataggaatgtatatggggatgaacgcaggtcgagggcagccttgacctgcgtttttgtatttttgtcatcttgcaatttttggcacggtcagctaaattgtatatcagtagaaatcacgttatcaggcaggaaatgaggatgatcgtatgtatgtaatagttggattgggaaatccgggagataaatatgcaagaaccagacataatgtcggctttgatgtcatagacttattggcagaacagaatggtatttctgtgacggaacgaaaacacaaagctctgatcggaaagggcaggatcgcaggacaggcggtcattctggtcaaaccgcagacctttatgaatttaagtggcgagagtgtgggcgatatcctgcatttttacaagttagatccggcacaggatctgatcgtgatctcagatgatgtggcactggatccgggaaccctgcgtatccgcaaaaaaggaagtgcgggcggtcacaacggcttgaagaatatcatcgcccactgtcataccgaggaatttatgcgcgtgcgcatcggtgtaggcaaattgccgccaaacggagatatgatcgcacatgtgctgggtcgttttgcaccggaggacagacgtctggtggaattgtcctatgagcgcgcggcgcaggcgatcgactgtatcttgtcggaagacgtggataaggcgatgagccgctataatggaaaagtggaagtatcatgaaaacatttttaaaaccttttgaggagatgccgcagatcgaggaactgcgggaacatctaaaaaaagataaacgcatctacgaggtatcggggctgatcgacagtctgaaaccgcatctgatctatggcatcggttatgatgtgccgatcaaactgatcgttacctttgacgagatgcgggcaaagcagatctatgagggttatcagttttttgatgaaaacactctgtattatccggcaagagatctgctcttttatcagtcggacattcacagcaacgctcttaccagagagcgtctttctgtcgtacaggcactcattgagcatagaccggtcacggtcgtaacgactatggatgccctgatgaaccgtgtgccgcccctttcctcttatgaacggggcatttttaccattgatctggaagagacggtggatctggatgaaatgcgaaagaaactggtcatgctgggctatgaaaatgtgacccaggtggaacatccgggagagtttgccgtgcgtggagggatcgtggatatctttcctttgacagaagaacatcccatccgtatggagttgtggggcgatgagatcgattcgctccgttattttgatgtcgcaacgcaaaagtccatcgactccgtagaacatgtgacggtctatccggcgatggaacttgtgctgacccaggaggagatcgagaccggtttaaagcgtatggaggtggatgcggaagaactgtatcagaagtatcgcagtcagatgcgcacggaagaagcacaccggatcaagaccggagtggaacaactggcgaccgagaccagagaatggggactggggcttggtctggagacacatctgaattactttgtcagccagacggaaagtctgctttcctattttccgccggagactctggtctttttagatgaactggtgcatctggacgaaaagggaaaggttattgaacaggagttttcggacagtatgaccagccgtctggaaaagggctactgcctgccgggacaactggaaatgctgctgactaccaagagcgtctttgctatgctgcaaaaacatccgggtgtggtcttgtcaactttggatagccgcgagggactgctttccattgcagggcataccggcgtgcgtgcggtctctgtgggcgcctacaacaatcagtttgaacttctggtcaaagacctgaaaagatttaaagaccgcaaataccgtatccttttgctcagcccatcgcggacccgtggtaatcatctggcagaaaacctcatggatcaggatctgaatgcctttttctcggaagactacgaccatgaaatctatccgggtgagattatggtatctgtgggaaatctggcgcggggctatgagttcccggagtcatcttttgtcattttgtcggagcaggacatttttggcagcagggcacgacggaaaaagaagaaaacccgcaaatatgagggggaacagatcgccggtctgtcagatctgacgattggggactatgttgttcatgaaaatcatggcttgggtatctatcagggatttgaaaagatcgaagtggataaggtcgtcaaggattatatcaagatttcttatgccaagggcggcaatctctatattccggcgacccagttggatgctattcaaaaatacggcagccaggatggcaaaaagccaaaattaaatacactgggaacccaggactgggtcaacaccaaaaatcgtgtgcgtgcagcagtcggcgtggttgccaaggaattggtggatctttatgccctgcgcgagcagaatcagggctatgtctatggaccggataccgtctggcagcaggaatttgaggaaactttcccttacgaggagactgacggacagttggaggcgatcgcggcagtcaagcaggacatgatgagcagcaagatcatggaccgcctgatctgtggggacgtcggctatggcaagacggagatcgctatccgtgcagcctttaaggcagtgcaggacggcaagcaggtcgtttatctggtgccgacgaccatcctggcgcagcagcattacaatacctttttaaagcgtatgtcccactatccggtcaatattggactgctttgccgctttgtcggtgcagcagaacagaaaaagacgatcgaaggtctaaagaccggacagatcgatattgtcatcggaacccaccgcctgctctccaaagatgtttcctataaggatctgggacttttgatcattgacgaggaacagcgttttggtgtcaaccacaaagagcagatcaagcagatgaaaaagacggtcgacgtgctctccttatcagcgacaccgataccgcgaaccttgcatatgagcctgatcggcatccgggatatgagtgtcttggaagaggcacctatggagcgccagcccatccagacttttgtttttgaatacaatgaagaaatgatccgggaagccatcgtccgtgaaatggcgcgtggcgggcaggtctactatgtctttaaccgggtaaagcagatcgcggatgttgcggcaaagatcgaagaactggtgccggaagccaatgtggcatatgcgcatggcaagatgacggagagccgtctggaaaagatcatgtatggctttatcaatcaggagatcgatgttctggtatcaacgactatcatagagatcgggttggatatttccaatgtcaatactattatcatccatgatgcagaccagttgggactgtcccagttgtatcagctgcgcggtcgtgtgggaagaagtaatcgcagtgcctatgcatttttgatgtataaaagggacaaaatgttaaaagaagtggcagagaaacgtctggctgccatcaaggaatttacggatctgggaagcggcttcaagatcgctatgcgggatctggagatccgcggggcaggcaaccttctgggacaggaacagcacggacacatggcggcggtcggctatgacctctactgtaagatgctgggcgaggctgtgaaaaaagaaaaaggcggcatggtggaggagcactttgacacgacgatcgatctggatatcgatgcctatctgccggagacttatgttgccagtgaggaacagcgcctggatctttataagaggatcgcactcatcgattccgaggaaggacgcgatgagatgttagatgagttgatcgaccgtttcggagaaccatcccggtctgtgcaaaaccttttgtttattgccatgctccgtatggaggctcacaaggcatttgtcacagacattgtacaaagaccggaggagatcgtttttaccctctttgaacgcgcggcgatcgatgccagcgggatcccggcagtcattgagaagaataaaccttatgtgacctttacggcggatgccaaacatccggctttccattatttttacaagaaaaattcaaggatcaagccaaaggatctgccggatctggtcatgacatttgtaaaagaattgcagggcttggcattaaatcaaaaatcggagaattaggcgacacaaaatattcaaaggtttagaggttgccccttacctgcaaaatggctataatagcaaggtaagccgaaaacaaggagataaagtcagtatgaaaaaaagaaatattcttgttgctgcaatgacgttgacgcttgcgggagcgaccctgctttccggatgcggtctgaatgcagatgcaacacttgtaaatatcaataaaggagaggacagcatatcactgggttacggcaatttcgttgccagatatacacagtccttgtatgatgccacatatttacagtatatgggtacggatatgtggacaaaggaagatgatggcacgacgcttgaggataacgtcaagaaaaatgtcatgaagtccatgaaggaagattacctcttggaacagcatgcctctgattatgatgtgaccctttccgatgatgagaaaaagtccatcaaaaaggcagctaaggcatttatcaagaacaattcggaagatacactggacgctatgacggcgaccgaggagatcgtagaaaagtatctgactaatcagacgatcgcatccaaggtatccgaagccatcaaggagtcggcagatgtgacagtgaccgaggaggaggctgcacagcgcacgatcacttatgcttatttcggatccgtgacttataaagattcctctggcaatactggatattataccgacgaccagaaaaaggaattaaaggcaaaggcagaagcccttacgacttcaaccgatctggagacagacggtgaggcagcgggcgcgaccatcaagacagcatcctacggaaaggatgacacttctttggatgaagccgtgatcgcagccgcagatgctctttccgagggacagatctcatctgttgtagatgtaggaaacgatggttactatgtcatccgcttagatagcgcgtatgatgaagaagcaacccaaaaagcgatgacaacgcttgaggagaaaaagcgcagtgactatttagagtctgtcttgaagggctggaaaaaggaaattacctggacgaccgataagaagcaatggaagaaagtacagttcgatactttctttgaaaaggtaacggcagcagacacaacggcagaataatgacaggcaaaagcaaggcgcagtccttgcttttgctttttttgaagtaagggatagaaaatgaagttcttgggaaaatatttaaaagattataaaaaagaaagtatatttgcaccgctctttaagatgctggaggcaatttttgaactcctggttccgctggtaatggcatccattatcgacgtgggaatcgcaaaccgggatagggactatgtgatccatatgtgcctgcttttgatcttgtttgccatcttgggtctggcatttgccatcacggcacagtattttgcggcaaaagcagccatctacacggcttctaagatgcgtgcagatctttttcaccgcatcatggatatgtcagcggcaagccatggcagtgtgggaacatcggcacttacaacacgtatcacatcggatatcaaccagatacagagtggtatcaatatgttcctgcgtcttttcctgcgctctccgtttatcgtgtttggtgcgatgatcatggcactgatcgttgatgtcaagtcgaccctgatctttgtgatcgtgatcgccctcttagggctggtcgtctatggtatcaccaagtcgaccctgccgatctttagccggatccaaaagaagatggaacgcgtctttttggcagtcggtgaaaacttagagggagcccgtgtgatccgtgcctttggtaatcaggatcagcagaagcaggcatttgggacgcagacagaagacctgtatgccgaccagatgcgtgccggcaaggtttctgcacttctgaacccgatcacctatgtgatcgtcaatcttggtgttgtggcagtcatctggtttggctctacccaggtcgatatggggatccttgccaagggacaggtcgtagcacttgtcaactacatgtcacagattttggtagaactgatcaaactggcaaacctgatcgtggtacttatgcgtgcctacgcttcggttaccagagtggagcagatcatggaaatgccatatgatgagcggacttatgtgacagagacacaaaaggcatcagaggcggatgcagtatcttatgagcaggtatcctttgcttatccacaggcaggcgagatggcgatccgggatattgattttaaggtgccggatcatggaaccgttggtatcatcggcggcaccggctccggtaagtctaccgttttgcacctgctcaaccatatgtatgatgccagcaagggaaaagtattgatctacggcatggatgtacgcagttacaaggaaaaagaactgacaaagatcgtaggtctggtaccgcagcgcggtgtgcttttccatggaagcatccgggacaatatccgtttcggacgggaggatattacagatgatatgatcgcgacagccgtccatgcagcccaggcagacaacgtcatcgaaagcaaagagcatggtctggatgaggagatcctacaggatgccagaaatctttccggcggacagagacagagactgacgattgccagagccctggcgggacagccgaagatcctggtcctggacgattcggcttctgcactggatgtggcaacggacgcagcactgcgcaaggcgatccgcgggctgccttggcatccgacgacctttatcgtatcgcagcgtgcttcctctgtgatggaagcggatcagatcttagtcatggaagatggctgtatcgtaggcaagggcaaacacgaagacctgctgcgggacaatgccatttatcaggaaatatactattcacagtttccaaaagacgaaaaagagcaaaactcgtaagaggaagggtcagcaatcatgagtacaaaaaatgaaatcaaacaatctcaagtaatcaaacgtgttctggtggaattaaagacctaccgtttacagatcgttctcagcctgatctgtgcggtactgacagtcatcttcaccctgctggttccggtacttacgggaaaggcggtcgattgtatgatcggcagcgggcagatccaatgggatggactgtatcagattttagaaaagatggcactggcgatcgtgggtacttgctttttccagtggcttatgaaccgtatcaataattacattacctatgacattacaaaaaacatgcggcaaaaggctttcgagaagatgttagtcatgccgatcaaaaatattgattcccattcccatggtgattatatgagtcgtatcgctacggatgcggatgtcttttccgatggtcttttgatgggatttacccagttgtttaccggtgtactgaccattctgggcacgatcttttttatggtgcgtgtcagcctgccgatcgcattggtagttattgccctgactccggtatcccttctggtggcaaagtttgtcgcaagcaggacttatgctatgttccagttgcaggcgaagcaccgcggcgaacagactgcatatgcagatgaaatgatcgaaaaccagtcggttgtatctgctttttcttataatgagaaggcaaaagaggaatttgatgtcttgaatgaccgcctggcagacagttccttcaaggcgactttttattcttccatcaccaacccgacaacacgttttgtcaacagtctgatctacagtggtgtgggtgtcgcaggtgccattcttgcgatcttcggcggcatcacggtcggtggactgaccagtttcttaggctatgcaagccagtatgccaagcctttcaatgaaatctccggcgttgtcacggaattacagaacgccattgcctgcgcagcgcgtatttttgagatcattgatgcaccggcagtggaggagagccgggaaaatcatctgtcggatgtggaaggaaagatcgtatttgaggatgtggcgttttcctatgatccgagcaaaccgctcattgagcacttaaatctgaccgtagagccgggacagcgtattgccattgtcggaccgaccggaagcggtaagacgacgcttatcaacctgcttatgcgcttctatgatacgacacatggcaagatcaccattgatggtgtcgatatccggtctatcccgcgtgccaacctgcgtgaaaaattcggcatggttttacaggagacctggctgaaagagggcactatccgggaaaaccttttgtttgccaacccggatgcgacagaagaagagatggtgcaggcagccagaacttcccatgcgcatgaatttatcaaacgtttgccaaatgggtatgatacttatatcaagggcgatgacggcagtctttcgcagggagaaaagcaacttctttgtattgcccgcctgatgctggcattgccgcctatgctgatcttggatgaggcgacatcttccattgatacgcgtacggagatgaagatacaggaggctttccagaccatgatggaaggcagaacaacctttgtcgtagcacacagactttccacgatccgcgaagcagatgtgatcctctatatgcaggacggtaaggtcttagaacagggaaatcatcaggaattgttggagaagaacggatattatgcgaaattgtatcgcagtcagtttgtatgtggcaaatagattgactttttcaagtgacgcaagatttactggtgcatatgatgtagtatgtgctataatgtcttttatcaatgggtaaatataggcgagagcctttggaataaatgagtaacgaggtgttatatggaacaattcgtaattaaggggggaaatccgatcgtaggggaagtagagatcggtggtgccaagaatgcagcgctcgcaattcttgcagcgtccattatgacggatgagacagtgaccatagataatctgccggatgtgcgggatatcaacatcatgctggatgctttgagcgatatcggcgcagtggtagagcgcgtagaccggcacacagcgcgcatcaacggatcaaccatcggacagttgaacgtagattatgaatacatcaaaaagatccgtgcttcctattatcttctgggagccttacttggaaaatacaaaagagcagaagtagcattgccgggtggttgcgtgatcggcagccgaccgatcgacctgcatgtcaaaggattcaaggcactgggcgctgatgtggacatcagttatggcttgatctctgcaaaggcagaccatctggtaggcagccatatctacatggataaggtatctgtcggtgctacgatcaatgtacttatggcagcggcacttgccgagggcaagaccgtgatcgaaaatgccgctaaggagccgcatgtcgtagatgttgccaacttcttaaacagcatgggtgccaatatacgtggtgcaggtacggatgtgatccgtatcgtaggtgtggaaaagttacacaagacatcttattctgtcattccggatcagatcgaggcgggaacctttatgtgcgcggcagcagcgaccaagggtgatgtcctgatcaaaaatgttattccaaagcatttggaagctacatctgccaagttgatcgaggcaggctgtatgatcgaggaatttgatgatgctgttcgtattgttgccaacaagggcttgacccatacccagatcacgacgcttccgtatccgggatttccgacagatatgcagccgcagatgacggttgtgcttggtatggcggatggtacgtctaccgttaccgagagcatttttgagaaccgcttcaagtacgtggatgaactttcccgcatgggagcagatatcaaggtggagagcaatattgccattatccgtggcattaaggaatacacaggtgcgcgcgtgagtgcaccggatctgcgtgcaggtgcagcccttgtgatcgccgggcttgcagcagatggcattaccatcgtggaagatattcatttcatccagcgcggttatgaggatttcgagatcaagttgcgcagtctgggcgcacagatcgaacggacaaattgcgaaaaagagatccagaagtttatgcttcgggtttcctagatcaaaagataaaaagacggctatctttgtcatgtatgtgataaagatagccgtttttgattttataagaaatgttaaaggatcgccttgatgaacagatccttgttggcagactgggataagtcaatcaagccatgctcgacagtgtcgacgatcggacgggataaggtatttttgttgagatacacgatctgtccggcggtgccgtcacttaaaaggacacggctgttgttgtagcaggctgccacacgctgcaaaaaggtaaagatgacttttgggttgtacttctggaaaccgtcatcttcaaaagcggcaatgacctgaaaagcacatttgggagcacggtaagagcgtgctgccgtcatggcatcatatacatcagcgatggcaacgatggaagcaaaagtatcgatttcatcggattccagaccgcgtggataaccggatccgtcataacgttcgtgatgttgtaaggctgccaacttgatacgaagatccaggtcggtgtcctttaagatcttgtgtcccagtttggcatgggaacggatgatgtcaaattcctcatcggtcagtttgccctgtttatttaagatctcaggagggatctgggtcttgccgatatcatgtaaaagccctgccaaggtcagggtgttcaaatcttccttggagaactgcatccatttaccgatggctctggagatcaaagcgacattcaaagaatgggcgtagacggaatcatcgacagaacgcatggtatgtatcatgtcaaaaagttccaaggaagtcttggaagcaaataaggatgctgcctcggacagaagatggtcacatgcaccgtcaacctgtcctgcaatgatgagatcaaaatcctctttcagagagatcatattgcgtgtataagaggtctgaaatgcctgaaactgcggcgtagactgtatgcgctgtctatgcgacgttgtctcgagcggatggacctgcgggtgcggagtctctgtcttttgctctgtgaccggttttgcgaccggcttttgggcaggagcctccggctttggctcggcaacttccagtgtgactgcctgttcgcggatctcctgtgggatcgaattttcatcgatcataacggtctggatccggtaaaaggataacttggcgattaactgtgatgtcagactggccccggcagatgcgatggtctgtcctctttttgtaacgatcggcttggcaacgaccatgccggcttgtaatcggtttacgcttacttttatcatattatgttcttcccccaaaggtgtgtaattgcttcgtaaatgaaagaaaattatacacacagagatattatatatgtaatatctcttatctggcaatagttttctgacgatttgcgtcgaaagccaaagaaaaatgccaaaatgggcaaatatatacagattgcggggtaagactaggagacgactacaaaatgcaggaattgtatagggggatttcttgacaaatacccatatggggtgtaaagtcatcactgatgaaagtcacagatttgaaaattccatatcgtattttctcttattcagagtggcggagatacataggatcgatgaaaccacggcaaccccggaagatggaaggtgcctacctgagcgagtaactcgaacaataagggatttgattatcttagacaattaaatccgcttatggcggatttttttaatgctttttttgaggtgttaaaaaggaaccaaagggtaatacagaaaggaagaagaaaatggaaaaattattatttacttcagagtctgttacagaaggacatccggacaaggtctgtgatgctgtatcagatgcaatcttagatgcttgtatggaacaggatccgatgagccgtgttgcctgcgagacagcagcatgtaccggatttgtacttgtaacaggcgagataaccacaaaggcacaacttgatattcctgcaatcgttcgtaagacggttcttgatatcggttatgatgatggtaagaagggtatcgatggcaattcctgtgctgttatggttgcattagaccagcagtcagcagatattgctatgggtgttgataaggctttagaggcaaagaagggttctttgacagatgatctggataccggtgccggagatcagggtatgatgtttggttatgctaccaacgagacagaagattacatgccttatccgatttctttggctcataagttggcacttcaacttactaaggtacgtaaagatggtacactttcttacttaagaccggacggaaagacacaggtttctgtagaatatgatgaggctggtaagccaaagagacttgaggctgttgttctttctacacagcatgacgaagatgtaacacaagaacagatccatgaagacatcaagaaatatgtctttgacccgatcctgccggctgaactggtagatgatgagacaaagttctttatcaacccgaccgggcgtttcgttatcggtggaccacacggtgatgcaggtcttaccggacgtaagatcatcgtagatacctacggtggaatggctcgtcacggcggcggtgctttctccgggaaggactgcacaaaggttgaccgttccgcagcatatgcagcacgttatgttgctaagaacatcgttgcagcaggtttggctgacaggtgcgagatccagttgtcttatgcgatcggtgttgcacagcctacatctatcatggtagatactttcggtacaggcaagttatctgatgagaagttagttgagatcgttcgtaatcatttcgatcttcgtccggctggtatcatcaagatgctggatctgagaagaccgatctacaagcagacagcagcatatggtcactttggacgtaatgatctgaaccttccttgggaagctttggacaaagttgaagatttgaaaaaatatctttaagattctaaaaaaagtataaaactttgatggaatgctttttttgaggggatgaagtgatataatgaagtcgtgggatgaatgagacatcccacgacttttttctatataaaggatggaatggtttatgaagttacggacgcgacttgtcatatccttttgcattatcatatttgtaccgattatcatggcagccatagggctatatgccatcaatacgatcttgccaacgctgaacatccaatggtccagtaccagttatgagtatatcgcccatttgccggattttaagaatctggtggtcgatgttatgatctctgtgatcctgatcctcttttttacagcggcgatcttagtgatctggacatacagcggtatcatttcccgtctgcgccaactcaataaggcggcagagaatatccgggacggcaatctggatttttccattgataccaagggacatgatgagatcagtgaactcagtgagagttttgaggccatgcgcaagcgcttgcagatgaatgcgcaggagaaactggatgcggagcaggaacaccgtatgctgatctccaatatcgcccatgacctaaagacgccgatcacggcgatcaagggttattcggaggggatcttagatggggtggcggacacaccggagaagcaggaacgctatctaaagaccatctacaacaaggcaaatgagatgaacaccctcatcaatgaactgaccttatacagcaatatcgataccaataagatcccatacaatttccacaaactaaacgtcaaggactacttcaccgactgtatggaagagttggaaatggatctggaaaatcagcacatgcagctgactttctttaattatgtagatgaagataccctgatgatcgctgacccggagcagcttggcagggtcatccacaatatcatcggcaatgccatcaagtatatgcgggcagaggagccgtcctttatcagtatgcggatcaaggatgtgggcgactttatccaggtcgagatcgaggacaacggcaagggtatttccaacaaagacctgccatatatttttgaccgcttttaccgggcagatgcttcgcgcaattctgcggcaggcggaagcggtatcggactttccattgtcaaaaagatcattgaggatcatggtggaaaaatctgggcaaccagcaaagagaatgtaggtacagtcatgtactttgttttacgaaaatatcaggaggtaccaaatgagtagagtacttattatcgaggatgaactagcgatcgcggaactggaaaaggactatctggagttatcggattttgaggtcgtgatcgaggagaatggcgtcaagggatgcgagcgtgccctagcagaagattttgatatctttgtgctggatctcatgctgccggatatggatggctttgagatctgccgcaggatccgtcaggtcaagaatacgccgatccttatggtttctgccaagaaagaggatatcgacaagatccgtggattgggactgggcgcggatgactatatcaccaagccgttttcaccgagcgaattagttgcaagggtaaaggctcatctggcacgctatgaccgtctggtgggcagcaatcagcagacccagggcgataccttccagatccgtgatatcaagatcgacaagtcggcaagacgtgtatggatccggggcgaggaaacacagtttacgaccaaggagttcgaacttctggcatttctggcagagcatccaaatcatgtctttagcaagcaggaattgttcaaggagatctgggatatggattcggtcggagacatcgcgacggtcaccgttcatatcaagaagatccgtgaaaagatagaattgaataccaataaaccacaatacatcgagacgatctggggcgtgggatatcggttcaaggtataaagaaagcgcagccgcctatgggggcatagcggcttggcgcggaaggagaaagtatggagttagaggtattatttgaggatgaggatgtgctggtctgctataagccggcaggggtcgcaacgcagaccgccaagatgacagagccggatatggtcagcatgatccgcaattatcgtgtggcaaagggcgagagcgactatgtaggggtgatccaccgtctggatcagccggtcgagggagtattggcctttgcaaaaaatgcggcggcggcagccattcttggcaaagaattaaaggcaaggcagtttgccaaatattattacgccatcgtgaccagagagaatataccggagacaggcgttttggaagattatgttgtaaaagatgggagaaagaaccgtgccatggtggttacggaaagtaacccaagggcaaagaaagcgcgcctttcctatgaagtggtcaagcgtctggatgatcgcagcctcttggatatccatctggataccggtcgtttccaccagatccgcgtacaactggcaagccgtacggcaccgatcttaggcgatgtcaaatacggtggcagccgtaccggagaaccgctttgtctctgctcctaccgcctgcagtttacgcatccggtcagcgaggagggcatggatttttccatcaagcctcgtggcagagagttcggtgacttctttgcataaaaaggaagaatttgctacatactgatcctatggagcagaattatcattttatcagaaatacaattaaactactgggaatcaccctcttggtatatgcctttatgaagtggctgctgccgatggtgcttcccttttttgtagccttttatctggcgggcgcttttcggcggtcggcatgcaggaaaaaagagcataagactcttctgatcctgcgcaatctcttgatcgtgggcggtgtctgcctgctgctctggtatctggtaaaggaatttatggatctgtgggggcggcgggaagaactcttgtattgggagggggcaaaggagtccggtctgttcggggaagcctacgaaaaactcatggcaaaatttaacacagaacagatgcttgaccattttgtagacaacgtggcgtcacctttcggcggcatgcaggataccttgggcggcatggtggctctggcggtgaccttggtggcgaccatccttatgaccaaggattatgcccttttacaggagcagattaaaaagaataccttcgggcaggtggttgtgtctctggcaaaagatctgtccgtggtaggcggcgattatctgcgcgcccaggggatcatcatgctgatcatcacggcgatctgtattgttgccctgctcttgacgggcaacccctatgcggttttggtgggcgtttttatcggtttttgtgatgccctgccttttatcggaacatcactgatctttttgccctgggcggtcgtcatgttcctgcaaaagaagatcgggcttggcatctattatctttttttggcagggggcaccagcctgctccgtcagtatctggaaccaaaactcatcggcaggagcgtcggtgctgatcctctcattgttctggcatgtatttatctgggactggagatctatgggatctggggtgtgatcttaggaccggcaagtgcatttttgatctgggagatctaccgttttacctaaaaaataaggcaaagtccgctgatgtcaagccttgacaagacttgtggatttttttagaataaatggtattgatgaaagatgaaggaggccatgatggcaaaggataaaaaattagtagaagccattacatctatggatgttgacttcgcacagtggtatacggatgttgtaaaaaaagcagaattgatgggctattccagtgtcaagggatgtatgatcttcaaacctgccggttatgcgatctgggagaatatccagcatgaactggatcgtagatttaaggagacgggtgtagagaatgtctacatgccaatgttcatcccggagagtctgttagagagagaaaaggatcatgtcgagggatttgcaccggaagttgcatgggtcacctatggaggactcaatccattacaggaaagactttgtgtcagaccgacctcagagactttgttctgcgatttctataaggatgagatccagtcatacagagacctgccaaaggtatataaccagtggtgctctgttgtccgttgggaaaaggagaccagacctttccttcgttccagagagttcttgtggcaggaaggtcacacagcacatgcaacagcagaggaggctgaggagcgtacacagcagatgctgaacctctatgcagacttctgtgaagaagttctggctatgccggtcatccgcggacgtaagacagacaaggaaaagttcgcaggtgcagaggcaacttatacgatcgaggcactcatgcatgacggcaaggctttacagtccggtaccagccacaactttggggatggttttgccaaggcatttgagatccaatataccgataaggacaaccagttaaagtatgtacatcagacttcctggggtatgaccacccgtctgatcggtgctatcatcatggtacatggggatgattccggtctggtactgccaccaaggatcgctccggttcaggtggatgtcattccaatcatgcagaataaagaaggcgtgctggataaggcacacgaagtattggagaccttgcgtgcagcaggactccgtgccaagttagatgatacggacaagtctccgggatggaagttctctgagcaggagatgcgcggtattccggtaagagtagagatgggacctcgtgatatcgaggcaaatcaggcgatccttgttcgtcgtgataccagagaaaagatcacggtatctctggatacattggcagaaaagatcacagagatcttggataccatgcaaacagagatgttagagcgtgcaagagcacacagagatgcgcatacctacgacgcacacaactacgaggagttcaaggacatcgtagccaacaagccgggatttatccgcggaatgtggtgtggtgagcaggcttgtgaagacaagatcaaagaagagacaacagcgaccagcagatgtatgccatttacacaggaaaagatttcagatgtctgtgtatgttgtggaaaaccggctaagaagttagtttattggggcaaagcatattaatgaagatcgtattaccacaggacgtaatcacaattatagatcgtttggaaagttgcggacacgaagcctacgcggtaggtggctgtgtccgcgacagcattttagggaaagaaccggcggattgggatatcacgacctcggcatccccccaggaagtcaaggacttgttttctcataccatcgataccggtattgcacacgggactgtgacgatcatgtgtggaaagaccggctatgaggtgacgacctatcgcattgacggcgaatacaaggacggcagacacccagagagtgtcgcctttaccaatctcttatccgaagatctcaagcggcgcgattttaccatcaatgccatggcttacaatgacagtcagggcttggtagatctctttgacggcgtgggcgatctgaaacgtggtcttatacgctgtgtgggatgtgcgagtgagcgattttctgaggatgccctgcggatgctccgtgccgtgcgttttgcagcacagttgggatttacgatcgagcgacagacctacgaagcgatctgcactctggcatcgaccattgccaaggtgagtacagagcgcattatggtagaactggtcaaactattaacatcagaccacccggaggagatgcgggctgtctatgagagtggactcagccgcgtatttctgccggagtttgatgcaatgatgcagacaccccagcataccatccaccatcagtattcggtgggagaacataccatacatgccatcatgggggttccgccagaccgtatcttacgactgaccatgctttttcatgatatcggaaagccccagtgccgtacgaccgatgcggatggcatcgatcatttccacggacacccggaagtgggggcggagatgacagggcagattttgcaccgactcaagtttgataatgatacgatccgcgcggtcaagcgcctggtccgttttcatgatctgcgtccggcgctgaccaaaaagagcatccggcgcagtatggtaaagatggggctggaatgtttcccacagatttttacggtcaagcgtgcagacgctctggcgcagagtacctatatgcgggcggaaaaattagaggcgatcgaccgttttgaagaactctacgaggagatcttagcagaccatgcctgcatacagaaaaaggatctagctatcaacggcaaggaacttttggcattgggtctgccccagggaaaacagatcggtcaggtcctggataaactctttgccaaggtggtcgaagacccggcatgtaataccaaagagatcctgcttgcagaggcaagaaaagagttggaacagcagggatagataggtataatctgaaggattccttcataagatgaacagatatcgaagcatcatgttcgtcttatggaggatttttttatgtgtgaaaatatagagaaaacacaggttgttattccgcgtctgggacagggagaaaatttgctgggagcctatgctctggaagttacgggcgtgacaaaaggaagggggagtctttttatacatacggcaggggcggtctatatgttaaagtcttttaccggatccatggaaaaagcacaaggactggcgcaggtgctggcagaactaaaggcctgggatcctgcggtggagcagatcctgccgacacaggagggggcatatgcggtccgggaagaaggcggaccgacctatgttttaaagtcttaccagcccgggcgggagtgtgacgtcaaaaatgcctttgaggtcttggagggggcaagaaaactggcagatctgcacttgcagttggaaacgatagagacagacaaaaaggaggtcttttttgcgccgcagcatctgctggcggaggaagtcagacggcataaccgggaacttaagaacctgcggaattatatccgcaagaagaaaaagaagacgggatttgaagacttgtacgagcaggcatacgggactttttacggacagggggagcaagtggaagaagagatactttccctaaaggaagaattacagttatgccatggcgattatcaccatcacaatgtcttggattgcagcggaacttcgcacatacagcattttgagagcatgcgcatggacagcgccatgagcgatctggcaaaatatacgagaaaagccctggaaaagaaccgctggaacgcggaactgggcaggcagatgctcatgacctaccagagagtccgccctttccgcacgggggaattgcagcaactctatctgcgccttttgtatccggaaaaattctggaagatcgccaatcattacaataacaacaaaaagacatggtcgtccaagcgtgacggtgacaaattgcggcagatcctggcgcaggagaaggcacgtcaggaatttctggtcttattgtataatctggcggaatagtttataatcgacctatgaaaaacataagaaaaacaagcggtattctgctgtgtctgcttgcttgtcttggcgctctgagtgcctgtgggaaagaggaatcgaacgaaccttttacctatcgtgcgcctgccgcaaagcaagaggaggagaaggcagacacggaagaagatacgcaggattttgttattgaacaaatggatatggtgggagagacgatgaccctgtatgcgccggagtctgaacgtcaggtgcgctatgcttatacgctgggaacccgttttatggataagtatggggattcttatagttcgatccattttacaccaggacaggttgtacaactcggggacattacggcggcatctgccctgagcagcgtgaagatgtctgatcaggtctggaatcagacagatgtcaccaattacaagatcgacatggaaaaagggatctttacgatcgggcagacccagtaccggatcacttccaatactatggctttttctcaggatgcaagcattagtttggatatgatcgggacggatgacaccttgcaggttatcggcaaggacaaagaggtctggtccgtcattgtgacgactgggcatgggtatatccaattgcagaattcttccatctttgtggatagtatgatctgtatcggcaaccggatctttactaagatcactggggatatgcttctggaggtgccggaaggaacctatgccatcacggttgccaacaagggctatggcggaaccgggacatataccgtggcacgcggagagacaacgttagttgatcttgatcagttaaaaggcagtggaccaaaagtatgtcagttgacggttacatctgaagtggcaggtgcatcggtctacattgacggacagcagatcacggtcggacaggcagtgccggttacctatggatctcataccctaaaggttgtggcagagggatatgatgactggcaaaagacactgatcgtcaattccgaaagtgcgacgatctcactggatctggcagaaagtgagagcgcgacaggggataagcagagtgaagaagataaatcaacatcttccgataccggtaagagcagcggttcatcaaacagcagtaccaatagtaacaagtctaccggatcgaccagcaagagttcatcaagtaggagcagttcgtccaagacttcggacagcagttcttccagtcttacggatacggactacctgacgaccatttcaaagatgttatctacattgcttgacgaaaattagtctggcaattatcataaaaacagaacacatataaggaggatactatgggttacaaagagcagtatatgcagtggctggaaagcgactacatggatgaggctacaaaggaagaactgcgtcagatcgcaggagatgagaaggagatcgaggagagattctacacggaattggaatttggcaccgcgggtctccgtggtattatcggtgcaggctgtaatcgtatgaatgaatataccgtgcgcaaggcaacacaggggcttgccaactacatcttaaaggtcggcggtcaggatcgcggcgtagcgatcgcctacgattccagacatatgtcaccggaattcgcagatgtagcagcactttgcttagcagcaaacggcattaaggcatatgtgtttgaatcccttcgtccaacaccggaattatcttatgctgtacgtaaattacatacaattgctggtattaatattactgcaagtcataatccaccagagtacaatggctacaaagtatattgggaagatggtgcgcagatcacaccgccacatgacagcggcatcatgaacgaggttaaggcgatctcagactacgctgtatgcaagaagatggacaaggatgcagccattgcagcaggtctgtatcagacgatcggtgcggatatcgacgatccttatatcgaagagttaaagaaattagtcgtacatcaggatgccattgatgcagtgggatctcagatcaaggtcgtttacacaccactgcatggtaccggaaacatcccggtgcgacgtgtcttaaaagaacttggctttaccaatgtctatgtggtaccggagcaggaattgccggatggagatttccctaccgtttcctatccgaacccggaggcaaaggaagccttcactttgggactggcactggcaaagaaagtggatgctgatcttgttcttgcgacagacccggatgctgaccgacttggcgtatatgtcaaggatgccaagaccggcgagtatcatcctctgaccggtaatatgtcaggctgtctgatcggcgattatctgatcggacaaaagaaagagttacagggcctgccggaagatggtgtctttgtgcgttcaatcgtctctaccaacatggcagatgcgatcgcagactactacggcatcgaattggttgaagttttgaccggatttaagttcatcggtcagaagatcttagaaatggaaaagacaggcaagggaacttacctctttggtatggaagaaagttacggctgtctgacaggcacctatgcaagagataaggatgcggttgtggcttctatggctctttgtgaggctgccgcatattacaagaccaagaatatgaccctctgggatgctatgatcgctatgtatgagcgttatggttattatcaggatggcattacagccattaccttaaagggcatcgagggcttggaaaagatcggacagatcatgaatactctgcgtgcagaggcaccaaaggagatcggtgcttatcaggtgacagccgtccgcgattataagaacgatacgatcactgatattgctaccggtgccgtacgcccgaccggacttccaagttccaatgtgctttattatgaactgacggatgatgcatgggtatgcgtccgtccttccggtacagagccaaaggttaaattctattttggtatcaagggaagttccctggcggatgcagatgctaaggcagaggctatgaaagcggctgtcaatgccttggtagaaaagatgttgtagtattcttacacaaagattatttattattttgtataatatggcaaaacgtcgggaaaccttgaaaatataagggctttgccttgacaaaaataggtaaaacctttataaatatttttgtagttattttggaggcagacctctgacataatattttattttatattccataggaggaagttaatatgaacaaaacagaattagttgcagctatggctagcaaggcagatctttcaaaaaaggatgcagaagcagcattaaaggcatttacagatgttgttgcagaagaactcaagaagggtgagaagatccagttagttggattcggtacttttgaagtatctgagagagctgctagaacaggaagaaatcctcagactggcgctgagatgaagatcccggcttctaaggctcctaagttcaaggctggtaaggctttaaaggatatgatgaactaattcatattgttttatgaacatctggctcaaaacttcggttttgagccttttttgtataagcaggaaggaagtaaggacaatgcgcttagataagtttttgaaggtgtcccgtctgatcaaacgccgcactgtggcaaacgaggcgtgtgatgcagggcgtgtcatggtcaatggcaaagaggcaaaggcttcggtcaaggtcaaggtaggagacatcattgagatcgcctttggcaacaagccggtcaaggtcgaggtgctggcactcttagatacgaccaaaaaggaagaggcaaaggacatgttccgttacctataggaattgctgtcataaagttggatttctgacataggatagagatataagaatgtatcaggaggagatcctatggaagaaaaacaggtcatgaccaaccacaaattgttgatgacgaaccggaaagggatcagccttaccgggattttagatgtgatctcctttgatctgcgggagatcttattggaaacctcggaggggatgcttaccatcaagggcaatgatctccatatcaaccgcctgtctgtggaaaaaggcgatctggaagtagaaggcagggtagacgccttgctctattccgaagttgtctccgctaaggcgatgggcgagagttttttaggacggatgtttaaataatgcatttgtattcttttgtgacggaacagggacatatcctctgggtcatgtttcttctgggcataggtctgggattgggatacgatctgatccgcaccctgcgacgcatcagcaaaattaccaaagagggggcggctctgggcgattttttctattggatcgttgcaggtcttgttatttggcaggtacaaaatgcagaaacggaggggattttacgtttttgtcaattatttataggtgcagccgggatgattttgtattatgctataggtagtaagttggtaagacggatattgtatgtcccacttgctgtcatttgtaaatttttttcaagcctttaccgctatatggggaaaggctgtgatcgtctgtttgcctttctggcaaaatggacagaacaaaaagaaaaaagggacgatatatgagtagaagaccgagaaagaaaaagaaaaataaaaatagcgcaggaaggatctcttttctctgcattggtatattcttagtgctggtgctctccgtgcagatggtgcgcctataccagaagaatgaggccttggtgcagacggagcagaccaagcaaaatgaactgagcgagcaagaggacaagcaaaaggaactggaggaacaggaacagtatatccagtcggatgaatacaaagaaaaagttgccaaggataaattgggcttggtttatgataatgagacgatttttcgcgaaaaatagaacataaagatgatagaaaaaagataagcaggacttcctttgacaaataatgcagggaagtccttttataatagcctctgcaagtgaaataggaggcacattatgaaagacaagattgcaagaactttgatttatctgcttctggggctgttggcctgccatattaagatgctgggatgctatccttttgtggcagtcatatttggggcgtgttatctgaacgaggagaacaggcgattgtgtgtgccgttttcctatttgtggatggtactctttttgccgatcgcagccctctttcgctacggcgtgacatttttagtctggatggtggtacttgcgatcttctggcatatgcatatattggtgcgtcgcatggggcagacaagccttttgggcatgatcctggtggcgatcacctatggcggacgcgtgatgacggcgacacagaccatgacctttccttatgggatcctgccagtgctggaggggcttttggtggctggtggagcctattttacctgtcgggggatggatcttttggaggaggtctggcacagtatgcaaaaaaagaccggtacccgtgtccttcccctccaggcaagagaatattccagagccatgagtgggctggcacagagcatggaggcgctggtaagaccgaaagaaggggaagcaggcatgggatttgtcgccatgcagcaggagttgcggggacggatctgcggagattgtggacgctacgagacctgtctggcacaggggagtgccatgtcacttgccatggagcagttgtttgcccaggcagaaaaaggacaaaagatcgatccggtcttacaggagaagatcgggcggcagtgcgagcgggcggaacttttgatccgggaagcactgggaatctttgagcgtaccgagttaaatctggcatggtatcgccgcctgtgtgagcatagggaaatgatcgccggacagatcgatgccatggcatatgtgatggaagactgtatggaggcggacaggctttgcgatgataaagaacgctggcttttggcaaagatccgtttccatttgcgcgaggtcgggcttagggtatggaatctgcatttttaccggcggaaaaacggaacctgtcggatccttatggaactggcggcgcgcgccggtgtctgcatgaccagcaaggaggtgctggcgatcatagagacctgtaccggacaaactcttatgatggttgaacagaaccgcagtattgtggggcgcgagcgggcagactatgtttttgtgacaagaccgaaactggagtgcacctatggcgttgccaagatgttacagcgggggcagacgatctccggggacagtttcggcaccagacgcttggagcagggagtctttgttatggcactatccgatgggatgggcagcggaagacaggcacacgaggagagtgatacggtcgtcagcctttttttgcagtttgccgaagccggttttaccatagatatggcattgcgcctgatgaatgcggcaatgatctttggcgcggaggcagaacgattttcgacgctggatgcctgtctggtggacgaatataccgggatcgtggattgttataaggtgggggcacatgtctcctttgtgcgccataaaaggcggacggaagtgatcgaggcggacagcctgcctatgggagccagtgcttccctggaggcactgccttttcggtcctatctggaagcaggggactatcttgtactcgttacggatggtgtgttagaatatttgcaggttgaggacgcggtagagatgctgcgtcagttgatcgaagaactggcagatacagatgccgtgacatttgcacgaaagatcatagagcgtgtcctgctctttaccggagggacagcggcggatgatatgaccgtgctggtcttgaaggcgttggaaaggtaagaaatgcagcaggcaaaatgggaagaaagtgtttgcagattcatagagcaggaagacctcatacatccgggtgacggtgtcttggtcggcgtgtcgggtggggcagattctgtgg

SEQ ID NO: 12517 - DNA, 1215 bp, Unknown
  gut microbiota DNA sequence
caggcgattttagcagtgccaaggagaagatgacagattatctggcaaaatatccgacggatcaggcagccttaagagagcagacttttctacaaactagataaaatttttgcattgatttattaaatgcaaaatgaataagtgacaaaataccccatgaaatcggcttttcatggggattttttgtatttgtcgtcaaaatgacgaaaatactatatatagtgaaatgatattgacccatgcaccatattttgatagaatttgtacataaatagcgtttgaacgagaaacatgtcgcttacatgtatggagtttggagaaccaagggattttgaaaggtggattaggaaatgtttgaagttgtgaaaagggatggacaagtaacagagttcaacttggggaagatcaatgatgcgatcgccaaggcatttgatgcgacacagatgtcttataatgatgatatcattggtttattgtctttgcgcgtatctgcgcattttcaggataagatcaaggacggaaaggtatcggtagaggcaattcaggacagtgttgagaccgttttggagcagaccggttataccgaggtcgctaaggcatatatcctgtatcgtaagcagcgtgaaaagatgcgtaatatgaagtctacgatcttagactacaaggacgttatcaatagttatgtaaaggtggaagactggcgtgtaaaggaaaattctaccgttacttattctgtaggaggtctgatcttaagcaattccggcgcagtgacggcaaattactggctttccgagatctatgatgaggagatcgcagaggcacaccgcaatgcggacatccacatccatgatctgtctatgttgaccggttattgtgcaggctggtctttgaagcagttgattcaggaaggtctgggcggtatttccggcaagatcacatctgctccggcagcacatttatccgtgctttgcaatcagatggtaaacttcctcggcattatgcagaacgaatgggcaggagcacaggctttctcttcttttgacacctatctggcaccattcgtaaaggtagacaatctgacctaccgcgaagtgaaaaaatgtatcgaagcatttatttacggagtaaatacaccgagccgttggggaacacaggcaccattctccaacattactttggactggaccgttccggcagatcttgcagaattacctg

SEQ ID NO: 12518 - DNA, 41913 bp, Unknown
  gut microbiota DNA sequence
tctgatcgacttgaattattctcttagaatctttcaaggttgtttcactgttcagttatcaaggttgtcctttgttgcatctgtcagacacaactcatttagaatatcatatgtatttctctttgtcaacaactttttaaaagtttttgagaaatcatattttattccgttgttgcaaccgcctcacgtgcggtgcgaaaattatattatcaaagaccacacccaatgtcaaggcatttttactactttttttcttatttttttgtttactattacaagaaaatagatgttggggcaaaccgatcatttaccacaacatctattgctctatttcttctataataaaaaggatgtattttgtatccaagagcattttccggatcacatcgtagaaagaaatgccataaccagattatgatcgtacagataagtcaggaatttgctctgatcgatgccggcaagaagcccctgcccaagtgtcgttgtactgatgcaggcagccgcatacatgatgatccaaacgaccagaaatccttctgcagccccggcgaccagaccaagcaagccattgacctgcccgagccccggtgcctttctggcacctttgacaaaataacccacgatcagcacaatgatctgtgctatcacaaaggcgataaagactgcaataccctgcatcataaaatccgcgatcttaccgcagatcatttgtccaagggtctgcgtgccatccgataattgcaggatactggatgccccgccaaattgcgcgactgtaagatcattctgcgtctgcagtccatttaaaagatcctgtaattgcgggttctgctccacattcgtctgcatctgccggatcgaatccgtcacatcccccagcgcatttcccggaatggcatccgtcagggattgataccagtcctcaagccctgtgtcctgtggcagattttccgccttatttgtcacaaatttttctgcctgctcatagactttatcatatatatttgtctctgttttcagatatcccagaatataaggattggctaccgatacaaatataaagataaagatccaagaaaccagtccatatacaatgccaagtattcccttacgccagccttgcagcgtcaggaaaaagagaataaacagcataatgatcaatactatgttcattttgtccccttttcactatttcaatcggaccacatctgtatgtccatcttccacgaaaacatatctgcgcgatgcatcctgtggtattattttatatatgcttgtgctaaattcgtatgcaaactttttgatcccctgcaaggtgtatagttctacctctttattattagaaagaacaatttcatggtttgccacaaattccgcattggttgatgctatgtcgatcgtcttctggcagcgttttctgccggtcagggtatagactgtcatctgatcgatatactttccctcgtcatccgtcgcctgacaaatgatcccccaatacttgtcatcataaaagacactcttgatctgtccgtcaacaaaggtctccttggcaatgctcgccttggaattgttgttgaacacgatcacttcgctgtcaccaaaagcgatcgccttgtctccatccacataggcgatctgcgggatgatctgatccgaaaaactgtaggtagcaacaatattgtcgatctcatccttgcctttgttgctaaaatcatagaaagagatcgtcgtctttacatttccatctttgacatccagttgtgagaccatgagcctttgcgcagtagaggaaagagcgatcgccagtggataaccactatttttcatgtgaagttcgccggatgccagcacttttcccgcgtcattgcagacttgcacataacccgcctcaccgtcctgcatcaggatcgcaaccgtgccctgggatgcgatattggcatccacgatcggcatggctgtcttaatggtctgcttgaagccggtattagtaaggatagccgcctgcgtgccctgcacatcatagatcaggatataattgccgcacacatcgatctggggatcatccatttcataggtatagttccagatcaggtcgccgtcatactccgtataaaaagcgccatccctgctatatttcaaaaagttgtcctgaaaatccacatagtgtgtctccgcagaatccacacgctcatatgtctcttttacatcaaagtcatcatacttgcgcagattaaagacaagcacccataaaatgaccgcaacaatacaaaggaagaagaccaagatcttcttccgatgtctcgtatatatgtgcttatgatttcgcaggaattcggttcccgccgcgcccagatccttgacgctatgtttctttccttttgctgaaactactgcattatcctctgccatatatccctttccttattctaaaatacaaatacagccactccatatgccggtaaaggatagccaattgaatattcccgtccatcacattcctgtcgcttcggtgtataggatacctgtcgtttggtatctgtgccgccgtatttggcatcctcgctattgaggatgagtttatgtttgcgttggtttaatacgccaacgcggtaatcatcataggctaccggtgtaaagttgcatacaaagagcaggtcattcttgccactcttagacttgcggacaaaactaaaaatgccgcgataactgtcgttggcattgatccattcaaagcccgcccatgaaacatcctgctcatacattgccggatacttcttatatatatgtaagagatcctttacaaaggtcgaaagatggctgtgatttggattgtctaaaagataccagtccagttctctctcctcgctccactcctggatctgtccgaaatcctgacccataaagagaagttttttgcccggatgccccatcataaaggtatagcctgccttgaggttcttgaacttatccccctcaagtcccggcatcttgctcagcatggagcatttcagatgaaccacttcgtcatgggataagaccagaatataacgttcatactcgttgtaactcatagcgaacgtcatcttactgtgattgtcttttctaaaatacggatccagtttcatgtaatccaggaaatcatgcatccagcccatattccatttataagagaaattcagaccgccatcttctacatcaccagtgacctttggccatgcagtcgattcctcagcgaccatgacaacgcccttgttgcgtccgcggatcagggtattgatatgacggaaaaactctaccgcctcaagattttcattgccaccaaactgatttggcacccactgccccggttccttgccataatccagataaagcatagatgcgactgcatctacacgcagaccatcgatgtgatactgctcgatccacataagggcactgccgatcaaaaagttcttgacctcattcttgccataatcaaagatcttggtaccccactccggatgctcgccctttctcggatccgcatactcatacaagggctgaccgtcgaaatctgccagtccatgcgcatcctttggaaaatgcgccggaacccagtctaagataacaccgatgcctctctgatgcagataatcgatcaggtacataaagtcttccgggcttccatagcgcgacgtcggcgcataatagcccgttacctgatagccccaagatccatcatagggatactctgagattcccatcaactcgacatgggtatatcccatatcgcatacatagtccgccaggctctcagccaactggcggtaagaataaaagccgtcattctctgcagtcggatgctttttccaggaacccggatgtacctcatagatagacattggctgttcccagaaattctcctgtttgcggcgttccttcatccagttgtcatcctgccatgtataggaaaatggcgcaacaatacgggatgccgtacccgggcgcacctctgccatggctgcataaggatctgccttgtagagtttgccgccgtccggcgtatagatcaaaaacttgtataactgtcccggctttgcctccggtacaaagagttcataaattcccatatccggctcgaccagacgttccatcatatgtgatgtctcattccaaccgttaaactcgccgatcactgctaccgctgctgcatgtggtgcccagacatcaaaatataccccctcgatgccgtctttggtctgcacatgtgcgcccatcttcttgtagatatcataatgtgtcgcctgcccaaacaggtacatatctaactctgaaaaattgcccatagtaaaccccttttcctttatattacaactcgaaatcctgctcccgtaagatcaagttgccatcttcatcataacgtttggatccaaaacggctgaacattgccttgataccgcccttttctgctttatcaatggcggattccacaatatcacgcacctcgatcagggaggtcggatggtctacacgttggatcagattgatacggttatacatggcaaggatcgccatttcatccacaacatagccctcctctaaggcataaaccttaccgaaattgaccagttcgtctatggtaaagatcgggatggtgatcttttcggtaaacatggctgcaaatgcactgttgtgggaaagcatcttgtcaatgcgcttcttctggtcttccataagaaccagaacatcacaattctcctgcgacatcaactggcgcatggtctcctgagtacgctcactcagtctgcctgctccctcaatgatcagacatccgcctgacaccttggaaagtaccagtgccacatcttttttattgaactgttctgcatcaatcttgccgacattgcctgtcagtttgtctgtctcaatctgcaataccttgatcagattggatgccaacatggtctttccactgccgacacctccctgaatgatgatattgccacttgcagaattctttttattttccagacggtaacgcacacctgtcaatgcctggcagatggtattttccatgccgtcgatcggcataaagtaagagaagatctccttttcctcctcggacagggtcaactccggcatctcctcactgatggcacgttctaagacattctcatccagtagttctgccatctcttccgggtccaataccacatccgcgatctcagggagtggctcctctgccacctcctgctcccggcttggcattacctcttctgccactgcctcctgtgggccgacttccgactctgccgtttctgcctctgctacaaactcctgtaaatcttccggcaatgtgatctccggcagatcatcttcctctacatctggggcaatctcctctgccacctcggatgcaagcgtttcttcctctaagtgtctgacctcttcctgtccctcgtttgccatgatcctgtcaatttcctgctgtaacatgtcattgacatcggcaacgatcttgcttgcctctttataatccacgtctgtcacttcctccaaatctgcttcttccggcagggacgcttcctgcgcaggatctgctttttcatcctggtcttctagaaccggtggatgccattcttcgctggcgtccggttctacagacttgacgatagaaggagcctccgggctctcttcccctttaatgatatgcgcacttgcaggatctacgaccggaatttccagaccaacgcccatgacgccatccgctgccacctttgggatctggaataccgccggtgccggatcctcagtccgatctttgaccggctcggatgaagcctcatcctgctttgccatatattcttcttttaaaagatctgtcggccttgcgccggcatctaatttcgggatcgcttcttccagacgatccatgatctgggatgcctctttgagtgcgatattcttggcagactccaacttttgctgctctgcctcctgtaatgccgcctccgctgcacgtctggtcttttcccattcctccatgacatcttcaatggtcatctgaccgtctacctgctgctcgacctctttggattccggcacgagcagactaatctgaccgtcgtattcctcggcgagatactcattgaaagtatcctttaaggactcatccagttcctgttttgcctgcttttgttcctctgcaatagcatcactctgttcgttgacctgaagataggggatctcctcaaccaaagtcttgatattttccatattctcggaaacagcctctgcctccgttgcacgcatgatctcgtcgatattctttttgatctccgcctgcaaattgaccgtgttgaagcgctccgccggtaactctacctgcgggatcgccatagtctcatgcacgatctcaccggagtgcaggatctcattggcgcggatctccgtcacaccgtcgcggcgctgctggaaatggcggtacttgtcctcctgcatcttgtcgagcggctggtagatcatcttcatctcaagggcacgctccacataaggaccgtcaccaaaccagaggatgatctcatcacacagatcgatacacttgtctacctgcatggtcttgtgatagagataggcaagttcatatgcccactcctccaagaaatcatgctcttttaactcttccaaaataccgattagtgtcgtataatcggcaccttttgccttgttgatctggtatttgatgatatatttgagactgtcatgcggcgcgatctccacgaattcatcatagaattccttcgcctcatccagatcgcccaacttcacacacagaatcgccagatgataaatgatcatcctgccgatcggagagcggtcgtgcgccatataaaggagttcccgcgcctcttccagacggcctgcctcctcacacacctcacttgccttgaccaatgcgttgacattgtgcaccttgcgccagtttgtgctctccacaatatccagagcctcatctgtacgcccttcttttatcagttgtttgatctcatcgtattttgtcttaaactcgttcttatccaacgttcttacctcgaaaaagtatcctgatacgctcttatctcaagctataaatatacagtttcagtgtatcatagggcacatgacatgtcaaaaatatttgtctgacaaatctgtgaaaaacctgccattttttagcaatataaaggacagtttcctttgcttttgaaactgtcctcctcatagttttattcttttgtatcctctttctcagaagattgttttttcttctttttggagaacacattgacttttacatgtgattcttcttcatattccttggtatgctctacaagagtatgatctgcctcgttgactctttccatattgatatagtcggctgtctcctcgggcagatcccgttttctcagcatgtgcttggagaagcgtcccaccagatagtagataagtgccatggtcggtacgccaaagagcatacctgcaaatccaaacaagccgccgccaacaacgatggcaacgacaacccagaaagaagaaagcccggtagagtcgcccagaatctttggtccgatgatattaccatcgatctgctgcaatacgatgataaagataaggaagtatattccctgcatcggctccgttaaaaagataatgataacggtcggcaaagccccaatatatggtccaaataccggtatgatattggtcacgccgatgatgatggataccagaagtggatacggcatcttaaagatcagcatacatacataacagatcacaccgataatagcggaatcaatgatcttccctatgataaatccatagaaaatgtctctggtctttctgccgatttccaggatgacattggcttgatctgcacggaaaataccgtatatcagtttcttggcctgtcctttaaatgtttccttgctacaaagcacatagacggacacgatgatgccgataatgcagttgaccagcaaacgccctacaccgagcgctcctgtcaccgccacggatatcacatccttggtgctcacatctatgtaattttccagccacttgacgcccttatcgatcgccttgtcaagattactgcccttagcgctcatgatattcttttcatagcgcccgccggtaatctggtttgcccaatccaagacaccatcgatctgttcgttgatgtgtgtgaccagataatggatggtctggtataactgcggtatgatcgcaacaaagaacaatacaataataccaaccacaatgaccagtgcgatcaaagatgtgagcatacgcgtggtctttttggcattttcttccgtcttgcagtgttttgcaaagaaggggtacatgtgcctctcgaaaaattccatgatgggattcatcagaaaggcaagtccaaatcctatgatgatggactgcaggacgctcataaacttgctccagccttcgcccagtccctgataacgctctacaccaaaataaaacaggatcacacaacacgccgtgaagatgaccaccgcagagatggtcatcatgcgctttacattccctctgccattactccccggttgtttttgtatatccataagtcattaacctctgtaatagttgatcaggcatccctttaagatgatatctctctcatcatctgtcagagcaccaagctgcagtgtgaacggctgcatctgtccatcctttaccacatatgcctgaatttcttctgtcttatcgatgatcgcctgacggatcgccggaacaaagagataatctccgttcttaaatggaagatcacctgccgggatcaaaaatgggagcatgccccagttgatcaggttggaacgatatctcttggtcgcatattcgttggcaatatttgcccagccacccaataccttctggcaggaagccgcctgctctcttgcagaaccatcgcccggttttacggcaaaaatggtagatcctacaccaaagttgtcatgatttacatccgggaaggtctttttcacggtgtgcacgatctcacgcagttccggtactgcctgtccggcacattctccggcttccagtgccttctgtgctttctggatctccttggcacggcctacatattccggatccttacgggaaagtgtaaattctgccaatccaagaggattagagcggtaagaagatgtctctcctgacggaatcagttcatctgtcgttgttaccggatcgtggatctcagatacgaccttgaggaaaagattttccggtaatgggctcattgccggccaatccttgatattcggtccaaacttaatctcctcattcggatctgcaacgcccttgctgtcaaagacacggttggcataaatatttttatcgaaatagtattttggcttggtgtagttgacatccatatcggttgccgctgtcagataacccttatttgccgcagttgcagcgatggaacgggcatccataagtgctacggatgagatctgtccattctgtaacttggatccttctctgttcgggaagtttcttgtagagtggcggatggagaagccgttgttgcttggggtgtctccggcaccgaaacatggtccacagaatgctgtcttgacgatcgcacctgtctccatcagatctgcaacacagccatttttcacaagttccatatagatcggtgtggacgccggataaacgctgagtgtaaactcatccggtccgatggatgcaccgcgcaggatgtctgctgcatccgtgatattctcaaaaccaccgccggcacaacctgcaatgataccctgatctacatataatctgccgtttctgaccttatcctttaaggtgaagtctacctgtccgtccaggctgaccttggctctcttttcgcaatcatccagaatatccatgagatttgcattgagttcttcgatcgtataggtgttgctcgggtggaacggcatagcgatcattggcttgatctggctaagatcgatctcgatcataccgtcatagtatgcaacctgacccggatttaactctgcaaagtcctcggttctaccgtggatctcatagaactcacgcaccttgtcgtctgttctccagatagaagaaagacaggtcgtctctgttgtcataacatccacgccgatacgataatctacgctgaggttggcaacacccggtccgacaaactccatgaccttattcttgacataacccttgtcaaagacctcaccaataatggcaagcgcgatatcctgtggtcccacgcccttcataggactaccggtcagatagacaccgacaacgcccggcatggcaatatcataagtcttgttcagaagttgttttaccaattccggtccaccctcgcccatagccatggttccaagagcaccgtatctcgtgtgggaatcggatcccaagatcatcttaccgccgcctgcaagcatttctcttgcaaactgatggataacagcctgatgaggaggtacataaatgccgccgtactttttggcacatgtcagtccaaacatgtggtcatcctcgttgatggtgccgcctacggcgcaaaggctgttgtgacagttggtcagcacataagggatcgggaatttctcaagcccggatgctcttgctgtctggatgataccaacgtaagtgatgtcatgggaagtcagtttgtcaaacttgatctgcaaattctgcatattgccggatgtgttatggctctctaagataccatatgccatcgtctgcttggctgcttcttcctttgtgacttcttgtcccgtcttttgtctgatctcatcctgtgcctgtggaccatctgcgaccaactctgttccatggagcagatatactccctgttcatataacttcatgtgtttcctcctcaatttttattttctgccgaagagagagaaaataccttttccctcctccggctttttctcttcttcctggtcggattccttccatgcaaaatattctttgtccagatcctcggaaagtgcggctgcctctttctcggtcaactcgccctgggtcggaacccccgtggtctcttcctcatcctccaatggaatgccattttgtatgaaataatccttgttgatgcggatctccggctgcacattggcataggacggggtatcctttggcgcgaaatcgcctttttctcccttttcccgctctaagcgcaaacggtgattttcctcctcgatcagatgtaaatacttttgcgtgtcgatcagatctcccaactgcgacttgagttctgattggttggacttgatggtctgcttttcgcttgccatcttatccttggcgtcttcgtagatcttggcgatcgcatctcccgcatcctcaatgatctgctgaatatcgtttaaggcattgtccgtatacatgatcgatgccgcatagatatcctccgccttgcgggaagccgcaaaaataatgtcgtctccctgcttttgcatctcacggtttgccttatcctttttggtctgggacaattcatgttcgtcgatcatgtcatacatgcaggcatttaattccttgagcagatccatcatctcgttcttgttcacgatcacgtcgcgtttactgccgttgtatggctctgccttggaaaaaagtacatgaatatcccgcagcactttctcagtgcgatctgctgcactcatatttcacacctcatccgttcgtcttttggcattttacatataaatatgaaaatactctttaaaatatagcatacaagccagagtctgacaacgcttgacggtcagggaaatcttaaattttgttaataaaaggacatcatttctaaagaagatataaaaaatacaaaatgtaagcaagcagcatgacgatgccggctttctttcgcaattcttttgtccgtgccacacatacaaatagcaaaatgccgaccgccgcggcgatcagggtatccacgacaaagccggaagcaaaggtaaccggcgtgatcagggctgtggtacctacgataaagaggatgttaaaaatgttgctccccacgatatttccaatggcgatatccgcattatgttttcgtgccgcggacacactcgtcaccagttccggcaggctggtgcccaacgccacaatggtcagcccgataaaacgctgactgatgccaagcgcctttgcaagattactcgctccctcgaccgcgaaattacttcctgccacaatcatgacaacacccgccaagatcagacctatgatctttgccgtggaaagctgctccgcttccctttcttctttcttgcccttttttgccatcatgtagagatagcgcagatagaggaggaataagacccagaggataacgccttccagccacgttacctgacctccggtatagcccagccacaagagaacaaaggtagcgacgatcataaaggggatctcatagcggacagtggaatccgccaccttaagcgttgcaatcagcgccgtcacgccgaggatgatgaggatgtttaaaatattgcttcccacgatattgccaatcgtgatccccgcatttccccgtagtgccgccgaaatgctgacagccgcttccggcaggctggttcccatggcaacgatcgtaagaccaatgaccagttgcggtatgcccaattttcttgccagcccggaggctccgtccacgaaccagtccgcccccttgaccaaaaggaaaaatcccagcgctaaaaagacaatctgtagtacaaagttcatatctttctcccttcctgcaacttggggataaaaaaagcgagtccctttgttgcatcaaaaaaataatacaacaaaagtctcgctacttaactacataccggattgctcgcaatcgtactgacgatatatagacacaggtctgctgtgtcagctactcccttttatctaagcagatcgtagcaaaaaaacaagccgtctgtcaagtcctatttatctctttttatcggcaaaagtctccgtcacgcgcggcaggataccgtgaatgtaggcgatcatgactccgtagttggtgatcgcaaccttctggctgtccccataggagatacgatagcgcatttcctgtaaaggcagggtacagccgccacaatgcacgaccagtgcataaggcgaaagatccttgggaaattctgttccactggtaaaggcaaaatgcaggtctttaccagtgtattccctgatccagcgcggcatcttgaccgtaccgatatcatcgcactgtctgtggtgggtacaaccctcggaaatcagaaccgtatcgccatctttcagatcctcaatcgcctgcgcaccggcgatctgcactgtcagatctcctttgtaacgcgccatcagtatagaaaatgaggtcaaaggaatgtcttgcggcacaatctttgccactgtcccaaatgcctgactgtcggtcacaacaaggcggggctttttgccaagggctgccagcgcctgcgacaactcggtatccctgaccaccaccggaatggcacctgcctccagactgtcgcggatgacctgctgctgcggcaggatcaagcgcccttttggcgcagcggaatcaatcggcacgactaaaacgaccagatctccttcctctaagagatcacggatcaaaggtctttctgtctctttgggctgtaattttgccaatcgctcctttaattccccgatcccctgtgccggatctgtactgaccggacagactttagcaggatcgaccgccagtgcctgtgcgatctctcctgccttttcatcgatctgcgccggatctgccagaaggtctgtcttatttaagacaatcagataaggcagaccacgtttttttgcctctgccaaaagatcttgttccagatctcctaccatagtatctgctgcgatcacaagcagaagaacatcggtctggcggagcatctgcagacctttttccatgcgcttttgccccagtccgccttcgtcatccagtcccggcgtatcgatcagaacgaccggtccgagaggcaagagttccattgcttttttgaccggatctgtcgtcgtacccttgacttccgatacgatagcgagatcctgtcctgtgatcgcgttgatcaggctggattttcccgcattgcgcctgccaaaaatgccaatgtgcaggcgctctccgcttggtgtctcattcatactcatagattttcccttctcttcccaaacgttttctgctgtcatatcagactttcgtcacatttaaaaacggaagtcgcggttgccctcgtggatcttttcgatatattcggtcgccttttcctttacctttggattggtgatgacttccaattcttttttgatcagagcctctcccacttccttagtctccgggcttgcgtaatcttccagatattctttcagggtcataagtgcatttggatggcagcagttgacgatctgcttactctttaaaagagacatgaaacggtcaccggttctgccttcacgataacatgccgtacagaaacttggcacatatcccatatccatcagccacttgacaacttcatccaaggtacgattgtcactgacatcaaactgtgctgagttgtcctcctctgcttccggctcaacatagccaccgacactggttctggagccgccactgatctgggaaataccaagttccagtacgcgctctctgctctccttggtctctctggtagatacgatcatgccggtgtatggcacagcgatacggatgcaggcaacgatctttgcaaaggtctcgtccgaaataccattgtcaaaaacatccgggtcaatatcatctgcacgacgcacacgcggtacgctgatggtatgcggtccacagcccttggctgcctctaagtgctctgcgtgcataatgattccggtaaagtcgtaacggtaattgttgagtccaaagagaacaccaagccctacatcatcaataccgccatccattgcacgatccattgcctcggtgtgataagcataattactctttggtccggtcggatgcagtttttcgtaagattccttattgtaggtctcctggaaaaggatataagtaccaataccagcttcctttaacatacggtattcttcgacagttgttgccgcgatattgacgttgacgcggcgaatatctccgtttttatggtgaatactgtagattgtcttgatactttccaaaatatactcgatcggattgttctttggatcttcgcctgcttcaagtgccagacgcttatgtcccatatcctgtagagcaataacctcagcgcggatctcctcctgcgtcagtttttttctgtgaatatgcttgttctttgcgtgatatgggcaatactcacagccgttgatacaataattggacagataaagcggagcaaacataacgatacggttgccgtagaactcctgcttgatctcttttgccaactgatagatctcctcattcttgtcttccagttcgcagtctaaaagcacgatggcttccttgtggctgatccctttcatctttcttgccttgttcaggatctggtcgatcagttcccgattgttcttgttcttctcagcgtaatcgagacactcgcggatctcctcatcgctgatgaactcctctgcctttgatgacattacatcatacattcttttttcctccctttttctatgtgtcttatgttatagtccgtctcatttatcccttgtaaaatcgacggttgtttgtaaaattaaattttcttataatttcaacacctattaaacaggtgcatcgccacggtctacgaccagttcataacctatagactgcatacgatttcccagacaatgacgacactctgccgcctcatctccggtgcagatcttattatcatacaactcatactgtttgcgcacgctggtcggcgacagatttggcatgacgacattggctcccgccaagatccccttttcacgcccgcgcggatcgatcgtccccagcgctgtcgttgccggaagcagcaactttggctgtaaaagccgaagcagtgaaatcagatacagggtctcctccacagtcccctgtgcctggtctttcaggggtgtctcgtggtgaggcacaaaaggtccgatccccaccattgccggctgtaagttctggataaagaccatatccttcgccagcgtatgtggcgtctgtccccgggaaccgaccataaaaccgcaacccacctgataacctaagtcttttaaggtataaaggcattggatacggtggtcaaagtccatttcctgcgggtgcaggctcttgtaatggtctttatccgctgtttcatgccttaaaaggtatctatctgcccctgcttctctcattaagcggtaactttcttcacttctttcgccaagagacagggtaatggcgcaatccgggtgacgctccttgatctcccggatcagatcacacatgacctgatccgtatagtaagcatcttctcccccctgcaggacaaaggtgcgaaaacccagttcttccccaatatctgcgcaggataagatatcctcccggctcaggcggtaacgttcaacctgccggttatccctgcggatgccacaataatagcaattattcttgcagtaattggaaatctcgatcaatcctcgcgtatagatcctgttgccaaagatctctttggacctctgacgggcaatttccgctgcatattctgccacttgatcgcatcgtccgcggataagttcttcccattcatccagacttagtgcattttctttatctaatttatcaatcaatgctttgacatcctgcattgccagtgccataggcatttctctcctttttctcttttctttcgctattatccaagcgtcacttactgcaatttggaatagacggcttttgccgttaccccctcaatattgccgatctttcctgacatggcactgatcacatcctggggtgcatctacggcgacgctgatcagtgagatcccgcgtttttcataagggatccccatgcgcccgatgatatatttgccatatgcatgcaggacgtggttgagttcttctgccttgtcacgctcctccaccacgatcgcaagaattgctactctggtatccatcagtatgctcctttcttttatgaagagtgtgcttttacctataatatgaaaaagtccctgcatccaaagatacagagactttccctatcaaacacctataaaatcccgtatctttacgctcaggctgccctttgcgcgcagatgactttaattcataatgtaaaaaagggagataccttgatctccctgaaattgtctttcatagcgttacctccacagcctgctcaacccaggcacccttgcggcacccggaaactccttcttagtgctgctccattcctgacctgacacgattcgtaggcatccgtcgcgcaagacccaagtatcaacgccacttgtggaggccgccatttgcattgtatgggattatgacacatttgtcaatcaaaacccatcattctatcaaccttcatatgatcttgcggattttcctccctaaaactgcttcttctgctcacgcagatctgcgaaaaatccgcttaagagggctgaacactcatcttcgaggacaccgcgctcaacctcgacctgatgattgaaagcatccatctgtaaaatgttaaggacggatccggcgcagcccgccttggcattcatgctgccgataaccgcttttttcaatctcgcctgcaccatagcacctgcacacatctggcatggctcaagggtcacatacatggtacagtcctccagtcgccagtcacctgtctttttacatgcctgcttcattgcgatcaattccgcatgggaaagtacattcttgtccgtgttgcgcttgttgtagcccttgccgatgactttatcatcgcgcacgatcacgcagccgatcggtacttcgttgagatcgtatgccttttttgcctccttgagtgccatcttcatgtacttctcgtcatgtttttcctgtctgttcttttcgattttctctttcagtgccatatggtaaaacctccaccaaactgttataatgttttttgattggtttcattataacacgataagaaatggagtaacactatgactgtaaaaatatatggaatgcagaaaacaaccttggttgattatccggggcgtgttgctacaaccctctttaccggaggctgtaacttccgctgtccttactgccacaatggtgatctgatcgtcgggctgaacgacatcaaaccatacacaaaagatgatatttttgatcatctgcacaaaagaagaaatgtcctggacggcgttgtcatcagtggtggagaaccgaccttgaaccgggatcttccggactttatccgccagatcaaactcctgggctacaaggtaaaactggacaccaacgggaccaaccctgacatgctccgctctctggtcaaagaccgctttgtggactatgttgccatggatatcaagcaatgccggacaaaatatgcagatatcgtccacgcggatgagtttgatctggatgcgatcgccgaatcggtggagatcttaaaagcttccaaaaaagtcgattacgagttccgcacgactgtttgccaggaactccatgaggcaaaagatatgaccgctatcggtatgtggttatccggtgccaaagcctactatctccagccatacaaggaatcgccggatgtcctgcacccgggatttcacgcaccggacgataagaccatgcaggaatttgtccaaatattatccgcctttctgaataaggtagaaatccgaggttaagtgagtgaattttgaacagacgaccgaccgcctgattctgcgtatcctttccgcagatgatgccgaaaaggtactacaattttacaaagacaacgctgcgatctttgagcagtttgaacccctgatcggaaatgacttttacagtctggagcatcagaaaaaccttttgacctacgagtatcaggagatcctgaagttacatatgctgcgtttctggatctttgaaaaagataatcccgaccgtatcatcggcacggtcagtttccacaacatttcgccgaatatctattcttctgctcagttaggctacaagatggatcagcatttctggcgaaaaggctactgctacgaagcgatcaaggcaggcatccgtattgtttcgggagacatcggcatccgccgctacgaggcacttgtactgccggacaacaccccctctatctgccttttgaaaaaactgggcttccacaaggaaggtctgctggtagataaggtatttttgcaaaatcgctggcgcgatcattatctctatggttatatcgttccgaaaatgtaagtgcagaaaggagacctcatgtcacaagtaaccaagcgtgccctagagacatcactgaaaaatcttcttttacaaaagccgctggataaaataacgatcaacgatattacggcagattgcggtatcaaccgcatgaccttttactatcatttcaaggatatctatgatctggtggaatggtcctgtctggaagatgccgagaaagccttgaacaacaaaaaaacctatgatacctgggagcaggggctgttacagatcttttacgctgtgcaggcaaataagccattcatcatgaatgtctaccactgcgtcagccgggaacgtgtagaaaaatacctcatgcccctgaccgataaactcttagtcgatgtgatcgaggagcagtccgagggactctttgtcaagcagacagacaaggattttatcgcacagatctactcctatgtcctggtcgggctcatgttggactgggtcgccgatgacatgaaagaagacccggaaaaactggtcgagcgtcttgccattgtcatccagggaaacctgtcggcagccctacatcgtctatgtgaccactgattttatcaaaagaccggatttgataaaattatttacaatcatacccccatgataaaaaaattatcatggggtcttttttgtttattttcctttttctttgacaaacctatactacaggtaccaagaaatgaaggaggtaaacattatgtattactcagcaggaacttatgaatcattcgcacatccggagaaaccggagggtgtcgacaaaaaatccgcatacatcatcggaaccggacttgccggtctgaccgcagccttttatctggtgcgtgatggtcaaatgaagggcgagcatatccaccttttggaaaaactgaccctcgccggcggttcatgcgatggaagaaaagatattaccaagggcttctttatgagaggcggacgtgaaatggataaccactttgaagtcatgtgggatatgttccgtgacgtgccttccatggaaaacccgcaaatctctgttctggacgaatattactggctcaacaagcatgacccgaactattctctctgccgtgctaccgtaaatcgcggtcaggacgctcacacagacaagaaattcaggctggataaggcaagcgcacaggcactttccaaactctttatcacaccggaaaaagaattggaaggcaagaagatctccgaagtgctgccggattcattctgggataccaacttctggctctattggcagactatgtttgctttccagcgctggtcaagtgccctggagatgaagcgttacctttgccgttatgtacaccatattgatgggctcccggactttagtgcccttcgttttaccaagtacaatcagtacgaaagcctcatcatgccgcttgtcaactatctgacggcacatggagtacagatcgagtacggcatggatgtaaagaatgttgtcattgaaacggtcggcgacaagaaggtcgcacgccagatcgtatatatcaaggacggcgaggagcagacattggatctggtagaggatgatcttgtattcatcacaaacggctgctgcaccgatacttcctgctacggcgaccagacccatgtaccggatctttctaaggtaaaaaatggtgccggcgagtcatgggatctgtggaaaaatattgcaagacaggcaaagcacggtgaattcggtaacccggataacttctgtgatgactacgaagcaactaactggatgagcgcgaccgttgccacttccgatgaaaagatcatcagcaagatcaaggatatctgcaagcgtgatccgagagacggcaaggtaacgaccggtggtatcgtcacagtaaaggatagtaccgaaaactggtatctgtcctggaccatcaaccgtcagccacagttcaaggctcaggataagaatatggtccttgtctggctctatgccctcaataccaacaaggaaggaaactttgtaaagaaagccatgcgtgactgtaccggtaaggaggtctgcgaagaatggctctatcatatcggcgtggatccaaaggagatcccggatctggcagaaaatgcctgcaacacaaccacatgctttatgccgtttatcaatgctttcttccagccaagaaagaatgaggatcgtccaaaggtcgtaccggaaggctctgtcaactttgctttcttaggtcagtttaccgagacaccgagagataccatctttaccattgaatactctatgcgtaccggtatggaatctgtttacacactacttgatattgaccgcggtgttcctgaagtatggggaagtaaatatgacgtgcgcgaactcctgcgtgcatgctactatgcaatcgacaagaaaccgatcacagatgtaaaactttcctttgcagaaaaagaagccctgaaagtcctgctcaagaaggtcaagggaaccgatgtggagatcctgctgaaaaacagcggtctgatcgaataagcccatcattaaaaaataagtcttgaattaaggaaacgccaaaactggctctgcgtcggctttggcgttcttttttcttttatttatttcttttcggattctctgtgcatgctcacggcttctctgcggatatcccggtcagtgccacatagacatccgctaaagatacgatctgggctgagatcgttttgtcataattatttatccgcctttccgcgaaactacctatataccaatataatagacttctgtcctactttggtatgtattttttcataatccgtagtaaatcttttttaatgataggcttggatatgtgttcgttcatgccagccttgtaactgcgctccttgtcatcactaaaagcattggctgttatggcaaagatcggcacactctttgcatccgaccgatccagggaacggatacagcgcgccgcatccagtccgtccatgaccggcatcataatatccatcaggatgatgtcataggtgccgccctcggattgcaggaaacagtctactgcctcctgtccgttccatgctttggtcacagccgcgcccgcattttcaaggataaactgcgcaatctccatgttgagatcattatcttctaccaaaagaacatggatgccatccagacggatgtcctggtcctcgctgtcctccttatcctccacatggtcggcaagtttgaaacgcaattctatggtaaaggtcgttccctgcccctgctggctggtaaagtggatgctgccacccatcttttccgtcaactccttggcgatcggcagtcccagaccggttccggcataggaagttctggcagatgcattttcctgggcaaacggctcaaaggcacgcttttgaaattcttccgacatgccaagtccggtgtcctgacaggtaaagacaaagatcgccatctttctggtcgatccggtttcctctacgctgacatgcacagtccctccctcacggttgtacttgatggcattgctcatgatattctgcaagatctggcgcaggtgcagtggactgcctaaaacattccagtgtacccccttgcaaacgtccacctgaaaatcgacctggcactctaccgcctgtacctcaaccagtgataccgtttcccggaataattccaaaaggtcaaacggcttttgctccagacgcacctggccggactccaacttattcatatccagcacattattgaccagatccaaaaggaaactggaagcgctgacgatcttctgacgacattcctcctgcttttcctcgtcacctgcataatatcggctgatctcgatcatacccttaatgccattgattggtgtccggatatcgtggctcatccgtcgaagaaagtctgtctttgccacgcttgcacgctctgcatgttccacagaacggcgcagactgttctgatagtggatctcctttttcttctcggtcgacacatcccggcacagaaagataacttcctgtaattttccgtcctcatcatatttttgcggcacaaaaaacagttgttcccacttggcatttttttcttccatgacacaggaaacataggtcttacctgcgacacgcgccgccatatctgccatatccgaaaagcgcagaaaatcctcctgataggcttcagtcaaaacatgctctgcatatcttttcagcatatattttacgtcactgccctgactgagcgcactctccatcttatccgcggattttaagaccttccaggagtccgtccccaaatctatgagcaaaacaaaactatagacccggctgatagaactgatggtacgcagttgctctgcacttttttcccggttcttttcttcctgtttgtaacgcaggaataagaaaagaatacaggcaagcacatacaagatgatcccaaaactttccgtcatgataaaggtggaatagaccttgacctccgggaaaaagatataaatatcatagccttccacccggcgcacatcgccacacagatgtctgccatttatcgtcaggcggatcagattactggtctggttcaattccccaaaatcttctgcactcatctttagccagtcctgtaggcatttgcctttgagttcttcatcgttggtactgatgatctcatccccggatgcaatgacagccgtgccctttaattcaaagataaaatcatctaaaagcgtttgtatgctgatctcgtccttggcaaagatctctcttttttccgataaaactgccacacagcccgcctgatcctgccgggaaacaatggcaaaatcgtactggctacccccgatatccatacgggtcgcataagaattttccggatagtgggatgcatcatacgaaacatcgttattcaaaaattcatcccagacagactcatcaatctctccccaaccgtatgtcgacacattgtccgcatccgttaccagaataccgtccagacgctgctcataggcatactgctctaagagagcatctgaggcttcctcccgctttaggcaacggctcaactcctttgccttgtccaaaagacggacctcgctcttggtgcggtctccgacctcatagttattccatcgcacgatcctggacttgatcgtgtcaaaactttcatccatgacataatatagtctggcgcgatcactctgtatgatgatcataccactgatcaaactaacggctattcctaagattaagagaaagcatgccaaactgatctctttgttttttctcatatctctactctgcatctgcgtcactccaagcgcggtctgcgctcatgccgtatttttccagtatctcccctgtggttccatcttttttcatctcctgcaaggtccgggtcagttcctctgccagttcttcgtgtgtccccttttcaaaggcaacgccaagttcggactcataaagactttcatccagcatgtaaaactcgtccggcatagaatccataaaaaggcgcaatgcactctcatgtcccgcaatggcatcacaatagcccttgcgcagacaggcatacacttcatctaatgtagaaaaacaataaacctcatccacctgtggtattctgggatcctcatggttgagcaggatctcatccggcttggaggacacctgcacggcaaagcgcttgcccgcaagatcctgcaaggtcttgatgccgctttcctgacgtacgaccacgacctgacggctctttagataggggcccgcccaggtgtactcatcctcacgttcagtcatggtaaaggatccccagagacagtcaatctgtccatccgccagatattcctcctttttctcccagacaatattgcgaaagaccggttcatatcccatgcgcccaaaggcttctttggcaagttccacgtcaatgcctgctgcatttccgtcttcatccacataattgtaaggtttataatcgtcactgcctatgatgatctgcggtaaggtgtcctctgccgctgccggactgcttccacagcctgccagccctaggaccagccctacacaaagcaccaggcttaataatctctttttcatgctctttctccccatacggtcaaaaatccattattctgcgtcctcttgcattaagcgggtcacagcatcctggatcgtctgatactgatcgtccattgcctccatcaattcttctgcaccttcaaacgttccggcacgaaagatctctgtaatgtcataagaagtatgatagagatccgaaaatcccaaatttaggcaaacaccctttaaggtatgtgctgcccggaatgcatcttccacatttttctccgctactgcttttttcatgtctgaaaaactcggatcatccaaaaacttgatggcaaatttcttgacgatcgcctgacttcctccaaatctctgaagcacatcctgccaatctgctccgatcatctcataacattcctgtacggtcattatccgtcctccgtattctatgtattttgctctgtctaaacgcaatttatcctataggtataattcacctatgttatcgcttcattatacgcctgcttttgcagaaagaccaacacttttcactctcaaaagccagcatacaccaaattcctattcttaggtggttattcctgtcgaaaaaagacgacaaaatataaaaaagaggaatgtgtaaatctcatacacattcctctatctttttaacttctataaatccggcttagccaaaatatctgtcaagcagaccctttaatgccttaccatgtcttgcctcgtcgcgagccatttcatgtacggtatcgtggatagcgtccagattgttcttctttgcacattttgcaagatcaacctttcctgcggtagcaccaaattcgcaatctactctccaagccaggttgtccttggtcgtagccttcatgtttggctcaaggtcctcgcctaacatctcagcgaactttgcagcatgctctgcttcttcgtatgctgccttttcccagtaaagtccgatctccggatagccctcgcgatgagcgatacgagccatgcaaagatacataccaacttctgagcattctccttcgaagtttgcctttaactgatcgaagatgtacttcttgtcctcttcgctgatagcgtcgttattctttaccgtcttagcatatacgccatattcatgctcagcagcaagtgtcagttcttcgccttctttgacttccttaaacttgtcagcaccaacatgacataccgggcactcctctggtggctgctcgccttcataaacatatccacatacactacatacatactttgccataattcttttctccttttctttacttatgatgattcttaattacttactgttccctttcggtgatcttaatataacacctcaccaatgaaatgtcaatagaaagttaggaattattattatttttttctttatccaaacaggcagggcattttccaaagaaaactacctggctctgttcgatcgtgccgccaaacccttgatttgcaagggtatgcagaaattccagattatccatttccagatctaagactgactgacagtagttacagacaaaatgcggatgctctgctgtgttggcatcgtaatgatccttggcatcgttgcaagggatacgctgcacctgtccggtttcctctaagaccgtcagatttcgatagaccgtcgcaaggctgatctttgggtaatcctgctgaactgcttgaaatatggtctctgcagtgggatgcttcttcgtcgaaagcagataattatatatggcttcccgctgcctgctataattcagagttttcataatttcaacctttctttattttaaataaatcagtaactattatcaatttaacatggcaactgctatttgtaaagcgttttatgcaatttgaattttcgatgaacgttctattacgtaaaaagaagacgatgccacaagacaccgccttccaaaaccgtcttcaattgtcattataccaagaggtctgttcgttctttgctttcctcgatcttttcattcaatttcttgcaaggaatactgataaccagtccaaagagcagagcgactccgatataggctgtcatttctgtcaaatacatccagtagtcattgccatgcgtacctgcgattgcctcacgcaaagcgttcataccatgtgcgaatggcatatatttataaagatactggaatacctttggcaatacttctaccgggaaggtaccaccacttccagcaacctggataaccataagcacgactgctgctgcctcgccgacattgccaaaggcatatgccagagagtacataaagatggtaaaggtaaaactggtaaaggatgccgcaaaccagaacataagcggatggtcacactggatacctacatagaggatacatcccaaaacagtaatgatcgtctgcaactgtcccatcaggtagaacactatatatcttccgaagaatttctgccaattccgcaagttcctgcatcccggattggtcttaagtccggtatgcataatggcgatcaggatcagggcaccaaaccagatagataagatcacatagaatggtgcggttgcagatccgttatttgccatcgcataaatcggctcctgatccagattaaccggactggaaataaagtctgcgatcagatccgggtcagactcgatcagtgacatcaaaatgttgtactggtcgtttgactcaatatcatccatatcggcgatcagatcctgcagtttgccttccatctcgatggcatcatccctggttgctaccagtttatccttgccaaaagacatcatatccgggtaagagtccaaagcagatgaaacatccttgatgctatcgctggagtagttcaggatcttctggatctcgctgatcgatgactggatggaattcatggtagagttcaactgtgggtctaccgtatctttataggtcgttcttaaggcttcgacgctctttttgcaggtatcaaaatctgcatgcagggactgtgagattgcattggaatctgcagaagtcttgtcagatgctgcttttaaattatccagatctgcctcaatcttgtcaaaatctgcattgactgcatctttttgctgtgtaatggttgaattcatatttacattttccattgcactgttgaaactcgtctgcaaagcttcgacagcaagtttgatggagtcaatctggtctgacataccattgcttgtgttatctaccttgtcaaaaacatcatccacagcatctgccatgttatcgatctgctttaagacatcatctaggttgaccgtcaccatatccgaaacggtatcaatgctgccgtctgccgcatccgctgctgcatctgcactgtttgccatgctccgtccggtctccataatggaatccaactggtctgtcacagcattagtcgcatccatcagactgtttgcggagtcaataatggcaatataggaatctacgatcgtgatataggtattcagatcggcatccatatcatccaatttatcccggacggcattggtaaagttgccgccattgccgctattatctgtcacgacatactcgctcatgcttaagagtgcctgtgccatggtcgatacaaaagcactgttgatctcctcctgaacagtcgtctttaccttaccggtaatctttggcgcgatcgcgttctttttctcattttcataataagtgatctttggattctcgatgtctccgccaaggaaactgatcagatcttccgaaaatgactcgtcaatgactaaagccgcataataatcaccgctctgtacgccatctaccgcttcttcctcgctatctacaaaaacccagccgatggtcttattctctttgaggttgctgacaaccatattaccgatatttaactctacgccctcaatctctgtcccttggtcgcaacttgcaactacaacgttcaaattggctgtagatgcctctccgtatggatcccagttggacatgatgttaaaccaggcatataaactcggaataaccgtcagaccaatgatcataacaactgcaacaacatttgttgccagtctctttgcatcggaggtaaaaatccgaataatgtttctcatcttattcgtcctccttttcatctgtatttctattgtccgggctgatcttctggatcactgcctctttgaactgctccttacgctcctcgatctcggcaccgattctctgtttttcagcctctatcttttgcttgccttcgtcaatgcggtcatcaacataatctaatttctcggaaatgttgctctctgcctgctgcacaccttcaccgatcagactggtgtcgtcatgcagtttatcaacatccacgccaaactctttcatctgctccatcatcttgtaatcactgtactccacatagatcagatagaaggctatgccaaagagggaaaggatccaaaggaccaaaaagactaatttcccttctgaaatggcaaaactcatgatcagaaagaagagtggtaatatgatgttgactttaagaccaatacggattctcttttgattttccagatgaagatcctgttcataattgatgaacttttcatacatctctttgtattcttgtttttctgccacagtcctaccctccttacatcatttccgtatcttccagacgcttttccatgtaatggttgagcccctcgaatgggatacggatcaaaagtccgatgacaagacctacacctaagaaggtcagtaacttgagcagataaactacaatatccgcctcgtataatccacagatacattcacgcatagcgttgatcgcgtatgggaatgggaagaagatatataccttctggaaaaattccggcaaaagttcgatcggataagttccgctacttccggcaatctgcagcactaagataacaacggcaatggctttacctacatcgccaaaggagtagaccagtgcatagatcaaaagggtaaaggtcagactggtcagtgcgccgaccacccagaacaaaagcgggtgaacacactgaatcttcaagatgaaaagatcacccaagaccgtgatcagggtctgtacctgccccatagcgataaagaacatgcctcttccaaagaaaagttgtgtcggtgtcgcatccgggtattttgattttgatatttttactttgacaatggctaccatgatgatacaacctacccatacagacaaaaccgtatagaatggtgcaactgcagaaccataattttcaatcggatataccgcaacggactcgatctctaccggctcggagaagaactcaccgtacatatccggatcaccagtcagtgtatctaccagtgcctgcacacgttcgtcgtcctcgacgctctttgccttgtcgatcgccttggtcagtctggtgctgatcttggataaggcttctttggtcttttccagactcttatccgaagtagaaatcgttgtctgcaaggaagaaaatacatttcccatggagttgagcacgccgctcatattgttcatgaccgtacttgcattgccgatcacatcctctaagttatccacgcaggtattgagctgtggtaccaactggttgttgatggtatttctggtcgatgtgatattggagaccgccttgtcaatatctgagatcatggtcgcctcggcatccttgatctgctgggcggtcgcatcatactgtccgtccagatctgcctgttctaatatcttttgcagggcatccacggcatcggataactgctgcagggtattgaccacatccgtattcccgttttcatctgcaatggactggctgagggcattgatatctttatttaactggttggtatcctttaaggtccgctgacaggcatctgccatctgatcaatatcaccgctgatctgcgcctgctttaactgattttccatgtttgtcaacatggtgatcatggtatcaaccgtcagattcatctgatctttgtaggcatttaaggtattctggctctgctggatagaaccgtttgcctcagacagacttcctgcggaagacttggtcttgccctccagatcactcacatcatctgtggcatttgcaatattagaggataataccgcatttccactgatgaccttgtcgatggtatcctgataatcgatcagattgtcattcaacttctctaacttctcaataaaggcatctacaccgccttcttcctcgatgtcgtcatacatatcattgacatcttcaaagatggtcttggtcatgacctttacaaactcttcgttgatgttgctctgtacggtcgtaacgatggtatccgagatcttattggctaccggattctttttctgattctggtaaaagatcagggtaggttcctctgttgtgtttacgaacatattatacatattgtatgtaaaatctttttgcacaacgagtgctgcatagtatttaccggattccacaccctcaatggcttcatccgcagaatccacgaactgccaatcgaccttatcgttgtctgccaattcatccatgatgtcttcaccggtattcttgaactccccgtcgtcatccgtataaccctgatccaaattgacagccgctaactgtagattaccggtattgccgtatggatcccagttggaatagatattgaaccatgcataaagtgctggtaaaaaacatacaccaatggcgataatcagggcaaacagattttttgccagatttttcacatctgtaaaaaagatttgtttgatcgtcttcatgcctttatccctttcgtatttgtctgattcttgatcaattctattttctgttttcgcgttaattttttgatcgccgcttcccggcgcattgcctcttcctttgtggcatattcctcatggtagaccatttccaccggaagacgcgcttttgtatatttggcacccttgcccgcattatgcgtttgcaggcgtttggccagattggtcgtatagcctgtgtagagtgaatcgtcgctacaccggagtatgtaggtaaaatgctttttatcagtcatgattggcaaacctctctacatctcccaaatgccccagtcggatgctgtttctggaaaccttctttacctgatagagaagttcatctgctgcatgcagatagtcccagaccttgttttcctctacgggaacaccccagcagatgccctgtgaaatggtcagaacctctgctgccttggagtatttatgctctaccgcctgacgcaggatcatctgtttcagatgttctgcccaccgataggtctcttcttctgacatcccggagtatatgaggacaaactcatcccctccatagcgggaacagaaaacttccccctgatgctgcatctgcatgatcatgcgggacaccatcttaagagcctcatctcctgcctgatgtccgtaattatcattatattctttgaaataatcaatatctaagatctcaatgccaagtggtgtctgctgttcgcgtgcacggataaaagcatcttctccgtattcgtttagtttgtagcggttgtagagtcctgtcagaggatctgtctctgacttgcggtggagggcaatattttcctgctccacttcccagttgatctgcgccagattgttgagggaattacgcatgttgatcatgctcgccaccatgacgctgttttctttttccatctcctcagacaactcataataggtcacggccaccttctggaaattgtcctgatcctctatggctttatagtagcgaaccagcagcgtcagcaattttttctccagattgcggatattggtctgcttggtcagttcctcgacaataaaatagcaatccttaaagtcctcataacgcttgccatccaaaagcatacgcatatactcatagagatcgtcgtaaacatccatgatcggcacttcttctttcagatagtcaccgatacgccttatctcacgcaataaggcatcttcctgttctctttcataataaaaacgcgcctgaaaacatgacacaacaagcccatcgacgttttgcagatatggcttgcactctttttcgatcttgtcattgtaacgcgctgccgtcgcaaacatttcctgaccggattcctccttgcccatgcaaagatatgccttggcaatattgagatatgccgccgtcaaatgctctatgtaaccgggcatggtcggattcacgataatatagtgatagccgctctccaggtggtcaagtgccttttgatactcatggatgttcagatacagggaaccgatattcatatgtacgatccattccagattcggcagtccgtatttttcacaataggaaagtgccttcaagtaataatccatggcatagggcgcgttgccgcgatttagggacatgatgcccagcatattgtttgccatcacgacatatccccactccccgatcttttccatggaaggaatacacgcgatcatctgaacataaaagtttctggtgtcattcattaaataataggtctcgcccctggaaaagcaggcaaaacctatcaatgcatcgtcgtgtatcttacgtccgtattcttcaatcttatcgcagttctccataagacgcttagagtctctgccccggtcagactgaatttcttttatccaattttgaacctcttgcatataaagactgatattcatacgcccattataaacctgtcattttgaaaaatctattaccgaatttttcttattgttgcaaaaaatcctgcggatttactgggtttccatcctttcgcaactcaaaatacaggtttgctccttctgctgaataatattttgatggctggctgatatatcctatgcactggcctgctgcaacatactcgcctgttgcaaccggaatctccttcaactgaccatagacagcctcgtaaccatctcccaagtccattgttactgtcgttcccgtttttgcatcatttaaaatggatgttatctttcccgcacaggcgctgacgacttcgtcattgacctctgctccgatgatcagtgccgggttgcactggtattgctgtaatgtcttaaaatacaccgtctgctccatgctgtagtcgatcagcaccttgccatcgaccggccaggtcaattcgtccgggaaatgtaaggtgatcgcggatgtctctgccacctgctcgatcacgctctgctcggctgtctgctgggagtccctctctgcaaggcttgcctcgtaacgctccttttgcagggcttccatatctacagtcgaggtctttggctctaccgtgccggataccgactggctttcttcctctgcaagactttcctgctttgcctcctgccgctgcatgacattcttctgataaaaatacatcagcgtgaatccaaccgtggcaataatcagcataattcccgctatctgataggataaacgatgattttttatatattcactctgtctcttcattccactacctcctactcataggatggctgaaatgaaagattttatacgatcaatgtactttcttttttaaggcttcgctcagacgcgcaaattcttccagggaaagggtttcaccacgcacagaagccggatagcccagttccttgatggtcgcgataatgtcttccttggcgaccggaatggtcggtgcattgttgagtccgtttgccagcgtctttcgtctctggttgaaagatgcgcggatcacacggaacaaaaatccttcatccgtgatctcaaccggcggcttttcgtgacaggtcaggcggatcacagaacttgcgacctttggctgtggtacaaaacaggtcggtggcacgacacagacgacctccggctttgcaaaatactgtactgccaaagaaagcgcaccgtaatccttggtgccaggtcctacctgcatgcgatcggcaacttccttttgtaccataatggtaatggatgccagcggcacatggctctcaaacaagcccataatgatcggcgtcgtaatgtaatatggcagatttgccacgaccttgatcggctttccgctatttttttctccggcaagggatgcaatatccactttgaggatgtcctcatttaaaaccgtcacattgtcgtattcctttaaggtatcgtccaagaccggcaaaagattggtatcgatctcgactgctacgacctctctggcggcttcgcacagatactgggtcatagtaccgatacccggtccgatctctaagacaaaatcatcctttgtgatctcggccgcatcgatgatcttttccagaatatgcgtatcgatcaaaaagttctgcccatattttttttgaaaatggaagccgtgtttttctaagactgccatcgtataggctggatttcctaaatatgccatagtaactcctaatttctattgtaatagaccatacatgtttcttgcattgatctctgtctgcttttctacttcttccggcaaaatgccacggatggctgcaatcttatcgatcacatggcgaatctgcgatgaatcattgcgcttgccacggtttggctccgggcaaagataaggactgtctgtttccaccagaatacgctcaagcggaatctcctttgccgtctcaaccaattttttggcatttttaaaggtaactacaccgccgatcccgatatagtagcccatggcaatgtattcctttgccatttccggcgaataggaataacaatgaatgacacccgggtgcttgatatccgggtgggcttttccgaattcctgcaaaatctccatggtatcttccgctgcatctctggaatgtatgataaaaggtttttctaactctactgccagatccaactgctgacggaaccagtatttttgtgtatctttgcaggcatgtccctccttgcggaaataatcaagcccgatctctccgatggcaagaacccttggatcctgcgccatctgccggaggcggtcaatacaggccgcatccatagactccacctcgtccgggtgcacgccaacggctgcgtaaatataatcataagactgtgccaatgcgacgctggatgcagaagatttcatatctgctcccacattgacaacgatacctacatttttggatgggagaactctcaataaatcctcccgatccacatcaaattgtctgtcatcataatgtgcatgactttcaaatatcatctttttctctcttcatttaacgtaatcttatagacacttgcagggtcagaccaatccgacctgaccctgaagttatgattatagtgtttgattaacagatctctgcgcctgccggcatttctttttccggtgtcatgagtgacagattgccctctgcgtcctctgcacaaagcaacattccctcggaaagtacacctgccaacttggctggctttaagttcacgagaaccatgaccttctttccgaccatctcctcggcactgtagtatttcttgatgccggacacgatctgcttggtctgactgccaatgcgaacctgtgagcaaagcaacttcttagactttggcacttcctcacacttgatgatctcgcctacctgaaactgcatcttggtaaaatcgtcaaaaccgatctcatcctttggctcaatatcaatcacatctgcatcttcttccggctcctcctgcggtgctgcaaccggcggatggagttcagcaacctttgtcatgacctcgcccagatccaatcttgcaaaaaggatctccggtgcatctgtcaccttggttccgctgacatagtgaccaaaggtggaaagttcctcgtatgggacttcttctgcatttaactgtgtcaggatacggtcggttgtctccggcatgaaactcttaagcagggtagcaccgatggaaatactctctaccaaattgtaaagaacggttgccagacgatcctgcttggtctcatccttggcaagtgcccatggcattgtctcatcaatatacttgttgcagcgcttgaagagtgcgaaaacttctgtgatggcatctgccacacgaagatcttccatcttggcttccacgcgggaaacggtagaagtaacaactgccttgagttcatcatctaccggctcatttacacctttgtcacaaacaaggccgtcaaaatatttattgctcatggaaatggtacggtttaccaggtttccaagtgtatttgcaaggtcagagttcatacgctcaaccagaagttcccatgagataataccgtcattgtcatatggcatctcatgcaggacaaagtaacgtacggcatccacgccaaataagtctacaagttcatcggcataaagcacatttcctttggacttgctcatcttgccatcgctctggatcagccacggatgaccaaatacctgctttggaagcggcaggtcaagtgccatcaaaaagatcggccaataaatggtatggaaacggatgatatctttaccgatcagatgcaggtctgccggccagttctttttgaaaaggtcagaagaattgccgtcgcagtcataaccgataccggtgatatagttggtaagggcatctaaccatacataggtaacatgctttggatcaaaatctaccggaataccccaactaaaggatgtacgggatacgcaaagatcctgcagtcccggcaagaggaagttgttcatcatctcattcttgcgggataccggctgaataaactccggatgtgtattgatatgctcgatcagacgatcggcatacttgctcatcttgaagaaataggcttcttcctttgccggctgtaccggtctgccacagtccggacagcagccattctcatccaactgcgattctgtccagaaagactcacatggggtacaatacaagccttcataggcacccttgtaaatatcgccctgatcgtataactttttgaagatcttctttacctgcttctcgtgatcctcatccgtagtacggatgaacttgtcataagaagtattcatcagatcccagatacgcttgatctctgtagatacattgtctacaaattcctttggtgtgataccggcttcctttgcctttaactcgatcttctgtccgtgttcatctgatcctgtctggaaaaatacatcatatccttcctgtcttttaaaacgagcaatactgtccgccaggatgatctcataggtattgccgatatgcggcttgcctgaggtatatgcaatggcggtagtaatgtaatactttcctttgtttgacattttaacttctaactcctactcttcatcttcttcaacgacttcgccggaaacagtctctacagtctcctcagcgacttcgtctgtcttttcttcggttacgacctcatcttcatcctcgaaaatgtcctcgtccatctttgcgccacacttgctacagaaagcagcgctaccacttacaacagcgccacacttcgggcatgccttaccgcccttggtgtatgcgatctgctccttgatctcctcgatccgcttctgtgctgctactacttcctcaaaaagtgaggtatatgcctctggtgcggcatctttattctcctgatagaagatcttaccgatctcctgatactgcttgttcaaaaaatcttcctttgaacgcatctcatactgtaactttgcaacatccgtcatgccctttgccttttcgccgacttcctgtgttgcacttacgatagaatcacctaatttgctgaaaaaatccatttgtttttcctcctttagataaatttgtcaaagtcatactgatatattctgtcattataacattattatggcgcgcttttcaacgtattatcgcagactgtcaagaattgagtgcccgatcgtatgttccggcattgcaagggaaaaattgtctgcgatcgtcgcgccgatcaccgcaaaggtatcttcttccggtaaaggtccgctgcctttgtgtttcttggaatacgcaagaaacggcaccttttctctggtatgatccgtcccggtataggtcggatcatttccgtggtctgccgtgatgatcaaaagatcgtcctcccggagtaccgggagcagttgacccaacttgacatcaaaccgctcgatctcctgcccataaccaatcggattgcgcctgtgcccccaaagagcatcaaaatccaccagattgacaaagcatagcccgcaaaaatcacgctttgcgatctcgatggtctgctccataccatgcacactgctcttggaccggttactttccgtaataccctgaccgacaaaaatatcattgatcttgccaacggagatcacatcaaatcccgcgtcttttagactgttcaaaacggtctttcctgtaggttccaaggcataatcatgccggttgctggtacggacaaattgaccctttttctttccaacataaggtcttgcgatcacacgtccaacccgccactcgtctttcatggtaagttctcttgcaatctcgcagtagtggtagagattttccagtcccatggtctcctcattgccacagatctgcaatacggaatccgcagatgtgtatacgatcaggtggcctttttcgatctcttcctcacccagttcgtccagaatttccgtaccacttgccgccttgttgccaatgatatggcgaccggtacgctcctccaactccttgatgagttccggcggaaaaccatgttctgtaaaggtaatgaaaggttttgttgtctcaatccccatcatttcccaatgtccggtcatggtgtccttgccattgcttttttcacgcaggggcgcatagtaggcaagagggctttctaccggatctactttatccatcgcttttagatttgccatgccaagccgccggagattgggtatggtaaaggaatccatcttctctgcaatgtgtcctaaagtatccacaccaaaatcaccgaatttgtcggaatccggcatggcgccaatgccaagtgaatccataacaatgagaaaaacacgtttgtaacgatacattacaattccttctttcttcctgatctactctaatatctttagcatttacaatacttctaatcctgtcttgtcatcccggattaagatttgaagggcatccacggctgtctcaatcgccagttccgtatcatgtacctgtgcattggaaagtcccaacttggcacgctcctgatttgccacaaccaaaaagcaggatcccacgcgcacccgcagaaaactgcctgcaataaagagtgccgcagattccatctcggatgccagacagcccatccgaagccatgcctgccacttattctccagttcataggataccggcatgacctccggctcatgctgtccgaagaaagaatccttacactggacaacaccggcgtgatatgtgatttctttctcttttgctgcctgtatcaaggcatgcatgacatcgacatccgctactgccggatactcgatcggtgcatattcccggctagtcccttccatacggacagcaccgctggcgatcactatgtcacctccacatacatcctgctgcatgccaccgcaagtacccacacggataaaggtatgcgcacctgcctttgacaattcctcaagggcgatggctgccgacggtccaccgatcccggttgaagtcacactgactttttccccatccagcatccctgtgtatgtaacaaactctctactatctgccaccaaatgcgcatccgtaaaatgttcagcgatcttggcacagcgcttgggatctcccggcaggatcacatattttccaatgtcttccggtccgattccggtatgatactgtttgccagacccttctgtgtaatcaaccatacgttacctcctttttagggacgttccttttgccatatggagtgtcccctttggctcatcttataaattatccggtccaaaactttccggtaaaagttgacctaatgtcatcgtccggtaagagatctctccctccggcgtctgctttcccagatagatcaaaaattcgtccttgcaaaattcccgcatgacctgacgacagacaccacacggcggacagatctgcgcacaagtcatgtctgccctgccgcccacaatggcaatggctgaaaattcgtgctcgccctggctgactgccttaaaaaacgctgtccgctcagcacaatttgtcggtgtgtatgccgcgttttcaatattgcatcctgtgtagatcctgccagtttttcccaaaagtgatgcaccgacagcaaagtgggaatagggcgtatatgcattttttcttgcctcgatggcttgctctatcaaacttatgatctctgtattttccatagtcttattatatcccataataacttatttttaaacaggatatcctcttttgcaataaacatgattataatgatagaaagcaaaatagcc

SEQ ID NO: 12519 - DNA, 4280 bp, Unknown
  gut microbiota DNA sequence
accgagttttcccaaagtataatgataaaaggcaccattacgcggtccaaacataccggtcgtcggttcttcttcgccctgcggcataacctgaccaccgatatcgtcaatgcctgccatatcctgtccgtaaagtccacggaaataatgtcccaaaccgcttccggtgcaggcatgagtatcatcatcctcgatggaatgaccgatatacatgacgcccttttcccggcaccagccgccgatctgctccgaaaaatcctttttcaccaaattagataccgcatccatataagttcttctcacctgtgccgtaagaagcggatctccatcatttttccaaagaagcggtaaattcttgcgatagtctacgcccaaggttttttgcaggcgttcctccaattccttactccaaggcagatcctgctcggttcccagcacattgtgctttgcatacaaaataccatttcccagttccggctcatccgagaaaaatcccgcgatcgtattgccaaaaagatctccataatgtgcaaagtgcggttcgtaaactgcctcgatcaacttatgacagctgacctcattcatcatattgatataagcacgatgtggtcctaagtttcgcgacagaccacagactgccacctgccaggtgcctgccggctttttccatgtggtactgccggaaagatcgatctcctcaccctttggtccataggcggtaatgctatagacctgatcgtcatcatactttctggcatccttggtagagcctgacatcatcatcttctggataaagttcagtttatattttggtggctttgccagtttctctgtacggaagaccacctctctggcatccccttcataggaaaggaatttacagaaaatgctctgtcggcacacttcctgcggtgcatcctttaaggcaccgttagcaaaacctgtcgggaaatgactgtcatctagtatccagactttcattcccaatttttttgcctcatctaaaatgacatccatatcctgccaccactttggtccacagaaatccgggtgcggacggctttccacgcaaaatgccatacagtttgcatcatggatggcgtttacatattcccgtaaggtggcttcatcttccccatgctgccagaaaaatgggagcatatggttggtgacttgtcctgtgagtaactgttctactacttttcccatacttgatcttctccttttgttcttcgcttatcttacctgtattatacttactttttccaacaaataaaatctcatttttacgtctttctttacatctctgccaaattttccaacacgattcaggcatccaagcaggatcgttttgccccggtcggcaaacaccggcaagacctttaagcagacatccagacagaaaaactctcccgggcagcatcccttctgatcaatacagacctgcccgtcgaacaggtcgcccgtgagtgcggctatcagaatatcagtttcttctatgaaaaatttgaagcctgctatcatatgcgcccgggtgtctaccgcatacaaaatggaccggatgcttgatcgtttttgccgtcatctcatacagattacggttgaataagatcatgtcaatacccgccatgatcgtctttgccaaagcctcgcgtcttggcatcttttgcatatatccgaccatcagggtggagtctgtcacggcaagtccgtggaagcccaattcctttcgcagcacatctgtgatcagaaccttggactggcttgccggtaaaaacgcttcttcccaactgatatccggcagatgctgatctctttcatcacagccgtcgcccggaaaatgcttgatagatactgccacattttcttcttttgcagcctttaagtaattggatgccatggcaatgacatcatcacgcttgctggaaaaagcgcggatgtttgtgattggattgcgataactgttatcaatatctacgataggagcaaatgcccagttgacgccgacacctgcaccctcgctacaggagatcttgcccaggcgatagccggattcataatctccggtcgccgtacagcccataggcatgccatacttggtgccctgtaaaacagcgccgtcaccaccccactctaagtttgcggcgatgagcattggcaccttgctggcattctgcaaagcacggatcgcctctgctgccttctgctgatccatcggtcggatcataagtgcgcccaatttccgttttacggcaaattcttcaatttgcttttttccgatcatctgtacgcccgggcagatcatctgtcccagtttttcgtccagtgacatatcctttaaggtattttctacccaatctatctgcctatcgttcaggcaaaatggtttttcttttaactcgtctctttgcatctttcttctcctatcattacttgagattttcctattgatagcatagacgaattgccttttgatttattgcaaaattattgtgtttattattattttattgtttatttaactcagaaagaatgtaccttttatacaaaaacggatgccgttcttggcatccgtcctttcatcgcaggagcatcctataagcttcccaatatgtaattgataaactgctgggcagttcttccagagataccaccatggctgagttcccacttatttgcctctgcacgcagtgtctcgtcactcatctgctcctcggtcacaccattctttcttgccaattccacaacgatatggaagtactctttctggctcggcttggagtaattgatcgtaacaccaaagcggttgaccagagacagtttttcttccatggtatcggagtgatgcataccgctctgtgtctgcacatcattccggtcattccaggtttccttaatgaggtgtctgcggttggatgtggcatagatcaggatattgtccggtcttgtctccacaccgccctcgataacagcctttaagaatttatactcgatctcaaattcctcaaaggaaagatcatccatatagatgataaatttgtaattgcgattcttgatgctggcaatgacattggacagatctttgaactgatgcttgtagatctcgatcatgcgcaagccatccgggtaaaattcgttgacgatcgccttgatgctcgtcgactttccggtaccactatcaccaaagagcaggacattgttggcggctctgccttccacgaacgccttggtattgtcgaccaatttctttttctggatctcataaccgatcagatcatccagcataactttatccatgttgttgatggcgacaaactcaacatcgcctccatccttttccttgatacggaaggccttattcagtccaaacatgccaacaccatagtctttataaaatccggtcacggcagcaaagaaagcgtccacatcctctgcggcttccaactgggcagaaagtgcaatgatcttttcgctcacatttttattatacatgagttcctttttctggatggcatgataatcggataactgcgaaaaacagtcaatgccaaggtctgcctcaatttttgaaaaatcataatcaaagagattcttaatcacagtaaaatcgttctttgcaaagtgattcacactgccatcgttggctcccaccttttcacaagtgatggaaaatgggttttcattggtcaccagataaaatgccagataattgtgccaaaggttatggtcaaatccataatctgtcgcaaccaccagaagtctcttgacctgcgtgtaaatgtcctggatcaactgcgcctgatcctttgtcttattttcatagtgacggaagatctcaccgaactggtataaaatacagtccttatccatgtcaccatacatgattaactttgaaatttcgcgatacatcttttcttcctcttttcttcttctcttgctagttttgctgaaacctctatccctaacttgttctcaagcgccatattacacgtatatctttagtattctaccacagacagatttggaaaccaactctttgacaccaaaagtatgacataatcaaggagccgcctgctggcgactccctgtgttttaaatcatagttttcctattaggaatatattttttcaatacatttattcactgattgatggagtgcatcaatcttattcttatcattaactggatccaatgacattatttttttcactgttttgtcaacgaatcttctatcatctctcgaaggggctaaataaggtaattgctttacataatttgat

SEQ ID NO: 12520 - DNA, 26419 bp, Unknown
  gut microbiota DNA sequence
gttcaagatttttcatcaatgatacttatactggaaaatttgctctgcatgtgttagacttgacacaaatagataaggcaactgcagaagataaacactacgccattgacaaatgggctaccctgtttaaagcaacgacttgggaggaacttcatatgattacaaagaatgacaaagccatgaccgaagccagcaaaaccctctacgagatgaatgctgatcagaccatccgcgatatgtgctacttccgggaacacgctatcattgaggagaattaccggaatgatttgataaagaagcaacaagcagaactcccatgtccgatgcatttcctctctcattccacatgatagatgtttattcggttatttattatagccctttacccatcttttgtctatgttttttcgctattggcgaattatcattccttttagtttgttcctatttataaatacagccaatatgataaaagtgccttatagggaacgctaaatctattttcgtttcctaacatctatgaaatttattcatggggagttgagtaatcttaggtaaagggggaatgacctgtgaattacatgacatctgccacagaaatcggacagcgtatgcgatcctgtagaaagtccattggactgacacaggccgagattgcagaaaagatggatctctccatcaattatgtttccgatttggaaaacggaaagaagaatatgtcaatactgacgatggcaagtctttgcaaatgctttgacaagtccgcagattattttttgtatggcacggaatacaaaaatgccggcatagatatggaaaaagtaatcgaattcgtctcgacactttccaatcagcagttagatcatttacagacctatgtaaattcattgatccaattgaaaagtgaggcataaaaaagaggtcaggatgtttttcatcctgacctctttatactttacaaatgtcttattttgattctttttctacagcatcttccggcttttctactgctgaaatagcagccttctgcattgggatacggcagttcttgttgctgccgaactcaacgatcacagtatcctctgcgatgtcgatgacaacaccataaaaaccacttgtggtaagaacggtatctcctacagcaagggatgacatcatagcatttttctgcttggtctccttctgctgtggacggatcataaagaaatacataaatgcaaataagattacgatccagatgattggcatcaaagcattaccgcctgctgatgaactcattaaaatattcatgataaaaattcctcctaatcatgagactttatgcctcaaactctatttattgtactaaatccctatacatttcgcaaggttttgtccataatttcccatcagtttataaaactttaatatttattctccggcttccatgccctctaatttgcgcttcttgtaaccggcgaaatctccggcatccaaagcatccctgatctcttccatcatgtgattgtagaaatacaggttatgcagcacgcaaaggcgcatgcccagcatttcttttgctttcaacagatgacggatataggcacgggagtaggtacggcatgccggacagccacagccttcttcgatcggtcgcatgtccttttcatacttttgattaaagaggtttaattttccatgatcggtatagacatgaccatgtcttccgtttctgctaggataaacacagtcaaagaaatcaatgcctcgctctaccccctctaggatattcgccggagttccgactcccatcagatatgtcggcttatcctgcggcagatatggaacggtctcctctaagatatgatacatctcctcgtggctctcgcctacagcaagtccaccaacggcataaccatccaagtccatctcagcgatacgtttagcatgctcaatacggatatcctcataaatcgccccctgattgataccaaaaagcaactggttcttattgatggtatcttccagaccattcagccttgccatctctgtcttgcatctggcaagccagcgcgtggtacgattgacagagtcggtcacatacttacggtctgccttactgcttgggcactcatcaaatgccatggcgatggtcgatcccagattggactggatctgcatactttcttccggtcccataaagatcttatgcccgtcaatatgtgactggaagtaaacaccttcttccttgatcttgcgcagccctctgagggagaacacctgaaatccaccggaatcggtaaggatcggacgatcccataccataaacttatgcagaccgcccagttccttgattgtcttatcgcccgttctcacatgcagatgataggtattggacaactgcacctgtgtaccgatatcatgcagatcatcggtggatacagcccctttgatcgcagccaccgttcctacattcataaaaaccggtgtctgaatcgttccatgtacggtctccatgaccgctctttttgctcttccttctgtttttaaaactttgtacattttcctgttctttctatatataataacaattattttttctgataaaaatcaacgatacgatccatgcgcgcactcatatttgaaaaaagtgcatcgacaagtgtgatcgctgccatactctccacaaccaccactgcccggggtacgatgacaggatcatgtctgccatgaatctcaattgtctgctcctcgccatgcacattcacggtcttttgtggctggctgatcgatggtgtcggtttgactgccacacgaaagataatctcatcgccatcgctcatgccaccgagcacgccgcctgcatgattggtctcctttttaacagtcccatcctgcatacaaaaagcatcgttattgacagatccattgtttgctgcaaccgcaaaaccatctccgatctcaaagccttttaccgctccgatggatagcattgccttcgccaaagaggcatctaacttatcaaaaacaggctcaccaacgcctgccggcatccccttgacccgacactcaatcacaccgcctgctgaatcctgtctactgatgcaatcctccagataagcctgcgctttctttgcagcctcagcatccggcatggcaagtggatttttcctgatctcatctgcatcaaaagaagcgatagcaaccggtccgattgcctttgtatatgcgcacatctcaacgccaagttcctctaaaatctgtatggcgatcgcccctgccgcgaccctgccaatcgtctctctgccgctggatctgccgccgccgcgataatctcggattccatatttttcataaaaagtgtaatccgcatgccccggtctgaagatctccgcaatattggaataatccttggaatgttggtctgcattccttaccatcatagagatcggcgttcctgttgtctttccctcaaaaacaccggataagatctcaatggcatctgcttcctttcgcgccgtcgtaaacttggactgtcccggttttcttctgtccataaattcctgtattctgtttgtatccagcctcagtcctgccggaacgccatccacgacaacgccaagtgccgcgccatgggattccccccaggtgctgatgcgaaatgcttcaccaaaacttgatccagccatacgcttttatctcctatcaatgccagattatcccatgaaaagcgaactctccacaggataaccagacgaaaactatactaatttgtgtaccactatactattcggcttatctaccttaacgggtggatttttcatcaaaacacatttcttttcatgatctacggtaaaggtacggatctcattggaatcatggttcaaagagaccagtgtcttattgtccggcaaaatagtgatgcacttcggataatccccgctgatcttggtcgtttcctcaatggaaatcagaccatcctcacctacggcaaggcagaccacctcgttggctccatccaaagatacatacagatacttaccatccggtgcaaactcaagcgcagaaccggatgccagtgaatcctctttttccagaacggaggtcgtcttgatcttttcaaataccggtttgccttcacgcaagtcataggtatatatatcaaccatattcgttgtctcttccaatacataggcaaacttgccatccttggaaaaacggatacgacgcggtgcactattgaatgggaaacgcaaaatatcatataaatgcagtttgccctcttcataatcaacctcatagatcttgatctggttgagtccccaatctactgcacaaagatacttctcatccggtgtcaatttggtgcaggacactctcggatccatacgcttttctactgaacttttaccgacgccctgatgaaagacaccatctgcgataccggcaatgcttccatcctcattcaggcgcatcatggtcaccttgccatcatgaaatcccgccaaaaacagatagcggtcatcggaatcgatttctacatagcaggcacgcatgccaccgatccatgcctgattgatcttggtcagatccccattttcatcaatagaaaaggaagcaacaccctcatcctcaatggaatacagatatttgccgctgtgtgcaacggcaatattggatggattactgatcggtgcgacactgcgctctgtcagttttcccttttccatgtcaatgtcatacacatgaataccaatactattctcatgcgtataagttcctacatatgctacatacttctcctgtgccataatccttagtcctcctcttttctccttaagatgtcaaactgatctaacggctgtcctaagtcaatccataatttttgttttggatgcggtgcgctcggcatatcttccccatcctcatttacaatacgtcttacgactacttctatattatcgccatttggcttcataatttcaatagtctctcctacagaaaacttgttgcgctgctcgatcgcatacaagccctcggcattacattccccaacaatgccaagataagtatattccttaatgtaggtgttgctatcatagatctgtgcctcctcagaaggctttccaaagaaaaatcctgtggtaaactggcggtaagtacaatttgaaatctgctcctgataccatggcatattggcatggtatttttcctcggattccagataatcgtcgatcgccttgcgataggttctcgcaaccgtcgccacataaagggctgtcttcatacgaccttcgatcttaaaactgtcgatccccgcatcgatcagttccgggatatgctcgatcatgcaaagatctttggaattaaagatataagttcctctctcattctcatagaccggcagatactcgcccggccgctgttcctctaccaccgcgtatttccagcggcaaggatgggtacaggcaccacggttggcatctcgtccggtaaaataattgctgagcaggcatctgccggaataggaaatgcacatagccccatggataaaagtctcgatctccagatcatccgggatattctgacgaatttccttgatctccttcaaagataactccctcgctgataccacacgggtagcgccaagtccatgccagaaattgtaagtgccataattggtattgttcgcctgcgtgctgatatggacatcaatctccgggcagacctcgcgcgcgatcgtaaagaccgccggatccgcaatgatgagtgcatccggttttaattcctttaattcttcaaagtagcggcgcacgccgggcagatctccgttatgtgccaggatgttggctgtcacataaaccttaaccccatgcgcatgagcaaaagcgatgccctctgccatgtcatcttttgaaaaattcttggctttggcgcgcagcccgtagacctcgccaccgatatataccgcgtccgcgccaaagatcacggctacttttaatacttccagactgctggctggcaccagcaactcaatgtttctcatgtatgactccaattttaaaattctattctatcccactcgttcttatttcatggtacagacggcaagtccgtcaccgaccggcaggatactgcataccagatcctcgtcatgtgtcaggctgtaaagatattcccgcatccgcttatggatggtgcggttgcgccgttcgatcgcatagtgggactcgatcagatctccgtcctgcaaaacattgtccgtcaccagaacactgccggaatgcatcagcctcttgatttccggcaaaaaaatgggatactgtcccttggctgcatccataaagataaaatcataggaacctgtcagggtcggcagaacttcctgcgcatccccctcgatcagatggatacacgcctctttttttgcccgcgcaaaattcgcccgcgcgatcggtatccgcggcaaataattctcgatcgtcgtgatctggcaatcggcaggatcatatgcctccatcaaaagcgcagaaaacccgactgccgtaccgacttctaggatctgctcaggacgcagggtctgcattaagaacttcataaaagtctgcgtatctttgcggatgataggcacataggtttccaatgcctctttttctattgcagcaatataatcaatctcctgaccttctaaggatcttagataggtcaggaaacgttcatctactatcatcttacacttccataatgatcggcatgatcatcggacgtctctgtgtctctttccatacgaaatctcccagagaatccttgatctcgctcttgatctttgtccagtctgtcacattcttatcttgcaggcgatccatggtctcattcaatacggctcttgcgctgtccatgagatcttctgcgccacgcacatagacaaatccacgggacacgatatccggtcctgccagaacacgtccgctgccggactctaaggtaagcactacgataatgataccatcctctgctaaatgctggcggtcacgcaatacgatattgccgacatcaccaacgccgagtccatcgaccatgatcgcacctgtgtgcacatgacctgccacctttgcactgttttcatccagttccagaacatcgccggaagataagataaagatattgtccttatccatgccaagattttctgcgatctttgcctgtgcgatcagatgcttgtactctccgtgtaccgggatcgcatacttcggatgtaccagagaatagatcagtttgatctcttcttcgcaggcatgtccggaaacatgcacatcctggaagatcacgttggctccctttttgcagagttcattgatgacattggtcaccgccttttcatttcccgggatcggatgggaactgaaaatgatggtatcgtttggcttgatggataccttgcggtgggtgccatttgccatacgtgacaaagctgccatagactcgccctggctgccggtcgtgatcagtaccgtcttttcatccgggtaattctttaacatctcaatatcgaccaaagtgttgtccggcaccttcagataaccgagttctgatgccgtggcaatgatattgaccatactgcgtccttccaccactacctttcggtcaaacttgtgggcaatattgatgatctgctgcacacggtctacattggacgcaaacgtcgcgatgatgatgcgggaatttgtgtgttccgcaaaaagcgcctcaatcgtctttcctacagtacgctctgactgggtaaagcccttgcgctctgcattggtactatcacacatgagtgccagaactccctttttgccaagttctccgaaacgctgcaagtcgatcgcatcaccataaaccggtgtgtaatccactttaaagtcaccggtgtgtaccacaatacctgccggtgagtagatagcaagtgccgctgcatcctggatactatggttggtacggataaactctacacggaaatctcccagattgatatgctgtccgtactttacgaccttgcgttttacttttgtcaaaagattgtgctcttttaacttgttctcaatcagaccattggtcagtttggttgcgtagatcggcacattgagttccttcataacataaggaatagcaccgatatgatcctcgtgaccatgggtgataaagaaacctttgaccttgtcctcgttctctttcaggtaagaaatgtcagggataaccaagtcgattcccagcatgtcatcctctgggaatgcaagtccgcaatccacgacaataatgctttcgccatattcgaaagcagtgatgttcattccaatctgttccagtccgcccaatggaatgatctttaatttccctgtattctgttgttgttttttgttcaaaatatacctcctgttgttttgttttctttacatctcaaagtcagtatcttccaccaactcttgaaaaatctttacgaccgcttcaaactccacatcgtcctctaccacttcataagtggagtctgtgtcatctgctgcaacttcttttaaaataaaagcgtctgtatctccctgactgtcctcggtcaccagtaaatacttttgctgatttaaagtcgtctcctctaacacataaacagtaatctcctctgctgtatccggggcaactaatgtaatgctttccatatgatcttccttccacttatacctgtagcgagtccaaatagccctgcaagatcaccatggctgcgatctcgtctacatattctttccgatgttctctgcggatgcctgtctccatcatcgtcttgtccgcggtgacggtcgacaatctttcgtcccataggataacctcaaggtgtgtgcggttctccagcatctccttgaaagcgagcgtctcttcacaacgctttccctctgtgccattcatattcttggggtatcccaacacgatcttatctgcctgataagatgcaattagctcatcaatccttgccaaggtcttacgaagtttactcggtttttcccttcgaatgatctcaagaccctgggcagtcaaaagtaaagggtcactgatagcgacccctaccgtttttgttccataatctaatccaagtactctactcaatctaacgcctaccgcttcctaatgttcccatgcttttcctgcgatgtactccttgagaagctcctctacgagttcgtcgcgttctacctgcataatgagactacgcgcattcttatgactggtgatgaaagtcggatcgccggacataatataacctacgatctggttgaccggattgtatcccttttcatccaatgcttcatagacaatacgaaggatctccttaacggaagtcggtgtctccttttcaactctgaaatactgtgtgttacttaaattctgcataataaatccgcacctatctgctcttttgttatcaagctaattaactatattttagtatattgtaacaaatttgtaaagaactctgcgtctttcccttgtattattcccgcaaaagataaatattctccgcgatctgctcgcctaaaataccttttttgatctggttggaaagatcctcatttgtcggataagccacgcggatgtattctctcgtatatcctgtataataggatctgccatcccactcccatggggtctcgaacaggacttctacctcccgccccacataggactggcggtaagcatgtgacatggcatcttccaaagtcagcaggatgtcactgcgcctggtcttgatcttctcatccacctgatccggcatgactgccgcctttgtgcctttgcgtttggaatatttgaaaatatgcatttcataaaagccaatatggtctacatattcttttgtggtctcaaattcttcttctgtctcgcccggaaatcccacgatcacatcggtcgtgatcgccggcgcatcaaaatacttgcgaagcatgacacatcctgcctcatactctgccgccgtatatttgcggttcatgcgctttaaggtcgcatcgcatccactctgtaaagaaagatgaaaatgcgggcagatcttgtccacctttgccaggcgggacgcaaatgcttccgtgatgatctgcggctccaaagaacccagacggatgcgatcaatgccctgcacttttgcaactgcttcaatcaattccaataagtgattgtgctcaaatccactgttataattttctatcagaccataggaactcagatggatcccggtcagaaccacttcgcggtagccgctttttgcaagcccttccacttcctttaccacgtcctcgatcgctcggctacgcacacgtcctctggcataagggatgatgcaataagaacagaactgattgcagccatcctgcaccttgatgaaggctctggtatgttcggcagtcttattgaccagaaaatactcataatcctgcccatcctgattgatgtccacgcagtcgacgaccttttcttccaccgctccggcatctgccgatttctcggcgccccctgcaagactggttgggtttttggcttcaaattctgcgatgcgctccaccagatgatttttctggttgttgccgatgacgatatccactgccagatctgccaagacttcttctgtgcttgtctgcacatagcagcctgccgccacgacaatagcgtggggatttttcttttttgcccggtggatcatctggcgtgacttgcgatctgccatattcgttaccgaacaggtattgatcacatacacatctgccacatctgtaaaggctacgatctcatatccggcatgctccaataactcctgcatcgcgtccgtctcatatgcatttaccttgcaccccaaattgtgaagcgcggctctttttcttgttgtcattgtccttttccctgctaagatcacccgttccttttgtgcatgtttttcattgacttttcccatgcaatgaattacgataagcgtataaaatcaatacattgaaggaggcatatgacatgcaaaaagttgtgatttctttaaattcaattgataaagttaaatctttcgtaaatacgatcagccagtatgatttcgatttcgacctcatctccggcagatacgtgatcgatgccaagtctatcatgggtatcttcagtttagacctctctaagccgatcgatcttaccatccataccgatgaagacacgacagaagttatggcagcacttgagccatacatcatcaaataattcatttgactacttttaaaagcatcctgcatatagcaggatgcttttttctatgcttctacatggatcgtctcgacggtactgattgcctgatccatcagatcgtcgatcacatccgccagtttctcctctgactttttgatcacattcacattcggctttgtcaccggatgctttgccacaaagatcgtacagcaatcttcatacggcaggatggatgtctcataagtaccgatcttctcggacacctctacgatctcctgcttgtcaaatccgatcagcggacgatataccggcatggtacacacttcgttggtcgccatcaaagactgcatggtctgggatgccacctgtccgatactctcgcctgtgatcaatcctaaacagccatcttcttttgcaaaatgttctgcgatcttcatcatgtatctgcgcataatgatcgtcaattcctcatgcgggcatttttcatagatagccaactggatatctgtgaagttgaccacatgcagatcgatcggacccgtataggctgaaatctcctttgccagatcaacgaccttttgctttgcacgctcggaagtgtaaggcggtgcatggaaataagtcgcatcaatggcaacaccacgtttggagatcatatagcctgcaaccggactgtcgataccaccggataaaaggagcattgcctttccgcctgtgccgaccggcataccgcccggtcccgggatctcctcggaataaaaactgatctgctcacggatttccacataaagcatcacattcggatcgtgcacatccacgctcatatccgggaacgcatccagaatcttttcgcccaaggctgcattgagttccatggaatccatcggataattctttctggcacgacgtgcctttaccttaaaggtcatgtgcttatccgggtagatctgatccatataggaaacaacctgttctgccaatttatcaaagccctcgtcctcgaccatgacagccggacagatgcctgtgataccaaacacatggctgagtgcttctatggtctcctcataatcatagtcaccttcggtttccacaaacacacgtccctgctgcttgtgcacatgaaaagtgccatccacactgcgcagagcataacagatctggcgcaccagtgcatcctcaaaaagatggcggttcttgcccttgataccgatctctgcatatttgatcaaaaatgccttatacataattttctcctttttaacttcttctgtattttgccagcattggaaccagttctgccatagcctccaacgcataatcaatttcttcctttgtcgtgtgtacggaaaaactgaaccgtaccgtagactccaacaactcgcgtttcaatccgatcgactgcaaagtcctgctgaccgccggcttgttggaagaacatgcgcttccggcagagacatagatttctctgtcctcaagggcatgcaggagcacttcactgcgcacaccggatacgctgacactgacgatatgcggtgcgttactgtgatccttgtgaccattgacactgacgccgtcaatcttttctacttctgcgataaaataatcacgcagacgatacatttgcatgatcttggcatcaaaattctgatagatctccatggctgcctgccccagacctgcgattgccggtacattttccgtaccggaacggagtcctctctcctgaccaccgccaaggatcaatggatgcaccttgaccttatctcttacaaataaaaatccgctgccctttggtccgtggatcttgtgcccgctgacggataaaagatcgattcccatgcgcttcggataaatgcggaatttgccataagactggatggcatccacatgaaagagacagtttggattggtctgcttgatcagccgcgccgcttcctccaccggctgtacggctccgatctcattatttacatgcatgatggataccagaatggtatcgctacacatggcatcttttagatcctgtaaggaaatacagccataagcatccacaggcagataagtaacggcaaatccctgctcttccaaataggcaaaaggatttgccaccgaaggatgctcgatcgccgtcgtgatcacatgcatgccggatcttttattggcaagcgcacttcccacgatcgccagattattactctcgctccccccggaggtaaaataaatttctttttcatttaccttgagtgtctgcgcgatccgttttcttgcttcttttacatagttttcggcttccataccgcggttatgcagagaggatggattgccgtaatccacccggagcaggcgcatcatcagatctgctgcttcctgtgagcactgcgtggtcgctgagttgtctaaatatgcttccatcttttttcctattctatcattctattactcttagtttattcatatacctaccagaatccacaggcattttattgcatttctgtcgcaagcatgaccatggacatggtcgtgatcgccgctgtgtcggtgcgcaggatcctgcttcccaaagagacgacctgcatgcaatcttttactgcatcgatctcttcttttgcaaatccaccttccggtccgatcatgatgctgatcgtctttgcatcccggatctttgtcagagcatcttttgtcgcctccatgcccttagcacattcataaggcaccagacatagatcacactcttttgcgtaagccatggcatcacggtaagtcatgaaatcatgtacgaccgggatgcggctgcgtttggactgctttgccgcagattctgcgatcgcctgataacgtttgaggcgcgcagcctttttcttggcatccagttttaccacacaatatttcatctccaccgggatgatctcataaacaccaagttccaccgccttttcgatcaccgtttccatgcggtcaccctttggcactgcctgaaaaagataaatacgtttttctaattcggtagatgccacttcttccaagacccgaagcgtgacctgtcctttgtccgccgactctatctgacacagataattgtcgccctcatgcgtgctgacacgaagctgctctccctggcgcatacggagcacctgtagcaaatgtctggcatcctcgccctctaccataaatgtatcatcgatcttgaccgactgatccacaaaaatctgttgcatcctaactccttattctcataacatcggctctatttacaagccgtgatgttgcgccattctccctgcgcattgctttctaccacctgtagtcctgccgcaatcagcgcatccgctacttcctgctccttgaaatcaataataccggaagtgatcagttttgcccccggcttcacgctggctgccagtgccggagccatcgggataatgatgtctgccaaaatattggctaccacgacatcatacttttcctttcccaccttatcctgcaatgcctcatcatcaatgagatttcctacataaaaatcgcccagagacttgtctaagtgattgactgcaaaattatcataagaggatgcaatgcaatcctcatcaatatctgtgcctaccacatgctgtgcgccgagttttaatgccacgatagaaaggataccactgccacatcctacatcaaggacttgatcgccttcttgcaggtatttttgtaactggcgaatcaccagttgggtactctcgtgctttcccgtaccaaaggatacgcccggatcgatctccacaagtgtcatgtccgatttgtcctccggcatgtcttcccaggtaggtttaataaaaatattgccgatggaaaaagaagaaaaataggctttccagttgtcacgccaatccgcctcgtctgagatttcagtcgtgatcgtaccctcgccgatctgggcatacgttgacatatcgtccaaagcctgtcttactttttccaagatctcggatgcgtctgtctcatcttcttccagataaaaactaatgcgtgaagatccatcgtcctccggcagatccggttgcagttcttcaaatacaccgccctgtctgtccgcatccggaaccgggataaagttgtcgatctctacactggtaatgcccagttccgatagcatggcacagaccaattcctctgcatccgttcttgtatttatcgtgtatttattccaccgcatatctattctccattttctataacatatagccttgctaaactaatgtattgtaccatggattgcccgttttgacaatgcgtgaatacgcgcaaaaatgcggtcaccacaccgggcaaccgcattttactaaagttcttttattcttctctaccatgatccttaagatcaaatctcttaaccagttcctccaaggtagccgcctgtgctgccaactcctgagaagttgctgatgtctcctcggcagatgcggaattgtcctcaacgcccttggaaatatcttcaatgccgacacggatctgctccatgctctggttctgtgcttcgttgttctctgcactcttaccgatcatgccattgacttcttcgacggcatccagtacatcctgcatagactgcacaacattctgtgccagactggaaccacgatcaatctgctgcaaggagatctcgatcagatccctagtattatttgcagccttagaactgtcatccgcaagagatccgatctcagatgcaacgactgcaaaacctttgcctgcctctccggctctggcagcctcaatagaagcattgagtgccaaaaggttggtctggtctgcaatatcttcgatcgtcttgatgatactgacaacctcattggatgtctccgtgatcttgttcattgcctccatcatctgattcatctgttctctgctatcctgcatcatatgggtaacacgggatgtctctgttgcagacttctgcgcatcctcggtattttcctctacctgctgtgatacggattcggttgttgcaacaagttcctgcacagatgcagcctgcgtcatagcaccctctgcgatattctgtgcagccttggaaagttcatccgcaccgatagatacctgcgtagaactgtcaatgatatcttcgatcatctgctcaaaggatcctgagatatgaagcagggcggtcttaacctttgcaaactctcctgcataatcatacttcaaggtaaacttcaacttaccatctgccagtcgatccaataccgaagaaatctcatcgatgtaattgatatattctttcagacgatctactgtcttttgaatagaatctgcaagttccccgatctcattttcagatgcgatatcaagagtcacatccagattgccttctgccagttcctgtgccacatcattcaaagcaacgatcggcttagtcaactgggttgccagatgacggatcgtgatgatgataacgacaatacctgcaatgacaagcaacaatacaatgatgatacaacggatcagacttgcaaaatattcacttgccggtaagcaggaaatggtcagataatcggtcgaaccaattcttccgacataaccgtatttgctctttccatctgcggaataatgtacggaagtatctttacctccctcaactgtctggatcaaggtcttgtctacattcaactcgctcaaactcttctgctggttgtccgtgttcggatgatagatcacattgccttcagaagtaaccagaataacaaatccattgtttccgatcttgtattccggtaaaagttcatcgatatgatccagtgccacatccacacctgcaacaccgatgatattttgtccgctctggtcatataccggagtagccgcactcaggatcacattgcctgtgctggcatctacatatgcatccgtaaggatggtcttttcttcttctactgccttataccatgcacgctctgtgatctcaaaatcactgccactggtatagccgtctgactgtgtcagaacattggcatcaatatcgccgacccagactgcctgaatgttgtcactgtctgctgccgcggtctttttcatagtattgaatacggttgcataacgctctgactctgtaatattggctcccggtccggtctcctccaataaagtctgcacatctgtgttcagtgccatctgttctgcgaccgtcgtgtattcctcaaagaatatctccaactggtatgctgctgctttggattgcatctccaggtcgttcttctgggcactcagactgatgttgcccaccataaaggtaaccactgccgcaacgataacaaatacgatgactacctttgacaagatactgacctgtatctcctccgcgattcctcttttcctctgttgttttttctttttcataggactccgttcctcctttactttttccatcatagcactttttcgacatatcacacaagatttttctgaaaattatgcataatttctgattttctttgcctttacaacaaaattgtactcgctattttacacagaccgaaaaaagtccccttgcagaaatctgcaagaggatttttcctaatggtcttatttattttgttgccatacttccaagaagataaagactttcttttgcggtacgcttcatattgctgcggtctactgcgatcagaccgaactgcatagagaaacctttctgccactcaaagttatccatgagtgaccagtgcatatagcccttgagtggaataccgtctgcgatacactcctgaagacctgccgttgctgttttgatatattcctgacgtctgctgtcgtcagcggttgccataccattttcggtaacgataatatcgcccttgaaatcctttgccactgcacggacaacgttggcgatcgcctgtggatagaactcatatcccatctgggtcaattccacgccgtccggtgtatatttgttgccctcagcatcaaagcactgtctggtgtaagactgtgcgccaaagaaatcatcatctgcaatatatggaagataatgacggaattcttcatcccattcttttgctgctgcatcttcgccgcctgcttccggctgcatatcatgcaaagataaagtgataccgaccttgatgtccggatataattccttgatgaccttcttggctgcctgatgcgccttcatgaccagaatatccccttgtggtgtgcacatggaaacaaaagtatggatgcctcttggatcctgcaagccaaatgcctttgcacattccatcatgcccatcatcatggtattcatgccctgtccaaggttgagtccaacctgcacatcgccttcctttggtgcatcctgctttggagcctcagccattttcttcatggcatctgcatttgctgcatcttttgctccgccgcccatgctgcccatgtactttttcatgatggcagccaactgtaagcgcatgtttgcctcgttgatggtgcaaatatagttaagttcgcttcccagacgttctacgacatattttacataattcgcaaagagatcaacgacttcttcattttcccagccgcccatggaaatgagccatgccggagaagtaaagtgatgcatggtcacgatcggctcgatgccgttttccttgcagcaggcgatgaccttgcgataatgctcgatctccttgtcatcaaactcgcctttctttggctcgatccttgcccactcgatggaaaaacgatatgccgtcagccctgcttctgccatcatcctgatgtcttcttcatagcggttgtaatgatcgactgcatcgccggatggctcgacgaactgtgaatgttctacattctcctgtacccagtaatcactgtgaatattgttaccttctacctggtgtgctgcggtagaagcacctaccataaatccctgtggaaatttactcattttttgtatcctccttgtctggtagggacgttccttttgccacatggagtgtcccttttggctcttttattctgtctacagtataacgtaaaagagcgaattcccacgataggaaattcgcttttttgttatttttttagattgattttaagttttttcataaatcacagatcatattccccggcaggaagcgtctgcgccttgcagcccggcaggctcacctccgccgttgtattggatggaacaagaatgtgataggcatacgttccatccgcgtactttttccaagagcatcccaccttaccgtagacgctgtcataagtcataccggcatggctgaaatgtccgcccggcacaggtgcgatcttaaaatgattctctcctgcgactttgattccacacattttttcaaaaacccactcacagatggcaccctttgagtaatggttcagtgatgcaatgccgccgccctttccgttgtctgaatttggaccctcccagtcttcccagatggtcgttgcacctgcctttggcatacaaagccatcctggtttttcctcgttttctaacagccggtaggcatactccggatcaattttttcaagaacatataaaacaaacggtgtagacaaaaagcccgtaccaacgcgccaatgataatgctctaaagcctgtatcagacgtttttttgcataaacagtatccttctcatccagcaatccaaaatagaggggtcttaccagtctcgcctgacgatccgtatccaaagaatactttggcaggtgtacaagtttttgataagtatgtttggcgccgtcacgatattcctcataaagcggaatatcctctgtttttcccagataggatgcgatctctgccatcagccccatgacgtaggataaatatgccgttgcctcctccggacgcgaagtggcgaaatccttccaggtcatcgtcttgacatcctttggttctgcccactccccataatgctgtccgtaattgtagagatattttttgtcttttccggacagacctgtgtgctctgaaataaaaggttctgtttttccagtgcgaccgatcatgtattttgcataacgcctcatattatcatagtaatcgctgatcatgcgatcatccccaaacatcttccatagacgataaggaatcagaataccggcatccgaccaaccgacagatccattcatcacacgcatataaaaatccgtgcctccttccggtgcaatctgtggaaaattgccggatttatcctgccagtcgcaaagatcattttcgtatttcaaggcaaacggcgcatagtttaccatgtaggaagccgtattgacaaaaatctgcgcgtctccggaccagccatgacgttctctggtcggacaatctgtcggcagatcggctgaattattcttgagcgaccagagggtatttttgacaaactgatttaaaagcgcattggaagaatcaaaggtaaatgtcgtctcaaaatcggaatagacagcgattgccttaaaattggtcggatcgatcggacaatctgcctcaacttctatgtactgataaccaaaaatggcaaaggtcgtcttatattcgtttcttccttccttgcagaaatattccacctgctgcaaaggcgtcttaaactctcctctcgcacactggatattcttctgggtaaattcgccgtctttcatcagttccccaaaacgaagaaaaatccgttgaccggccttggcatttttcaccgtaaaggcaagaattccagcgatattctgtccaaaatccagcacctttttcccggatggcgtcacgatcagtttgggattcatcagccgctcctgctcgatcaatggaaaattgttggaagccgtcggccatatcttgtgcgatgtcacttttgcttttttccagacagccttggcaaaatcttcccttccggcatcgtagatctcgccgtccttattgtctgcaaaacggattggtccatcctgcgtccaggaaaaagtgtcgtctgttgcaatgaccgccacttctccatcctcataggtaatttctatctgcgccagaagtttcgtttcacttccataataattccgcataccccaggcaccaacagatccacgataccagccgtctgccagcatgaagaaaagttcgttatctccttctttcagtaaatcggtcacatccactgtctgatactggatcctttttctatagtcggtaatgcccggtgcaaggataaaatcccctatcttttttccattgatacgcccctcatatagaccacaggcactcatataggcgcgggcttttttgatcttatgaccgtcttttaccacaaaacttcttttgaaacaatccaccggatagcgttcttttttctttggaacataatctccggtaatccactctgcgctccaatcatttttttctaagagtcccaattcaaaatgtgctgtatctgatgtctccgcttcgtctttttcatcccagattgtgaccttccaaaaaacctccgaacggctttttaaatttgctcctccccagggaatcagatgcatctgctggctttcgactttcccggagtcccacagcatatccccatcctcatccctcgccagaatctgataggcactttgctttgatccctcggaaaaattccaactaagacgagggcacgcataatcgataccgatcggatttctcatgtattctacttttaagtttactgccttcatagaccttctctgcctctctatttcctcgtatccggtttttctaatttttaacaatttctatcattctgacttttttgcttctctgcgggcagcaatctcatcctgtttttcctttaatcccttttctacgttgataaacataagcagtacaaatacaatgacggaagtgatcacttccagacctacaaagcaaaaagtaatcatacttttcactgcatccggttgctgtgctgctactgtcacaccatctacaagagaaggtgcgatataacctgtctttgataagagaatgttgaaaacaccagtacagataccaccgacagctactgtgataatggaataaatcgacatagcagcgccatcaactcggaatccgtttttccactccaagtgatcgtatgtatcagccatcaaagccataaagacgtaagcgcaaggcagcccaccaatatttttaataaactgtccgaccaagacaatgaccatattggtcggtgccatccagcaaatggcactacccagaccataaagaacaaatccggctgcggtaagatttctttttccaaatttcttagccaaaggccataccgcaaagataccgattcccatcggaataccgccgatcacggataccatagtctgcgtgataccatcgttataagtaccaaggacataattgcaatagtagaccaatgcaatattcttaagcatagaaccaatggtatagacaaagaaataaagcaagaggcagaacatatagcgatctgtcaaaacagccttcatttgttgcttaaaggtaatgtcgttttcttctgtgacatctgcattttcttccgtgacgcgttccttcgtatgataatattccagtaaggtcagcggcaaagccagaatcgaaaggatagccgccatggcaatccatttttcctttaccacgcccagttgcggcagtaccagcattgggaaaatcaaagcgacgatgatgcccgaaatcatgatggttgcaatgttattaaacaccgccaaaacacctctctgctccgaatttctggtggaaagcggaaccatcagattatgactcatgttataaatggtaaatgctaacgaataaaacaaattgtatgagagcataacccagataacttccaatgtttcattgaactctggtactgtaaaaagtaaaataccggtaatcggaagtaatactgccgccaacaaaagatagggtcttgcctttccctgctttgtcttggtatggtcaatgatatagcccataataacattggtaatggcatcaatgactttcgagatgattggaaatgccatcaaaaataaaccgccccatacggtcgtcagattcaatacatccgtataataaacattcagataggatgctaaaactgcattcagcaacaatgctcctgcaggaccaattaaatatcctacccatttttctttcttttccatgtccggtgatttgatccggctgttgaatgctttcgcatccaaaaattttgctctgatttctttcatttgtccctctccttttacccttcagaatcctttatagataaaaaaatacctatagaaatctttcattctataggtattttatagattctgcttttataattcttgtaataatgttttgcttattgtaacttttcccttcattttccaaaatacttatctggagaaagaaaaatcgagaatgtcacacatagtatcaccttttgtcttcagatacagggcatgcgtccccttttctgtaatctcaacggatgccttgcaccattctacggatggtgcaagcgtcaattctccgagcgtttttgtctcatcacatacgctaacacttccctgtccacgataagttaccgtcaaggtcacttttccatcgaaagcaaagtatttatatcccatcacagcatcatcacataaatctgccacaaaacgttcatcatcccgacaagtcacaaatggcatacgtccattatttcccataaccggtatatgtccttttttccaaatcttggcattgtagagattacaacagattgctgccgggtaagtgccttctgccgccagcgcgccgtcattcaaccctgcggaggtcatctccacctgtggaatactgccgtccgcaagaatctccactttttccgcacagccctgtctgctgtaacaggtcttattggtatgtctgtgatagaaaatataccactgccccttaacacataccagactaccatgatcattgcttgtcatagcaagcctttctgataattttcttccttcaaagccgacatcaccgttagagataataacaccccgataggtaaaatcacggtccggatatttacttgtagcataacagagttcatgattgacctgagaagaataaatgtaataataggtatcacctatttttcgcatagatgatgcctcaaaaaaggcatggtcttcccactgtgttccctttgcatcaaactgtcccggtgcaagacgtttgggctcggatataacggtgagcatatcatctgcaagttcaacgacatttcctccctgaataccctgtggttctcttgccatctgctccttagacttttcaaacaattttcctgccacaaaatgcttgcaggtaaaattcaaaaagccatacatacttttcggcatactttgtgatcccgttccgattgcccagccgtaatagagataaatcctgccatcgtcattcaaaagtccggggtcaaaggtaatacacctgtcaaaagtcgagccgtctgcatttctcacctctccataatactcgtattttcctgccggtgtatcgcagactgccacatggattggtcccgtaaagtgtccgccactcatggcataatagaggtaatatcgtccatcctttccctctacaacatccggcgcatacatatacttatctttctcatttcttcccggatcctgatcggcgcgataaatgataccctcactacgccagtcagataaatcatccaccggtgcggaaaaacattcataatcaagcacacagaattccgtaccgttttctgcatcatgggagccataaatataaaggcggtcgccaaaaacatgcggttctccatccggaatataggtatccaatggtaaatacgggttataggcttgttttttcatctcatattctccttccaaaatgttactgcatgttcgatccaattttctgctgctgttcctgtcgctggtcctacgccatgatctacccctggaaagatctcacattgatgtgcaatatgatttctctccagcgcctgttccatcatctttgtattctctggtgaaactgtaccatctgcatcaccacaccaaatatacgtcggtggataagcagcatcaacattggtctgcacactatattttcttgctgttttctcgtctgctttttttccaatatgattctgtcttgttccctgatgcgtcagatctttttccaaagtgatgactggatatgaaagcacaattgctcccggtttgggaagttgatatctggcatatcccataactgttgttccaaaactacccgccagatgaccacctgctgacgctccccagacagaataatctgtcatatccacatgatactcgtccgcttttgcactgatttccctgacagccctcgccagatcatcctgcggatttggatatatggctttttttcgcactcgatagtatacgataaatacagatatatccatggcattgagtttgcgtgcaatcggcgtcccttcaataaaagaacaaactaatgtatatcccccacccgggcaaaggattgcacacttatgtgtctttccatccctaagaacaaatctgtcatctattttgtactgattcctccggtagatatccttaagcagctgtttcttatctaaatctaccagttgcttattatttcccataatttcactcctttgctggcatgtctgtttctaattccatcacaaagcatcctaccattggatgccccgtatttttcactgtcgtctgactactgccagaataaagccaaattcttccgtcattatctaccaatattgatggatcaaatttttgtatattatcccttcatatttccattcagataattcctctaatggcgcagaccatacaacataatcgttttggcagtaatccgtaccgcctgcacgatcatggcttccatatacatatatccaatcaccaaaaacatgtggttctccatccggaatatactctcacccaagtagatatggattaaatatttctctattcattctggtctcctttactacacactttcaactatcttataatataattgatttttttgttatttcttgtaagattgttttaatcattgtaattttatatcatcatattggttaggagaaaatcatgcgccagatagactacgattttattgccagcaatatctcctctctatcgtctgttgctgtcagagtatataaagaaaataaactcatacatt

SEQ ID NO: 12521 - DNA, 2326 bp, Unknown
  gut microbiota DNA sequence
ggaaacatttttggcacgaatggaatatttacgtccctgatacacaccacagatgattccgtcttcatctctataaattcccggaaaatatgtcgcaatgcgttcatatagagcccgcactgaaagtgtctgatcataatcgcagacaatcgttccatctgtattcacttgttctactaaaaaagccatcgttgtccccctcttttcaagaatgctttccctgtctatcccacaaaagcatctaaataccccatagcgatcgcatcatgcttccgcttaaatccgtgggctccgttttcgataaagtaaagctgtgcattggcataaacttccttagccttgctggcataactaggatttcttctgtaaaaaattctttttccccagtttttttaacatgatcgtttcctcccaattttaaaactatgggcttacatatagcacaattctatgaaatatatgttatatcttactatagttttttactgtttgctatgccataaaatggattttctgttgtaccataaaaggcgctgcctttcgacaacgcctttcttctattctctattcgattatctctaatgattataaaacaaagaatgtacaggttcccggtgcaagttccacctgacctgcaggctgaacaaccggacttaaatctggcaatgcattatcctctcccaagacaagtggcttgtcattgagtgtcataatggtcgcacgcatattgccatcctggcctgccagagtatatctttctgcttcctttggaagttctacctcggttgtctctgtcagtgagttgttgatcacaagataaacaaatcccggcttgccgtccttgcgagaatgcgcgtaaatatgtgccccctcacgaaccggctcctttgtatcataacaggttgttcccatcaggcgattccacaagagcacagcaaaataatttggacgtggatcaaagacttcacgagccaaaaatccgtaatcagatgctgccagtgtattatggaaaatcacaccattactaaccgtggaaaatcctgccaattcgtttaaggttctaagaacatctaaataggtagatgcccatgtatctccaccgccgcctgcgtcgccggactcggttacccacatttctgtatctgctgcatatttatcacggattggagcatataccttggcacaatgaatcggcacataaagatactcctcactgtttgccttttccggagcccaatgtgcacttggcataacagatgccaaacgatcagatacaccattatagtaatgataactaaatacatccaaaggctctttggtaccctttaaaagttcctcagttgaaacattttccttggtaagctgttctaccccgccaccacttgcactgtcttcactgcccataaaatcaaggccatcaccaacgctgctcggtccgatgcaaaggcaatccggataattcttgcgcagccaaacgaagaaaagatcctgatcgcgtctgtaatctgctgccgtataaccatgtggaaaaccggtctcctccatcatattcggttcatttgcaaactctgctccatcgatcggtacgccgtattccttactgagtgcaaagatcttctctgcctctgccggatgccacggctgatcggcgctatgcaatcccggacagtttgccacggagatcatgagtttcgctccgattgccttaacaaagtcaagcacaccaatccactggtccttggtcagcacattcagataaccttccggcaccttgccattgcaggttccatcaaaatcataataagtcttggtcgcccaggtaccggacacacgcacccatgccgttcccagttcctttgccagtttgcgcaatttctcatcatagaggttgatcggtgcatagacctgcatcagatccttatacatatctgtgatattttcgccttttcctacctgaaaaggctctgttcccgcgatctgctccggtgtgtatgccttccagaatgttccacccgtcacttccgcaaattcaatattataagacatgagacatggattcatctcacgcagagcactcagtttttccggtgccaaacttacaaattctgccattttattaccttcctttccaatatttatgctttcatcctagcacgttttttgtcttgtgtatatcaaatatcgaaaataggctaaaaatattaccaattttataaaatttattcatataaaaaacttttttgtgcagttctacgcgtatgtaaccaatccagacacttattgataacaaccgtatatagggctgccagcacattgataccaatac

SEQ ID NO: 12522 - DNA, 2650 bp, Unknown
  gut microbiota DNA sequence
cataccaaataaagaggatgcaattgccagtgctccaaaggtgttaaaggccgtctgccatttgtagccggcagaatatccgacgccaataccaccgataataccaatcaaactgtacatagattccggcagaatcagatacaaggcaataaaaagcacacaacctacaatattaaacagacctctatccttagccctaggcagacattcctgtgtaaacggcaaactgaccgacatgcaggcaattcctgcccacatggcgcgcggcaagccaagtatatttacgataaacatagcacttgatacgatcagtgttaatttgatataccaacgacttctggccgaatgcacatcaaactcccggaaaaggtcaaaaaaagttctccgataagggcgatttttttgatttttgtaaaaaacagccatgcaaatgaccattccgataaacaagccaagcagacgcatctgatacgcatgcccagtgacatcatagccatataaaagcaaatagcccaaaacgaaagtggaatgattgtacataatcacattgtgacagcccaatatcatcagcaggaaaatactgatcatgttgaccgcaaagtcgccaaatgccggtaaaacatttgccagtctaggccccgccatgagaatcgcaaatatccccatgatggaaagcaggccatgcgtcgtcctgattccaaaatccgcctgacgcaaaaccaaaagcgccagtaaaactgtcacccccaccacactgttctcatttcctgtcaacatgctataaagtgtcaccacggcaacacaaaacgccatgaccaaatataccttgaaattgtatatcaagatatggcgtcgtttttcttttttatctgtcgtgctatgaatcaattgttttgagccaacagaacttaattgtaattcttgataaaaagtcatgtattttctctcctatcttttgtaaagcaaagagaagtgtactgcaaatttgatttatttgcaagtgggaaatcaagcgcctgcggatatcgcttctttctgctgccttgaaccatataataatgatcatgatgcttcatccagccagttggcggcatcagatatagttgtaaacgattgtaatcgggctgtttcatgctttgtatccccattactctaaaaagtgccctccacactgcttctttaaaacctatactttgtattcactctttaattttccaattccgatgccatatccgctgtgatatttgtgggtttacttttatcattttaattatttttctttacacaacgtctttattgtcattattaccaaatataatttccattaattcacatgctatctctttactcaagactctcataatactatcatcaactttacccttagctatttgtgcattaatggcacgtttttgtaatattgcaatcttaaacattcactttcttctatctgttatcatttaagtcacgccatccattcacctgtagtgaacccaatatatcttgtcacttaatcagttccatttcatctttcatttttataaatccgtatctctcatacaaaggtcgtcccatatccgttgcctctaacgcaatctgtgatatgccctgcttcctcgcatcttttatcaataaatccaatgtatgatatgctattccctgtctacgatattccggattggtatacatattcatgatataagcctttttgcctgtcgggttatgatatgtcggcataacctgataaaagctgactccacctgcaccgataaactttccgttatcatataccaaatatgcaatatgctctccagttttcaatgcatatctataatatgcatatgattccttctctaccagagacatatccacatcatctgacaatttattagctgcacgcaggacaattattctcgttcttactaattcatcaacatctttcattgttgctttcttatattcaaatctttttatatgatcgtatgtgcagccacccaatgattcgtcaaatgtcattgttacgttcttgtcaataacagaatctgttaattttttcgtaaagcaaataattctatttgcttctacaaaacctatttttaagtgatatttgcgaccattttcattatctagctcacaatcactggcaaattctgtacacccctgctcctttgcccacttctgacatgtctctaacagacctcttgccagtcctctttttctatattccgcttttataaaaatcccttccaagtaccctactggacttgaaactgtgccttctacatagtcatgtcttaatccacattgtgcgaagccaactgcgcctgcatctgccactgcaataaaaactatccccttttctttgctaatataatcgtaaaattcccttgctaattctccaatggtatgtgatttccacatctgaatcgccaattttgctactatctgtacatcctccaaagttgctactctaatatccattttcattatcactcctacagccgatataagatttatccctattactccacccacaaatagaaccaaactagagccattcgataaaacaaatgccggaaacctatataaatacaggctttcggcatttctgtccgttattcaaactcattatgccccaggctatacttaa

SEQ ID NO: 12523 - DNA, 21001 bp, Unknown
  gut microbiota DNA sequence
actgtataaaagaaattgaaaaaggatataattatggtataattataccatatagatgaggaggtgtttattatgccacaaataatcccaattaaagatttgaaaaatacgtcagagatttctgatatgtgccacaagacagaagagccgatttatgtaacaaaaaatggttatggcgatatggttatcatgagcatggagatttatgagtcaacgatgaaacaaatcactatgtatagagatattgagatatctgaaaagcagatagaggcaggtcaggtaaaagatgccagaacagcactgaaagaaacgagggcaaagtatggcttataaattgaacgttactgagcatgccgatgaactgcttgataatcttgtatatcatctggtaaatgtttaaagaataaacaggcagcaagacatctgttggatagcatagatattgtatatgacaggttggaaattgatccatatcagtatccggagtgtagggacacatatcttgccaagaaaggatatcgtgaggcagtagtgccacagatgaattatattgtcatatttgatgtgagagtggatgttgtgaatgtagttggtatattccaccagttagagaattatcagagcaaattataatatgttttggggtagatcagagtcggtcgaaaggctggctctaatttttgcactttttcattttataagaaaccatatggaaattatagtcctgactgggcggtagtttgtcgcaaggaggcacttgcaaatgctgatgttggcatctattttatagtggagacaaaaactggtaagacagaggcaacccagacaaatgtaataaaaagcggtctttgccatgcaggcaggaccgctttcttaaacttccttaatttgcaggatatactaccacgcaaatgaaaaattgtgtataatgaatataacttattttttacacaggaaaggagcaggcttatgtgggataacaaagtcttgaaacaaaaagcaaaggagcgtatgaaggtcaactactggaagatgctcttggttggacttatcattgccttggtatcaggaggcacaggagcatcctccagtgccagaaattatgtcacaggggataaagagacgacacagtatgatgattacgatgaggatgcattcttttccggaggagatattgatccggacatgatggtggattcccttggcttctggggtctttttggcggaatgatgcttggtgtggtggtagttgccgttatcattggtatctgccttgctatttttgtattgaatccactggaaattggagcacgtcgcttcttctatcgcaatataaatgagaaggctgaattaaaagaagtgggatttggatttgaccgtaattatctcggaaatgtgaaaactatgttcctgcgcgatttatatacggttttatggacgttgttatttatcattccgggaattgtaaaaagctatgaatatcgtatgatgccatatcttttggcagaacatccggacatgagtacagatgaggcttttgccaccagtaaacgtatgatggatggcaacaaactggatgcgttctggtttgatcttacctttattggatggaatatcttaggtgctatcacctttggtattgttgatgtattctgggtcaatggttactacaaccagtcagccgctatgctttatgatgcgatcaagatcggtgatcagaaccgcagaatgcagcaggagacgacagcagatcaggaatttgaccagtactaaaaaggcgggaatacaagatgtcactacagtttgtgataggaaatgcgggaagcggtaagtctacctatctttaccggcatgtgatcgcggaagcgatcaaacatccgcaaaaaaattatctggttatcgtgccggaacagtttaccatgcatacccaggaagaacttgtggctatgcatccaaagcatgcgatcatgaacattgacgttctgagttttgatcgtgtggcatatcgtatttttgatgaactggggacggataccttagaggtcttagaggagaccggaaagaatctgctcttgcgcaaagtggcacaggagcaggaaacagaattacatgcacttggaaagaatatgaaacggcctgggtatattgcccaggtcaagtctttaatatcggaattttcccagtacaatatcacaccggacgctctggatgagatcatgcagcgaccggaactcagccagagtttccgatacaagggagcagatctggtcaccatgtaccgggcatttgaggaaaagattgcaggctcctacatcacgacggaacagatcctgcaaaaatttttggatgtggcgaaagactctaagatcctgcgtggatcgaccatcgtttttgacggctttacgggctttacacccatccaaaatcaggtattggaaatgcttctgcgcattgcggacaagatcatggtaacgatcacctgtgatacaaaagaagaattctttggcaggattcatgatgaggaactttttgccatgagtaaaaagaccatggcaaaacttgtagatctttgcaggcagacaggctgtctcttggagaatccggtcttacttgacaatgcgcaggaaagacgttttgtggcaggaggaagactggcgcatcttgaggcaaatcttttccgcccgtcggcgcatgcctggaaacagaaagaagcatcggaagatgccatccgcatcgtcagtctgaaaaatccaaggcaggaactggcatatgctgccggtgagatcacgcgcgccgtgcggcaagaggggcgcagatatcgcgattttgccatcgtgtgtgcagatctggatacctatcgttacagtgctccggcagtcatggaagactaccatttaccgtattttttggatgtcaaggcggagatcgtctttcatcctatgatcgagtttatctatgggcttcttatggtgctggaagaaaatttttcctatgaaagcatcatgcgcctgctccgtaccggactgagcgatctgagcatggatgagatcgaccgactggaaaattatctgctggcatccggtatacgggggcgaaagaagtacagtgaaccttttacgatcgcgccaagaggctatagcccggaagacatggttgccttaaatgagattcgtttgcgcctgtttgccccgatcgagcactttgtgcagacggtctttgcacaggatgaaaggacccagggaaaaaaggctggggcatggctgacaccggcaaaaagcctatcggtacgagccctttcctatgggctttatgagtatctggttttttatcatgtgcaggaaaaactggaaaataaggcagaggactatgaagccgcagggcatgtggtaaagagtcaagaatatcgacagatctatggcgagtgcatggatcttttagataaactggtcgccattttaggacaggaagcgatgacggtaagcgagtatcgggagatcctgtcttccggttttgagtcgatcgcggtgggcatgatcccgccggatcaggattgtgtcgttattggggatatggagcgtacccgtctttcggatatccataccatgtatctgatcggggcaaatgatggtgccattccaaaagcacttggcaatggcggtattttgtcccaactggatcgggaacaactgatggcattggatgtagaggtggcaccgtcagaccggcaaaaagcctttatgcagcgcttttatctgtattttgtcatgacaaagccgtcaagagaactggtcgtgacctatacgcgtgtggatggcgacagtaaggcggtgcgcaggtcttatctgatccagacccttttacaacttttcccggatatccgggtggaagaattagaagaacttccggcaagaaaccgcatcctgactgcggagaccgcccgggactattatgtagatctcttgcgtcagtatgtggaggagggcaggacagaggatgcctttctggcatgccttgcatgggaagaagcaaagaaccaagtgactttccgccgtctgcgggatgcagccttttatgagcacaaggaagaaagactgtcaaaagccgcgctggatgctttgtatggcacatccatcacagagagcgtcagccggttggaacagtatgccagatgcgcttatgcgtattttctgcgttatggtctggggctgcttccacgtccggaacatgcctttgaagtggcagacatgggaaatctctaccatgaagccttggaggagtattccaagcggcttttaaaaagagaggatgtcaactggtacacgatcagcagggagcaaagtgatgctcttttggcagaatccattgcctacacctatcagaccatggcaaagacagaggttttggaagaaggacgggatcgttatatcctacggcgtatggaaaagaccctgcaacagaccgtgcatgccctgaccgaacaggtgcgaaagggttcttttgtgccgagtgcttttgaggtggatttccgtcaggtttccgatctggatgctttgcgttttcaactggatgagatgcacaccatgcgcctgcggggaaaagtggaccgtgtggatctatatcaggacggaccttctgtttatgtcaagatcgtagactacaaatccggtgccaaagatatagactttgcacaattatatcagggactacaagtgcagttggtcctttatatggatgcgacggcggagggattaaaagaacgctatccgcaaaagaagatcagccccggcgccatgttttactaccatatcgaccgtccgctgctactggcaggagatcgtacagagcaggaaaaagagcaggcgcttttaaaagaattgcagatgaaaggtgtcgtcaatgcagatctgcatgtgatcgaggcattgcatcacggactggaagggcggtcggatgtcattccggcggggatcaataaggatggatctttatctaagacctcaagtgcgctttccgaagatgaatttgccctggtgtcatcctatgtccgtatgctgatacaaaagaccggcaaacagatcgtggacggcaggatcgattgtgtgccttaccacatgggacaggaaaacggatgtacctattgcgaataccatggcatttgtggttttgatgcccgaatggatggttttgcctatcgcaggctttccgacaaagcagatcgggaggagattttggcgcgcatggaggaggatctgcaaaaggatcgttacagagaagaaagaaaagaaggagagaagtaaggtgccacagtggacagaagaccagcagcaggtcattgatagcagggaaaagaatatgttggtttctgcggcagcaggctccggtaagacggcagttttggtggagcgtatcatccagcgtatcctggatgaagaaaaaccgatcgacgtagaccgtattgtagtcgtgacctttaccaaggcggcggcagcggagatgcgtgagaggatcctcttggcaatcaacggcaaattggaagaagatcccggaaatgtgcatctgatgcggcaggcgactttggtccataatgcccagattaccacgatcgacagtttttgtaattatatcgtgcgcaatcatttccatgagatcgatctggagccggactatcgtatcggggatgagggagaaatgctgctcatgcgaagaagcgttatggatgccatgatgcaaaaagagtatgaggcggcagaagaagcaggacaggatacctttttctattcttttatgaatgcctatgtccggggcaattcggatcaggcggtaacagatatgatcctgcgcctctttgataaggcacagtcctatccgtggccgaaggaatggctgcaatccctggtggatgcctatgaggtcacctcgacacaggatttgcaggaaagtgcatggtttgcctttttactggacagactacgcatacaggtggaggaggcaaaggctaagaccgagcgtctgatcgatctgtgcaggcagccggagggacctattttttacgaaaagggcttgcagcaggatctcttattatatgaggacatcctggcatttgacgaaaagatgcgtttttacgatgccttccgggatttaaaatatggtgcgatcgggcgtaagccgcgcggctatgacggcgatgaagtcctcctcaaccgagtaaaggatggacgggatgccatcaaaaaaagcatggaaaaagcaaagagtgattatggcgcattctctttggaagagatcgtccgacagatgcagcagatacagccctttgttcgggaattggtgcgtctgaccatacatttcatggatgattttgccgcctacaagcggaacaaaaatgtcatggattttaatgacatagaacactttgccctgcagatcttaaaagatcaaaggaccaagcagaccacgccgactgccagagaatttcaggcatactatcaggagatcatgatcgacgaatatcaggacagcaactatattcaggaagagatcctaagcagtgtatcaaaggaagagatcggcgggcataatatgtttatggtgggggatgttaagcagagcatctatagtttccgtcaggcatgcccggagatctttatggataaatacgagaggttccacggcagggaagaaggcagtattgccattgatctgcaccagaatttccgcagcagaaatgaagtgctgaccctgaccaatgatgtcttttaccaactcatgcatgcggatatcggcaatgtggaatatgacgatctggcggcactttatcccggtgcgatctatcccgggattttaaaatcggaggatttctttgcgtcggaagattatgatactgactttcagggggagatcctgatcgcagaccaggacagtgaccttatggaggatgcggggatcgaagaccgcatcgcctttgaggcaaagatcattgcagacaagatccgggcaatgaaaaagacgcagtttgtcacggataaagcgtcggggaaactccgtcctatgcgctaccgcgatgtcgttatcttgttgcgcagtcccggaagcatggcagagagcatgatcgctgttttggaagaaaacggcataccggcttttgcggaaaataagaccggttattttgataccatggaagtacagactgtcctaaatctgctccgcatcattgacaatccaaggcaggatatcccttttgcggcagtcctacattccgccatgtttgctttttccagtgaccagatcgctctgatccgtatgacagagcccaaacggaccctttatgaagccatgcaggcttatgaaaaagagcattcacaggagaaaaaggtgggagattttctgaactttttggaggatatgcgctctaaagtggcagatacgcctattcattcttttatcgagatgcttttgcaaaagacaggctatctgacctatgtaagtgctatgccgcgtggcgagagccggcgagccaacctggaaaaactcatggcacaggcagtggtttatgagaagaccagttataaaggtctctttcatttcataaactatatcgggcagttacaaaagtatcaggtggatatgggcgaggcggaactcataaacgacaatgatgatgccgtggcgatcctgagtatccataaaagtaagggattggaatttccggtcgtttttgtatccggtatgggcaagcagttcaatgaaacggaccaaaagggttctatgatcctgcacggtgatctgggcgtgggactggatctggtcgattatgaagaacagaccaagatgacaccgctttacaaacaggtggttgcacgcaggctgcatgaagatgcctgtggcgaggaaatgcgtatcctttatgtcgcactcaccagagcaaaagagaaacttatcttgacgggcacactcaaaaaagcagaggagaccctggaaaaatggcaggaaaaccgcggaaaactgaccttttttgaaagggagggagccaggtcttatctagagtggatcgtgcgtgcgacagcatccgtgcgggaaaaatatccgatacaggtcatttcgccggaagaagtcgttgtggcagaagttgccggacagatggataaagcggcaaaaaaagaggcactggaggctttgagcggacaggctaaaccgtcctgggtaaaggcgttagaagacgagatggcttatgtttatccctatgcatccgtcggaaagtacaaaaataaatattccgtatcggagatcaagcatgaccggatggaaaaggcatttgcagacgaccagagtgtgcgtccggactttttgaaggaggagacaaaagagatcgttccagcatttatcgcagagaaaaagacccaggaggtctcacgcggagccctgcggggaactgccatgcacaggtttatggagtgctttgatttttgcaattatacaggcagagccagtctggaggagcaggcagagcggatgcttcatgagggacgcatggacccggagcaaaaggaacttttgcagatggaccgcctttatacctttatggagaccggggtggcaaagcgcatgatgcaggcggctggcaggcatgaactatacgtggaaaagccttttgtcatgagcgtttttccgcaggaactctttgacgaagaggaatccgacagccggagtgatacggtcttggtgcaggggatcattgacgtattttttgtggaagaggacggcattgtactgttggattacaagacagaccgtgtgcagcaggcagaggaactcgtcaagcgttatcaggcacagttgcagctttatgcactggcattggggcgtaccatggatctgccggtcaaagaaattttgatctattccttttatctggaaaaaatgattgcattgtaaggagcaagtatttatactatacattgtttcgtaggaaatgagatcgtgacacagaccaccagatctgtgacataggaagaaataataagtaggaggacttttgaaatgagcagttacgaatacgatgaggcatgtattcaggcatttcttgagcagcagttgaaattattcccggaggaggtagccgagacaccggaggaggcagaagccttcttagaagattgtatggctatggtctgtgacaacaaggacgaggtcatcgaatacttggaagatgagatggatatcgtaggcatggaagaagaggagatcttggaggcggaggaagtctttgccatcggagacggacgatatctggtagtagaaggatagttgtatgagacagtataagaagagaataccggcacttttgctggtcctgatcttagggattggtctgctttttacaggctgttccatcggagaccgacaggtgtattttgcctccaagagcgggggacacacggtatttaagattggtcggatggcgtgttcgcgtgaagaggcaaaagtctatctggcaaattataaaaatctgtatggaaagatctatgacacagatctgtggtcggaggattatgataccaagaccatggaggaaagcatcaaggatgcggtcatcagtcatctgaccaaggtctattcgctggatatgtatgcccagactaaagagatcgaactttccgaggaggaaaaggacaaggtgacgcaggcggcggagacctattacaagtctttgaatcggacagagcgcaaatacaccggggcgtccaaaaaggacattacaaagatgtatgagcattatgcgctggcggaaaaggtctacaagcagttgatgagtggtgtcgatgagaatgtcagcgaggatgaggcgcgtatcatggaggcaaatgttatctatgtgacggatgagactctggcaaaggatattgcgacccagttaaagaacggggcttcttttgaccggctggcaagttcttacagtcaggcagacagcatccatgtgacctttggcagaaatacttatgagactgccgtagaggatgtggtcttccagttggatgatggtgatatttccgatatgatccaggggaaggatggctactacttttttgaatgtgtcagcaaatataacgaagaactctcagaacagaacaaggttgccattgtcagccagcgacaggaacaggcgatggaagatgtgatctctgcgatcgagacggattattattcggattttaaccagaaactgtgggataagatcacaatcgacaagaacgacaagatcacgaccgattctttttttactactttagatgataaaataaccttttaaattggatattatggaaagaatgtgtataataaaagttagtaacagataaaagttatcagaggaaaaggagtgtttgttatggcagatacaaaaaaagttgatatgaagaaaatggctgaggaagcaaagaaagccacagagagcgtaaaagttgcagcaacaaaggcagcatcttctgtaaaggctggtgctgagaaagcaaagaaggcgacagaggcagccgcaaccgagaccaagaagcaggcagaaaacgtggctactgaagtcaagaaagaggcagaaaagcaggctgaggctgtggttaccgagaccaagaaagcaagcgagactgtaaagaagacagccaaaaaggctacgaccagaaagactagcaagaaaaagccggaaatgaccaagtcagcagtattacagtttggcggagaagattttaaggtagatgagatcatcgccaatgcacaggctgcattcaaggcagagaacaagagaaaggctatctctgatatcaaggtatatatcaagccggaagaaagagcggcttattatgtagtgacttcaggagaaagcgaatacgcaggcagaatcgacttataattttatcatacatacggacatcttatagtgatatagaagaacctatagacaggtgtaaacttgtctataggttcttttttgatcttataaagaccgcacgccgttttcaaaaaagttggcaagtttttctaagtcttcatcattgatggcgggctctttgaccttgtgcagggcaatgatgccgttgatggtaaaggtgagcagggcaccgacatagtggtagttgtccggctgtaagccctgttcgatggcttttgcatttagggcggcggacagttgctggctgaacttcatattgccactgctaaagggctggatgttatcattttggcagatggaaagtgcatcgtacatgtctaagaaaaaggcatggggatcctcaaacatattggcaagatagtgcatgccggataccacactggatatggcatcgttggaaagggcatccatgagatcatagatgtcgcgataatgggcgtaaaaggtagatttgttgatctgtgcctctgttacgatatcggttaccgtgatcttttcgatcggctttttgccagtcatgcgaagaaaggcgtcggcgatggctttttttgttttttgtacgcggatatccatagaaatcctcctttgcattgcagaaaaacaacggatcggacagaaagcgttgcttaaccaacgatacggtgtctatctgctgattgttttacccttgttttgtccttataataacaactgtaagttggaaatgcaactatgagttggaaaaacaacctatagttgaaaatattttatcaggatagaaaaggagtggatcaagatgaagaatgaagaaatgatgaaaagcgggtctgtctggaaagccattgcgtctatggcaatcccgtccgcggtgatcatgatactcatgatcttttacaatatcgcagatatgttttttatcgcaagattgggggacaacgcacaggtggcggcagtttctgtggtatctccggtattttccattatgtcagccattgccatgatgcttggaaacggaggctgtaccatgattgccaaagcctttggggcgggagaaaaggataaggccaagacgtattccagcctttgtatgtggaccgccattgtgcttgctgtcgtatttatcgtattggcactgaccttcgtcgatcccctgcttgcctttttgggggcgaaaggtgacgttgccctttatgccaaaaagtatatgatcccgatcgtcttaggatccccctttatgatgatctctacatctgttgcgcttttgcttcgtgcggaaggtgctgtcatggaaggtttttgcggaaacctcattggtacagtggtaaatctgattctagatcccatttttattcttgtatttcactggggtgttgcaggagcagcgctggcgtctgtagcaggaaatgctttggcaactttttactatagttatgtcattagcaaaaaatcgcaggcaatgtcattttccttaaaatatgccagaaaggacgtaggtgcgatcggccatatcctgattctgggacttccaaatgccattgccagtatcttatccggttttgcatccacctttagcaaccagatcttgagcggttacggcacggatgcccttgccgccatggctgcggctggcaaatgtaccatgatcgctactacccttgtcatggcagtaggaatgggctgtcaggcactgatctcctataattatggggcacagaatattccgcgtctcaaggaagtggtgcgcaaattatctattctggtctttgctatcagtattgtggcaggtgccttttgctttctcttccgaaaagtcattatggcacagttcttaacgacggatgtcttagacctaggcgttcatatggtgaccatcctgcttttgaccagtcctatcataggcgtagtctatctggtgtcaggctattttcaggcaatcgaccggcctatggaatctctggtcgtatccatccttcgtcaggggctcctcctgatcccggcactctatatctgcaaccgtctgtcgggtctggatggcgttgtctgggcatatgtggtcgcagatgtcatcagtacgatcgttgccctgatcgtttatctaatgcgaaaaaacctttgtattataaggtaaaaataaaattattagcactcattttgaatgagtgctaattttttgttgacttttgcatttggctgtcttattatattttctagaacgtgagagatggtgacatccgttctattttatagaaagaaggaatgatagaaatggaaaacaaacgtggaagtttatcaattacaagcgaaaatatttttccggtaatcaagaaatggttgtattcagatcatgacattttttatagagaattgatctccaatggctgtgatgccattactaagttaaagaaactggacatgatgggagaatacgaactcccggaagactataaggcaaagatccaggttatcgtcagcccggaggacaagacccttacctttatcgataacggtcttggtatgacggcagaagaagtagaggaatacatcaatcagatcgctttttccggtgctaccgacttcttggagaagtacaaggacaaggcaagtgaggagcagatcatcggtcatttcggattgggattttattctgccttcatggttgcggatgaggtacatatcgataccttatcttataaggaaggcgccaaggctgtacattgggaatgtgatggcggtaccgagtttgagatgggtgacggagacaagacggaagtcggaaccaagattactttgttcctaaacgaggattgcttggaatttgccaatgaataccgtgcaagagaagtcattgaaaagtattgctcattcatgccgacggagatctatctttcaaagaaagatgcaccggaagaatatgagaccatcgatgtagcagacaagcgcgacaccgataccgtgatcgaggaaatccataccgatgccaagatggaagaaaaggaaaaagaggatggcagcaaggagatggtcgaggtagagcctgccaaagaccaactcaagatcgtaaagcgtccggttcctttgaacgataccaacccactttggacaaagaacccgagcgaatgtacagatgaagattatatcgccttttaccggaaggtatttatggattacaaggagccgcttttctggatccatctgaatatggattatccattcaacctgaaaggtatcttgtacttcccgaagatcaacaccgagtacgattcgatcgagggtacgatcaagttatacaacaatcaggtatttatcgcggacaacatcaaggaagttattccggaatttctgatgctcttaaagggtgtcatcgactgcccggacctgccgttgaacgtatcccgttccgctttgcagaatgatggatttgttaccaagatttctgagtacattaccaagaaggtggctgacaaactcattggtatgtgcaagaccgacaaggaaaattatgagaaatattgggatgacatcagcccatttatcaagtttggctgcttaaaggacaataagttctgtgacaagatgaatgactatatcctctttaaggatattgacggcaagtacacgaccttaccggaactccttgttgcggaagaaaagaccgaggaaaaggcaacggatgaaaacggcgagaccgtggatgtcgaggaagtaaaggaagatgccggtgcggctgaaggtgagccggaagataagagaaagaccatcttctatgtgactgatatgcagcagcagagccagtatatcaacctgttccgtgagcagggcatgaatgcggttgttctggaccacacgatcgacaattcctttatcacacagttagagcagcgcaatcaagactacaagttcttgcgaatcgatgcagatctgacagaaaacctggttgaggaggcttctgaggaagacttgaaggctgcacaggatgccctttctgcactctttaagaaggcatgcggcaaggacaatctgaccgtaaaggtagagaagttcaagaacaaggacatttcttctatgctgacagtttctgaggaaagcagacgtatgcaggaaatgatgaagatgtacaatatgtacggcatggatccgtctatgtttggcggagacgagacgctggtactcaatgtggacaacgaccttgtcaaatacatgtttgagcatgcagatggcgagaatgtagagatgttcgcacagcagttgtacgatctggcatgtctggcaaataagccacttgcaccggaagccatgacagcatttgttgcccgtagcaacaagatcatgatgcttttggcacaggataaataagatataaaataaaaatgtactggatacagagaaaggtctgtatccggtctttttttatattgacagaaaagaaatgcgtattatgatgaaagtaagagaagtttttcatggatgtgcataaaaacagggggatcagattatggcagaaagaaatcatgaagtgacaaaaagacagccgctattagatgccaggggaaacatcgcagagccgggctggtcgagaagacagttgcaggtctatgaccggacaaagatcaaggcagccaggttccgtatcaaggaatgggactattatctggtggtaggggatgcatgtgccgtggcatttaccctatcggatgatggctatgtgggcttacagtcggtatctttgctggaattgggagagcatccttgggagcacacagagaccattttggatgcttttcctatgggaaagtttcacttgccgggcaattcttccgccggagatattgtctatgataagggcaggctgcaattatcttattgtctggaagaaatagagggcaagcgggtgcggcatatccggggcaactttgcagacttttatcagaagaagcctttttcctgtgatattgtcttggaagaaccggacatggataccatggtcattgcgaccccttgggataaggacggacatttttactacaatcaaaagatcaactgtatgcgggcgagcggctgggcagactatgacggcaaacgctatgtctttgatccggcaaggcattttggaacgctggattggggcaggggagtctggacttatgacaatacctggtattggggatccggcaactgtgacttagatgggcatgcctttggcttcaatatcggctacggatttggcaataccaaggcggcgactgaaaatgtcatcttttatgatggcgtggcacacaagatcgatgatgtgaccttccacatcccacaggacgattattgcaagccttggactttttcttccagcgatggacgctttgagatggagtttatgccaattcttgaccgcagtgcctgtatggactacaaactgatcgtctccgatcagcaccaggtctttggcaaaatgagcggcgtggcggtcttagatgacggcacgcatcttcatataaaagatgtcttatgttttgcggaaaaagtgcataaccgctattaaaaaacaggtcagtctcttgtgaggctgacctgcttttatgtaagtttatttggaagcaatttctttttttaagttcttgtgcgccgtagaaagcataagtttgatacggttgagctggtttacttccgatgcgcccggatcatagtcaatggcaacgatatttgcctttggatattcgtggcgcaattctttgataacaccctttccgacaatgtggtttggcagacatgcaaacggctgggcacaaatgatattcggcacgccctgatgcatgagttctaacatttcaccggttaagaaccagccttcaccggtctggttaccaatggatacgatggactcagcatttttggctgtgtcttcgatatagcaggtcggttcaaagtgcttgctctttgccagttcgtctctggcatcttttcgcatccattcaaagaaacggatgagcatcttattgaggcgggctgtctttttggactcgcccagattgtctgccttgtagatctggttgtagcagcagtagagcaggaagtctgtcagatccggtacaacggcttctgcaccttcagattccaaaagcgttactacgtcattgttggctgccggatggtattttaccagaatttcgccgacaacgccgacacgcggtttcttctcatctgtgattggcagacagtcgaaatcgcggatgatctggcggcacatctgcttgtacttgcgatgggaaaggaagccgtcctgggttacaaaggcaatgacgcgctctttccatttttcatgcagggcattggcagaacccggtgtcacttcatatggacgcatgcggtataagcagcgcaggaagatgtcgccaaattccaaggcgtataggccatgctggatcagagccggtgtgatcttaaatcccggattcttttccaatccgaccatatttaaggatacgaccggaacatccgggtaacctgccttggcaagggcacgacggataaaggcgatatagttggtcgcacggcatccgccaccggtctgggtgatgaggatcgctgtcttgttcatgtcgtaattgccggaagcaatggcagccatgatctgaccgacaacgatcagagacggatagcaggcatcgttatttacatatttcagaccgacatctacacattctctggcagagatctgtgggatggataaatggtatcctgcggcaacaaatgccggttccaaaagttcaaaatggatcggcgacatctgcggacagatgatggtgtaatccttgcgcatttcctcggtaaagatgacacgctcaaagtttgccggtttgatctcgcgcttttctgctttcttttctctgacacggatggcagagaggagagagcggatacggatcctggcagcacccaagttatttacttcatcgatctttaagcaggtatagatcttgccggagcctgtcaaaatatcactgaccatatcggttgttacggcatcgacaccgcagccgaaagagttgagctggatcatatccagatcgtctctggtcttgacaaagttggcggcagagtaaagtctggaatgatacatccactgatccataaccaggatcggacgctccagattacccagatgtgacacagaatcctcggtcaaaacacagatgccgtaagagttgatcagttccgggataccatggttgatctcaggatcgacatggtatggacgacctgccagaacgataccgcgtctaccggtttccttcatatatttgaggacttcttcaccctttttcatcatttccagacgggtcacttcctgctctttccaggcatcggtgacagcctcgcgcacttcggattctggtatgtcaaattcttccttgaagcatttgaccagtgtcaggcttgccttctcctcgctgccaaaggacatgaaaggattgataaaacgcaccttgccggaagtgatctcgtccacattattcttgatgttttccgaataagaggtaacgatcggacagttgtagtggttaccggcatccgggaactcgtttctttcatagaagagtgccggatagaagataaagtctacattgccctcatcaatgagccactggatatgtccgtgtgccaacttggcaggataacattcggattcacttggaatggattcaatgcccatctcatagatctttctggaagaagaaggagataagacaacggaaaatccgagttttttaaagaaagttgcccagaatgggtagttttcgtacatattcaaaactctcggaagtccgaccgtgccacgttttgcttcttctcttggcagtggttcgtaatcaaagatacgcttgttcttgtattcaaaaaggttcggaatattttctttgttcttttccttgcccagacccttttcacaacggttaccggtaatgtaactgcggttgccggagaaacggttgatggtcaaaagacagtggttggtgcatccctgacaacgggcaagtttggtcgtataggtcagttcattgatctggtcaatggtcagcatagtggtctgatagtcttcttcgtggcgttctctggcaatcagggcacaaccgaaagcacccatgataccggcgatgtcaggtcttactgcctggcagccggaaatgcgctcgaaagaacgaagcacggcgtcattgtaaaaagtaccgccctgtacgacaacgtgttctccgagttctttcggatcggagagtttgataaccttaaagagggcatttttgatcacggaataagcaagaccggcagaaatatcagccacggtcgcaccttccttttgcgcctgctttaccttggagttcataaataccgtacatcttgtaccaagatcaatcggattcttggcaaacaaggcttccttagcaaaatccgcaacggtaaagttcaaagattttgcaaaagtctcgataaaggatccgcaaccggaagaacatgcctcattcaactgcacgctgtcaacggtctggttcttgatcttgatgcatttcatatcctgtccgccgatgtctaagatacaatcgacctccgggttaaagaaggcagcagcatagtagtgtgccacggtctcgacttcgccctcgtcaagcatgagtgcggactttaagagtgcctcgccgtatcctgtggagcaggaatgaacgatgtgggcatcctccggcaacttgctgtagatgtctttgatggcaccgatggcggtagcaagcgggctgccgttgttgttgctgtagaaagagtagagcagtgatccgtcctcatctaccagtgcaatcttggtcgtggtcgaaccggcatcgatacccagatagcagttgccgtgataagaggcaaggtcagcggtacggacatggttgttgccgtggcgcttgataaaggtatcgtattcttcttttgaggcaaagagtggctccatgcgggctacttcaaattccatatgaatattggaagacaattttgccataatatcggtgatggcaaactgcttttcttccttataattaagggctgaaccgatcgcggcgaacagatgtgagttctccggcgtgatggcatgctcatcatccagatttaaggtacggatgaaggtcatttttaactgatccaggaaatgcaaaggacctcctaaaaaggcaacatgaccgcggatcggcttaccgcaggcaagaccggaaatggtctggttgacaaccgcctggaaaatggaggcagacaggtcttccttggtggctccttcgttgatgaggggctggatatctgtcttggcaaatacaccacatctggctgcgatcgggtagatcgccttgtaattcttggcatattcgttcagaccggaggcatctgtctggatcagagaagccatctggtcgataaaggaaccggtaccaccggcacagataccgttcatacgctgttctacgttaccgttttcaaagtagatgatcttggcatcctcaccaccaagttcaatggcaacgtctgtctgtggtgcatagtgggtcagggcagtagagactgcgataacctcctggacaaaatcaatgcccagatgcttggcaagtgtcagaccgccggaaccggtgatcatcggagataccataatctcgccggtgctgtcaaatgctttatgtaacaggttacttaaggtttcctgaatgttggcaaaatggcgttcgtaatcagaaaagataagattgtcctgctcatcaaggattgcaattttgacggttgtagaaccgatgtcgattcctaacttgtacaatttttcattcataatgatgtaaaccctttctaaaaacttatatgataactgtttactcccgttaatcccatagattgaagtctgtcttttcctatttattatatagaaaacaaacagagttattatacgacacaaatcgacaaaaaacaagaagcggattcgttgacaaaaagtgggaagcaccctataattaaaataattatgcaatatcgtcggagactataccatttcttaagatattgcgagagtgaggagaatac

SEQ ID NO: 12524 - DNA, 9844 bp, Unknown
  gut microbiota DNA sequence
catgcagaccagccggatcagaccgggcaaggaactcattgccaatgtatcacacgatctgcgcacaccactgactatgatccgggcatacagtgaagtgatgcgggacatccctgaggaaaccaccccagaaaatgtgcaggtcattattgacgagacagaccgtctgacaaatctcgttaatgatatgttaagtgtttcccagttggaagccggaacgatcgaactccatcaggaaaagtttgatctgaccgacctgatgcgacaggtcatgctgcgttatggcaaattaaaggagcaggatggttatgtcatggaatttgttgcagatggagaagtctatatcatgggagatgcagacaagatcacccaagtactttgcaatctgataggcaatgccatcaattataccggagccgataaaaagatcatcgtgcggcaaagtctgcacgaacaccatgtacgcgtggatgtgatcgacagcggagaggggattgcggcacaggatattccttatgtgtgggatcgctattataagggagataaggcgagaaaacgtctggtgtcaggcacaggtctgggactttccattgtgcaaaagatcttggaattgcacggagcaacctatggtgtagagtcaaagcccgggatgggggcagatttctggttcgcctttgaaattgtggaaaaatagaaaagacagaaggaacgtcccttctgtctttccttctgtcttttttgcatctattctctttcgtccataggagttacttctttgtgcggacatacggtcatgtaggcaggacgcatgatcttgcccttgtgacatacttcttccatacgatgtgcgctccatccggcgatacgcgcgatggcgaagattggtgtatagagttccagtggaagaccaagaatctgatatacaaaaccactgtaaaaatcgacgtttgggctgacacccttgtagatcttgcgcttctcggcaatgatctccggtgctaagcgctctaccaaagagtagagggcaaattctttttcatagcccttttcctcagacagacgttctacgaaagaacggaaggtaacggctctcgggtcagacagagaataaacggcatgacccataccataaataagacctgccttgtcgaaggcttttttatccagaaggtcacgcagataattgccgacttcttcttcattggtccagtctttgacctgttctttcatatctgcaaacatcttgacaaccttgatgttggcaccgccgtgttttggccccttcaaagaaccgatcgcagcagcgatggcagagtaggtatccgtgccggaggaggaaaccagatgtgtcgtaaaggtggagttgttaccaccgccgtgttccatatgcaggatcagggcaacatctaaaagttttgcctcgagtggtgtgaacatactgtcatcacgcagacaatgcaggatgttttctgcggtagaatattctttctttggcggatggataatcagactttcgccattgtagtagtggcggtaggtctggtaactgtaaacggacagaagcgggaacatactgatcagttgtaagcactgacgcaggacattggcttcggatgtgtcgtccggtacttcatcataagaatataaggtcagaactccacgtgctaatgcgttcatcatgtctttgcttggctttttcatgatgacatcacggacaaagttctgtggcagggaacgataattgctcaacaattcacagaattcgcccagttcctgtttgtttggtaatttgccaaagaggagcagataggtgcattcctcgaaaccaaagaagcagtcatccggcagttctgcaatcagatcctgcacattgtatccgcggtaatataactcaccgtcgcaaggaacggatttgccatccacgatcttggtggaattgacctcggaaatctcggtgatcccgaccaagacacctttaccatttaaatcacgaagacctctttttacatcgtatttggtgtataattccgggtcgatgtaagaagatttcttggataattctgataaatgcactaactgaggagtaatttcgctaaatgattgatttgtcacaatggttacctccttttgcgtatatactatttatattatcatgagttaccgtgtaaaagcaagatatgaaaaaaaccataatttactatggtaatttatttgaagatatcatataatagcaatagatttttttaacctgaaatgtgcgattcaacctgttgttttgaacctacatttactttaaaagggattcttatattgtctgatggatgtcaggcctccgtttgcagtggaaggcagaagtcagattgcggttacccacctagcattgctaggagtcaaaatatcaggcccggcattttggggatacttaaaaagataaaacacataagacaaggaagttgccgtccggtgacttcctttcttgtgtaataaaaattcctgggagggaggaaagaattgaaaaaacggacgcgttatacattacgaaagccaaaagactatcgcatggttatttttctgacccctttgtgtgtctttttgatcttattgattctttatacccaaggaaaaatgcgtattttacaggattttatagcgagacagacaaccaaggaagaggataagatacaagaggaggtcccggatacgccggaggcaatgccttattcttcggatcttcgcattgtacttatggatcgggacaaagatatataccggggctctatcagcctttacggagacagcaatctgaccatcaaccgggcagggcagaccagcgatctggcggcagggacgacctatagcatgagcgcagaccagatcagcgccggggagacgatcacggtcacaggcgcagagggcagccagtggtatctggtcaatgaggacggcgtgacctccaatggatatgaggggacgctggagatctggggacaggcgaatggacttgtgctggtcaaccagattcccatggaatattatttaaagcgcgtcgtgccaagtgagatgccaaggacctatggggcagaggcattaaaggcacaggcggtgtgtgcaagaacctatgcttatgggcacagcaattcttatgcctatcccgatgtcaaaggaaatatggatgacaccgtctcttttcaggtgtataatcagggaacggaatctgcggagaccaatgaggcgatccgttctaccgcagggcagatccttatgaaggatggaactgtggttgatgccctgtattattcgacatcctgtggctatatgcaggacggcacgctttttggtaatatggatggcagcatctttcatcccggctatatcggcttacaggaaagcggacaggattttgatacttatctgcgcagtggggacgagcatgcttatgaggcaaacgagcgttatttccgctggcaggcaagccttacaggggatgatctttccggactgcgggcacatttgcagaattaccttgccacggacgatagtatttcctgcgacaggaagatgaaaaagaagatcacagacacttctttgacagatgataaggcattggggcagatcaagaatatcacgatagaaaaacgcaatcccggcggggcagccatgtgcatcagcatttctttttctgagggaaaggtagagatagaggaccagttacatatccggcagatcttaggtgatctgtgtggctatgtcatcttgcaggatcaggaaaggttagacagcgtcagcacacttccgagtgcggcgatctccatcgaaaagcagggggacgggaagtttctggtctatggcggtggtttcggacatggtgttggcatgagccagaatgcggccaaagccttggcggcagccggttatgcttatacggatatcctgggatatttttatcagggaaccgccttgcagcaggtatattaaagatagaggacagattatgatatggatggtcatcggatatgtaaagacatatctggataaatgtaaaagagataatatcggtgctttcgccgcgcaggcggcattttttatcattatgtcggcaattccttttttgatggtgtttacttccttgttacagtacaccaatatttcacaggaatatgtcacggacctgctctgtaaagccatgccaaaatatatcgaaccgctcttgcagccgatcttaaatgaagtatattcccggtcggtcggaatcatatccctcacggcgatcgttgccctgtgggcggcaggaaaggccctgcaatatatgacagcaggcatgaatgtcttaaatggcattgatgagaccagaaactggtttgtcgttcgtttctgggcgattgtctatacgatcgtatttatttttgccattatcatcgtgctgatcctcatggtatttacggaatatatccagagccttttagatcaggcgtttggtgtctggggcatactggtagccattgtcagtgtccgcccgctgatccgagggctggtggtctttgccatactgaccggactttttgtctggctctttacgaccctgccaaataagaagatcaaggcttatacgcagatcccgggcgcgcttctttgtgcagcaatctggtatgtattttcgatttttctatctttatatgtgaatttttacgatcgtttttctatttatggcagtatgtcgacgatcgtgctcatgatgttctggctgtattcgtgtatgtatatcatgtttatgtgcgcggaggcaaatgtcttcttcgccgaggtgctggggagatttatgcgcaagcagatgagaaaaatacaggataaatggaaagcctttcgcttgagaaataaatcttgatgtttttttcaggctatgctagaatgtcagatgttaaaggctttgaatgcgcacagtagcatgtcatactttttacagagaggatgggtcatcggctgaaagcccgtctaaggtaaggtggcaggtgaatttcccgcaggagctgcgtgactgaaagaagtaagtcgcgacggatagtgcacgttaagcatatgagtgtcagagaaatctggaatcagggtggtaacgcggagtgatttcgtccctatcgggatgaagcctccgcttttttgtgtcatagaaatctgatacattccctatcacaaaaggcacttcgtgctaaaaggactttttgaagagaaaataaagaaaaggagatagaaatgaaagataagttacaggaaatcacaaaaagagccatggaacagattgatgcagcagaagaaatgtctgcacttaacgatgtgcgtgtggcagtgcttggaaaaaagggtgaactgaccgctgtattaaagtccatgaaagatgtgaagccggaagacagaccggcagtaggacaattggtaaatgagaccagaagtgccatcgaggagaaactcgctgaggcaaaagagcgcatggaagaggcagagttagatcaccgtctcaaatccgaagtcatcgatgtgacccttccggcaaagaaggcaaagatcggacatttacatccaaacaccaatgtattgcaggaagtagaagatattttcgttggtatgggctatgaagtcgtagaaggaccggaagtagaatatgattactacaactttgaagccttgaatatcccggaaaatcaccctgccaaggatgaacaggataccttctatatcaataaggacattttgcttcgtacccagacctcaccggtacaggtgcgcgtcatggaaaagggcaaactgccgatccgtatgatcgcaccgggaagagtttttcgttccgatgaagtagatgcgacccattctccatccttccatcagatcgaggggatggttatcgataaaaacattacttttgcagacttaaagggaactttgcaggagttcgttaagcagttgtttggcgcggacaccaaggttaagttccgcccgcatcatttcccatttaccgagccgagtgcagagatggacgtttcctgctttaagtgcggcggcaagggctgtcgtttctgtaagggcgagggctggatcgagatcttaggctgtggcatggtacatccaaaggtactcaagatgagcggtatcgacccgaatgaatatcagggatttgctttcggacttggcttggagcgaatcacacttttgaagtacgaaattgacgacatgagactcttgtatgagaacgacgatcgtttcttgaagcagttctaggagtaggaggaagaaatagcatgagaacatcattaaattggattaaagatttagtaccggggctggaagcaacgcctcaggaatttatggatgctatgactttgtcaggctccaaagtagaattttatgaatgtatggacaaggatctggaaaagatcgtagtcggacagatcgaaaagatcgagaagcacccggatgcagacaaactagtcatctgtcaggtcaatgtaggaagcgagaccatccagatcgtgaccggtgcaccaaatgtatatgaaggtgcaaaggtgccggttgtcttagatggcggacgtgttgccggcggtcatgacggtgaaaagaccgagggcggcatcaagatcaagaagggcaaattgcgtggcgtagaatcaaacggtatgatgtgttcgatcgaagaactgggttcagaccgcaatatgttcccggatgcaccggaatacggcatttatattttcccggaggatacccaggtgggagccgatgctgtcaaggtattgggactggatgatgccgttgtagaatatgagatcacatccaaccgtgtagactgctttgctgttcttggcattgcaagagaagcagcagcaacctttaaaaaagaatttgtaccacaggttgttacaaagacaggaaatgacgaggatgtcaacgattatatcaaggtgtctgtagaggcgacagatctctgcccacgttatacggcaagagtggtaaagaatatcaagatcgctccttcaccggaatggatgcagaaacgcctgcgcgcacagggcatccgtccgatcaacaatattgtcgatatcaccaactatgtgatggaagagtacggtcagccaatgcatgcctatgatatggatacgatcgaagggcatgagatccgggttcgccgtgccaatgccggtgagactttcgtgactttggacggacaggaaagaaatgtagatgaaaatgtactgatgatctgtgacggcaagaaagccattggcattgccggtatcatgggtggtgaaaattccatgatcacagacaatgtttcgaccatgttatttgaggcagcatgctttgacggaaccaatatccgtctttcttccaagcgtgtgggactgcgtaccgacgcatccggcaagtttgaaaagggactggatccaaacaatgccatggatgctatggatcgtgcctgtcagttggtagaagaattgggcgcaggtcaggtcgttggcggtgccatcgatatttataccaagaagatggaaggcagacgtttgccgtttgaaccggataaatacaaccatatgctgggaaccgatatttcaccggaagacatgctggaatacttcaaacgtctggacttaggctatgacgaaaagaccaatgaggtattggtgccgtcatggagacaggatctggaaagttatgctgaccttgcagaagaagttgcccgtttctatggctatgacaggatcccgacttcactgccaagcggagaggcaaccaccggtcgtctttctgaaaagttaaaggtagaaaagatcgtgcgcaatgttgcacagttctgtggtttctcacagggcatgacctactcctttgaaagtccaaaggtatttgacaaactccttctggacaaggatgatgtactgcgtcaggcgatcgtgatctccaatcctttgggagaggacttcagcatcatgcgtacccttcctttgaatggtatgatgacatctttggcaatcaatgcaaaccgtcgtaataaggacgtgcgcttgtttgaaatgggaaatatctatctgccaaagcagttgccacttactgaactgccggaagaaagaatgcagttgacacttggtatgtatggagagggtgatttctttaccatgaagggggtcattgaggagatcacttcacaacttggcatggatgcaaaactgacctatgatccggcatccggtaagaacttcttacatccgggtcgtcaggcaaatgtcctttatcaggataaggtcattggatatttaggtgaggtacacccgaaggtatgtgcaaactacggtatgaaagagcgcacctatatcgctgttgtcgatatgccggcagtgatggaatttgtatcctttgacaagaagtacgaaggcattgccaagttcccggctgcaacaagagacatcagtatggtggttccgaaggagatcctggtcggacagatcgaggaagtctttgagaccaagggcggcaattacctggagtcttacgaactctttgatatctacgagggcaaccagatcttaaaggggcataagtctgttgcatattctttgaccttcagagcaaaagataagaacctggaggaagaagatatcacggctgccatgaaccgcattttaaaggcactggaagccatgggtattcagttgagaaagtaattaaggaaaaagaaaatggatgtaaaagacttttattatgatcttccggaggaactgatcgcacaggatcctctggaaaaaagatcaaattcgagacttatgatccttgataaaaaaagtggcgatgtgacgcatcgccatttctatgatatcaaggaatatttaagaccgggcgattgtctggtcatcaacaacaccagggtcataccggcgcgtttgtatggcgagcgcgaagagaccggaggcaaggttgagatcctgcttttgaagcggaaaagcgatgatgtctgggagacactggtaaaaccgggcaaaaaggcaaggatcggcacacgcctgacctttggcggtggacttttaaagggccaggtcatcgatattgtggatgagggcaaccgcctgatccgtttctcctatgaaggaatctttgaggagatcctggaccagttgggacagatgcccctgccgccttatatcacacacgaactcaaggataagaaccgctatcagacggtctatgccaaatatgacggatctgcggcagcaccgaccgcaggtctgcattttacaaaagaactcttacaggagatccgtgacatgggtgtatccattgcggaggtcactctgcatgtgggacttggcaccttccgcccggtcaaggtggatgatgtcttagaccaccatatgcattccgaatttttccagatctcggaagaagcggcagacctgatcaatacgaccagaaaaaacggcggacgtatcatttctgttgggacgaccagcacgagaacactggaggcggcggcagaagcggacggcaccttacatgccaagagcggctggacggatatcttcatctatccgggatatcagttcaaggtcatcgatggactgatcacgaatttccatctgccggaatccacgcttgtcatgctggtttctgcccttgccggcaggaaacatgtcatggcagcctatgaggaggcagtaaaggaacgatatcgcttctttagttttggcgatgccatgctcatcatttaaaattgcgctttttaaaatacaatcttcctggtcgcataggagaaatttaagaggacataatattatagtagcttgcataaggcaggctgctattttgcatt

SEQ ID NO: 12525 - DNA, 1387 bp, Unknown
  gut microbiota DNA sequence
gtttttgtatgacacaattagattgtagagcgacagagtgccgttacaatgcggacaagatgtgtgccagagcaggtatcactgtggaaggtacaagcgcaaagaagagtgatgagacatattgcggtaactatgaagtgggcaaagacggatgcgcctgcaacagagccggagagccggacggtgtgacagagatcacctgcgatgccaagaactgccattacaatgcctctggcaaatgtgaggcgggaagtgtggatattgctgacagtacaggtgtcggacagaccatgtgtgcaagttttgccatgaaataagaaaaaagatgaaaaagatccgcaagtttttttgcgggtctttttctatggcataaaatgtgctagagtatggaaataggaaaaggaaaggcggatttttaaaatgaatatggatatcaattttccaaacctacatatctatctggaacatgtaggaaagaatacaaacgtctttggcatcacgatcgcttactacggcatgatcattgcacttggcatgctgctgggcgtatcactgatcttgcatcgggcaaaaaaagacggacttgacccggatcaatgtctggatatctgcatttttaccattatttttgccgtgatcggggcgaggatctactatgtggcgtttgcctgggattattataaggataatctgctgtcggtctttaatatcagacagggcggccttgccatttacggcggtgtgcttgccgggatcctgacagcctatatcatgtgccggatcaaaaagatcccattcctacagttcgcagatctggcggcaccgggacttctggtcggacagatcttgggacgctggggcaacttcttcaaccgggaagccttcggacaatacacggatggactctttgccatggaactgccattaaatgctgtacggtccatggatgacatcacgcaggagatgctggcacacgcgagagtggcagacggcgtgacctatgtacaggtacatccgaccttcctgtatgaatctctctggaatctggcacttttgatctttatactggcaatgacaaaacacaagaagtttcacggagagtttttctacttttatctcttcttttacggcttgggacgcttctggatcgaaggactgcgtaccgaccagttgaagatgtgggtcaccggatttccggtatcacaggcactggcactggttctgatggcggttgccctgatcctttttgccctcggtctgcacaagtccaaacaaaataatgcacaaaaattatagttaaatattgtaaaaatttttatacactggaagaaaaacgtataaaaagggacaaaaccacaagaacttgtgcttaaaaataaaaggacac

SEQ ID NO: 12526 - DNA, 2794 bp, Unknown
  gut microbiota DNA sequence
agaacagaatgtgacttacctcagccgtagtgactgggaaggaacctggccgacagataccgtaaagatcgccctgacagatcagttgatcgaggatctgcaactggtacagtatgatgcctcagattatgacgaggtggaaatgcctaccatgggggcagcacaggaactgaccctttacgatatgatcggtctggattatgaggatccacagtgggatgctttgcttgaccagttgactttcgatgagatggtttccctgatcggcgattccttccattggaccatgccggtagagtctgtacaggcaccgggatcccgtgatgagaatggaccgcagggactgacagcctccctctttaatgcagattctgcaaagatggctgcaacagcctttacctccgaagatgtcatggctgcaacctttaaccgtgaccttatgacggagatcgggaaggtaatcggtaacgactgcctgtctgcaaatgtagccattttatacggacctggaaacaacatccatcgttccccatatggcggacgtaactttgagtattattccgaagatggatttttgtccggtgagatgtcactttatgaagtggcagccattgagtctaagggcgtgcatgtcgttatgaagcactttgccttaaatgactgtgagcaggatcgtctgggacttggtgtatggcttccggaacaggcagccagagagatctatctgaaagccttccaggcaccgatcgaagaaggaaatggcggtggtgtcatggttgcttacacacgttggggtgcgatctggtcaggcggcaacaagggcctgatgaccggtatcctgcgtaacgagtggggcagccagggacttaccatcaccgataatgtattgaccaagtatgtcaatggtgtggatggtctgatggcaggcggtatctctacctttgatgccatgcttccatacatcaccaaccagttgccggaatatgaaaatgatccggttgtggtcagtgctatgcgcgaggcctgccaccatgacttatatgcgattgccaattccgttgccatgaacggcgtgggtgagaacactctggtcaaggcagtggaactgaaactggtaagaatcgtaagaattgttatgatcgtctttatcctcttgtttgtggtatctttgttactctttatcaagaagaaaaaggaatttaaaaagagtcaggcttacgctgactttcaggaagcaaagaaagcgcgcaagcaaaaataaatacaatcctataaaatgatgtagaaaaagatccgaggtcaaaaggcttcggatcttttaccatatttgtccggttgccgttttttatggggatatccttggcgcgttcttttccaagccttgcgaaatttggaagaatcgtgcattatataaagatgaaatcagcagagaaagggaaaaagcatgtatcggatcgcagtggtagaagatgaagaacagtaccaggaagaagtgtgtcagtacatcgagaagtatcgggtagaacataaactggagtttttggtcacgacctatgcggacggacaggagatcgtggatgatacagaggcgcgctatgacattatctttttcgacatcgaaatggcgcagttaaatggcatggatgcagccaaagtaatccgtgggcgcgatgcagatgtggtcatggtatttatcacgaatatggcacagtacgccatcgaaggctacgaagtgggcgcattggattttgtcttgaaaccgattgactattatggctttgcctttcgattggaacgtgctatcggccgtgtgcatggcaagcgtgataacttagagtttgccatcaatacgcagggcggtatgaaaaaactcaattctaacgatatttactatatagagatagaaaatcgatttttacattatcatacagcagagggagagttcgcccagcgtggtactttgcagagtgcggaagaaatgtttaaggattatcattttgtcaaatgtaatcattggtatctggtcaatctcaaatatgtgaccgagattgaagataatgtggtacatgttgccggtgcgcaactggagatcagcagacgaaaccgggcgcactttttgaaggaagtgacagactacatcggaggaggcttttaacatgaatttcttaccctatgccaatctattagagcaggtctttgtggtactgtccggtctggtctatcttttacccttgcagaaacgtgaaccgatcgaagttcgttttttatcgggactcatcatggggggcgccctcatggttggaccagcggtggtcttgccgcagaatggttcaacaaactttttgcttgtggccttagatctggtcgttatgtcttttgtcgtctattattgtgccaccataaaaaagagtgcggctttttatgttgcgatctggtcccttgtgacttcgcagttttttatgaatttatggcatgttctttatcagttgtctccttttcgcaataatggcagtctggctgccttgctctggggcgtgcttggattctatgccgtggggctggcgattgttgggctgacaacggcgaagtgtatgccggaaaagggaaagtaccatattggaccgcgccagatgacatccgcagttttgttcttagcagtttttgaaatgctggatcagatgatgcgcatcgtgcattttggcagatataatctcatgtattatgtggtactgctggtcgtacaactttattgtgtgtctctgctttttatccagtcggaacttttcaaaaaatc

SEQ ID NO: 12527 - DNA, 1180 bp, Unknown
  gut microbiota DNA sequence
ggttcttatgaaaacactgtggaaaagatgcacattgatatggtgcatcgtgaaaagtcgccttactgggttagggtcgatggtatggaagtgccacattttctcaatcgttcggactatgaggcggcagagagtggctggtactatagtcagaccttaaaatctgtccagatcaagtatccgaatatccacagggattatcaggttgtagtttcctttgaagcatttgatctgattggcatgtgaaaagttggaaaagttgaaaaaaatcgcaaaatccggttggaaaagttgaaaaaaacaatgtattattagggtgaaaatgtccattttaaataaggataaagccatcaacaatggcgctttgtttgagaatgtggtggcgcaggaattgttggcaaaaggatttaaggagcattactttaatagcaaagagcagggaaaaaggtgtatttgcctatctatatgattatgtttctggaagaggaaacactggaacagaccatatatcgtttggatttgcatggattggaggatcactcatgaatacaaattatgaacacatcgtacatccctttccgcccttatatgacgaagcatcaaagattttgattttgggaagtcttccctcagtgaaatccagagagcagatgtttttctatgggcatccgcagaaccgtttctggaaagtgatggctgcggtattacaggtggaagtcccaatcagcatagacgaaaaaaagaaaatgctgcatgaaaatcatattgcactttgggataccatctatagttgcgatatcattggatcgagcgacagcagtatccgcaatgtcacgccgacagacttgcagcccatcattgagcgatcgcagatcaaaagggtttactgtaatggtgcaatctcgggaaaatattttaagaagtaccagcagaatgtgcttggtatggaggcggttacgcttccctccaccagcccggcaaatgcggcatactccgtggaacgcttggtttctatctggaagcagatgctggaatgatcagatctgtattttttagtatgcgcgatgcatggatgatcatataaaatgccatgccaagtacgataagactgataacgccaccgctaagagaaagcataagatggcgaaaagcgagaaaggaagcagaatccatctgaccg

SEQ ID NO: 12528 - DNA, 31731 bp, Unknown
  gut microbiota DNA sequence
ataaaagctaccctggggataacaggcttatcactcccaagagttcacatcgacggagtggtttggcacctcgatgtcggctcatcgcatcctggggctgtagcaggtcccaagggttgggctgttcgcccattaaagcggtacgcgagctgggttcagaacgtcgtgagacagttcggtccctatccggcgcgggcggaggatatttgagaggagctgaccctagtacgagaggaccgggttggacggaccactggtgtaccggctgtcaaccaatggcatagccgggtagccaagtctggacgggataaacgctgaaggcatctaagcgtgaagcccccctcaagatgagatatcccctcctttaaggagataagatcccttgaagactacaaggtagataggacagaggtggaagtgtagtaatacatgtagctgactgttactaatagatcgaaggcttaaccaagaaggtttgattcaaagaatctgtatgaaattttgaaggtgttataaaaatttatatttgcattacatcctataatctagtattataggttttgtgatatataggggattagttcatcggtagaataagagtctccaaaactccagagccgggttcgattcctggatcccctgtcttagtaaagccttgagatattgtgttgcaatgtttcaaggctttttgttatggcaataggaaaattatagtgaaaaaaggagagaaattctatgaaaaacagtaagagaggtattcgcattgtttttaattcaccggtcattttaggatttgtattgatctgttttctggtaacactcttaaatgaacacaccggcggacggagcaatcaacttctatttgtaacctatcattcttctttcaaggatccattgacttatgttagattttttacccatgtctttggacattccggctgggatcattttctgggaaatatgacctatatccttttactgggaccgatgctggaggagaaatattcatctaagaatattttaaaagtgttcctgattacagcacttgtgacagcccttatcaattacatttttttccctggtgttggtttgtgcggagccagtggtattgcctttgcttttatcgtaatgacctcctttaccggattccgcagcggagacattccgcttacttttctgctggttgctgcagtctttatcggacagcaagtttatgagggaattaccctgcaggataatatttctcatatggcacatattgtgggcggaatcattggtgcaatcgttggattcaaatggaataaataacaaaacgttatagaagatacggaatgatagtatattttgcctgcgatacataacagaatggaatgactacgaaattgaaaaatttgtcatatcgtttataatttatttatacgcattatgaaatgcacataaaggaggagaatgagatggcatgttttttagttccaacaacagaggcaattgttacgacaattgttgaaaaaaatgttgaggcacatgaaaaaaaagaagaagataagggacaaacacttcagaaacagggtaaggtaacattttcaagaaaattaaaatggttaaacacgatgttatggggcggtgcggctttattagcgtttgaacatgtatggcatggagaggtagttccgttctttccatttttgacagcggcttccaatccatccgatgcggcagaaatgcttcatgagatgagtacgacaggtgtacttatggcggtattagttactgtagtatggataggtatggtggcagtttctaatattttggaaaaacgtgatacagatgtcttacttaccaacaaaagataggaggatagaattatgacattacttgtgactgtttttgcggcaataatttctactatcctttggtatcaaaaagaaaaccgtaaggaattgcgtttgggaacattgagtttaatgtactggggtgcttctattatgtggtttgtagatgctatctttgaatatgcagaattgcatgcagcatactttaccccggatccgatggatatgctcaacgatttgttccttgggctgtctgtagttgcatttggtctgatcatatggttggtgattttattgatccaagatcctaagaagattgttagaaatgcaatattaaatcagtaattggtaaaaaaagcctctactttgaaaagtagaggtttcttttatgtagataatctgtcaagcatagaagataactggacgggatagatttttgacgttataataaaatcgaatacttaaagaggagatatgttatctatgctggaagtgaaggagttacaatattttgtgatctgtgcagatgtgagatcttttagcaaggccgccagggtgctttatacgacccagcccaatgtcagcaaggtgatcaagagtctggaaagcaaactgggatttcctgtatttagcagagacaatagaggaataacgcttaccaataaggggagaagagcctacgaatatgcagtaaaaatcctagagcaggaaaaacatttggcagaaatttatcagttagatgacagggaagaggtaaatatgtccagcaacccgagttcgtggattgcggaaacctttacttctttttatcaacaatttggcaaaaaacaggtccgctaccaactgatagaagcgaatctgaatcatattctggagcgtgtgtctagtggcgaggatgatattggcttcattttctttatggaatcgcagagagaacatctggattacaagttacaaagggcacaattagaattccatgaattgaaaaaaagcgaggctgttctgtattatggacaaaatccggcgccggaaaagggcactgacatcaaagagtatatggcagataaacggttggtacaggcctatgaggatgaatttgcactgaatcattactgggaaatggtgaaaggtcaggaagaagatttgttttccgacaaaattggtgtgatcaccaatagtgattacgtcatgaatatgttactcaaaaatacaaatctctgtaatgtgagcagtaatcatctggagaagcgttctatgtttcagggaagcatactctatcatggggaaaaatgtgtttcctttggctatgtaaaacgcagtggcgaggacattgtaccactggcacaggaatttctttcttatatggaaaaacgattaaatctgccgtaaaaaatgacatatgctataacaaaatggaatgcataatgaggcaattctcgtcatgcattccaatttttttgttataatgttaaacagtgtttgcagtgtccgaaaaggacatgagtgccaagaaagaggatagtagcagtgaaatatgtttgcagacgtttgttacaactgattcccattttattaggtattacctttttatcatttgcaatgatgcatgttgccggatcagatgtggtcacgcaattatatacaaatcgaggtgtcgaagtttcacaggaaatcatagatgccaaaagagcggagttaggcttggataagccttttttgacgcagtattttacatggctgaagggtatgctcaccggcgatatgggcatatcctatgtgaccggaagaaatgttttagacacatttatggaaaaactaccggccaccttattattgacggttttatccatattgcttacggtactgatttctatcccgctggggattctggctgccataaagcagggaaagtggatggatcatctgcttcggataagcagttttatcggcaacgccatgccgaatttcttcgttgctatcctgctgatggaattgctcagcatcaagttgggctggctgccggtgattgccagcgatgtgtcgttccaaagtgcgattatgccgaccttgacacttgctatttctatgtcggcaaaatatatgcggcaggtgcgggcgactgttctggaggaattgaacaaagattatgtcataggacttaaggcaagaggcgtgcggagcagggacatcctgtggaaaaatgtcatgaagtcagccatggttacgatactgacactacttgccttgtctattggcagtctcttaggaggaactgcgattattgagagcatttttatgtgggatggtgttggtaagttggcagtggattctattaacatgagagattatcctatgatattggcttatgtggtttggatggcgatcatttatgtgctggtcaatcttgttacggatcttttataccgtgtgctggatccaagaatacgattgggggagaaggcaaagcaatgaaaaaaagcaggaaacaaagaaatatcgttaaattccgtctcgtagtatttgcatccctggcaggacttttgatccttttttctctgttcagtgataagttatgtccgatggatccctatctacaggatttaagtaatgcgaaagcggcaccctcttttgtacacccattgggaaccgatcggtatggacgcgatatgttatctcgcatcattgtaggaagtaagaccagtattttctcaacgttacttttggtaacttttattagcgtgtttgggagcatgatcggtttgatctgtggttggtttgaaaacacgatcgatgtcattcttatgcgtattgccgatatgtttctggcctttccgggactggtttttgcccttgcagtcgcagcggttttaggcggaggtctgcaaaatgccatcatagcactggctgcgatctcctggccaaaatacgcacgtctggcgcgcagccagaccttgacacaaaaaaaggcaacttatatcaaggctgcccggttagcgggagatagtgattggaaactgatcgtaagacacattcttcccaatattatgggaccgatcttggtaactgccgtgctggatatcggaaccatgatgatggaactggcggggctgtcttttttaggtttgggtgcaaagcctccgatcgcggaatggggcagtatgatgagcgagaccagaaatcttttgacgacacagccatgggtcacgctatcgccgggaatcgctatttttatctcggttgttatctttaatctgtttggtgaagcagtgcgtgattggttggatccaaagaatgggaggtcatgatggcggaattattaagatatgaccatataaatatccgatatgggcaatctctggtcatagaggatgtggattttaacttggcgagcggtgagatcttgggaatcgtgggggagagcggttccggaaaaaccacacttttaaaggcaggtatgggacttttgggaaaagaagggcaactctgccggggaaagatcttgtatgatgggaaagatctggggcaatgcagtgaaagagaaatgcaaaagatccgtggaagggaactgggcatggtctttcagatggcaggaagcagtttttgcccgattcgcaccttaggcgtgcaaatgcaggaagccgtcagggcgcacaaaaggatcagcaaggcggaatttatggatgaggctttagaccttctgaataaatttggatttgacaagccagatcgaatcctagagtcctatccttttgaattatccggcggtatgcaacagcgcgtaggaattgttgctgccatgcttttgcatccgcgcgttttgctggcagatgaaccgacctctgcactggatgtatcggtgcaaaagcaggtggtagagcagtttctgatgatccgggaaaagtttggtacatctattttgctggtatcccacaatatcggtgtgatccgtgccatggcagatgagattttggtcttacatcagggaaagacagttgattatggtaagaaagacgatattctggcacagccgacatcggaatatactgaaaaattattggaggcagtgccgaggtttaggagatagcatatgcggacattgttgcgggtagaacatttgacaaaagatttctcaacgcatggaggagaaacatacagggcagtagatgatgtgtcgttttcgctagggtttcatgaaaaaatggcagtgattggagaaagcggcagtggaaagacaacacttgcccgcatgatcacacggctgacggaggcgacaagcggtcagatctttctggaagaagaaaatattacgcgggcaaaaggacacaatttaagaaatatctatcagaaaatgcagatggtttttcagatgccggtagattcttttgattcccggcgacggctgggcgacggtatcgcggaaagcctgatcaaccgggggatgaaaaaagcagaagcatgggaagaagtagaacgcttactgggggaatgtggactaggcaaagaatttttgacccggtatccgcatgaggtgagtggtgggcagtgccagagggcagcaattgcgcgggcactggcgatccaacctaaattattgatcttggacgaggcgacctccgcacttgatatgaccgtgcaaaaagagatcataggcttactggatagtttgcaggaagatagagatatgtcttatctttttatctgccatgatcttgcgctcgtgcaggcgttttgtgatcgcatgatcgtgatgcaaaaaggaaagatcgtggaaaagggtacaacagaccaggtcatccggcatccaaaacatgcttatacaaaaatgcttatggatagtgttttatagtagaaaaataaaaattatatatagagttaagaaaggataagggagtatgcaaaagaaaaagatgatggcagtgctgattggcatctgtctggcacttgggactttaagtggttgtggaaagacgcaaaaagaggcaagtgatgggaaaaagacgttggtcataggagatgtcagttttaacagtgccaatgaggaggcagacatcaatccgcataatacttatgcgggctgggcttgtatccgttatggtatcggggagactctggtcaagtattccgacgatatggagattgagccatggctggcaaaggcatgggaaaatgtcgatccactgacctggaagatcactttacaggacaatgtaaaattttccagcggaagggatatggatgcggaggcagtcaaggagtgtctggaacacttgcttgctgtgcatgatcgtgcggcagcagataccaagatcgcctctatggaagcagacggtcaggtcttgacgatcaagacatccgagcctaaaccggcacttctcaattacctgggagatccttatgcttgtattatagatgttaaagcaggatttgataatggtattgtttcgggaacaggaccttacattgcggtcgatctaaagacggatgattatttaaaactggtaaagaatgacaattattggaatggagatccaaagatcgatgagatcacgatcaaatccattaccgatggcaataccctggcaaaggctttacaggcagatgaggtacaggcggcttacggtatggcatatgagtcttatcctttatttgaaggagatgattaccagttttcacagatctcgacttcacgctgtttttttgccaagatgaattttgatgaaaattcggtgtgtgcagatcctgcggtcagaaaggcgatcgctatgggaattgacaaagagagttttgtagatacgcttttagaaggcaacggctatgtggcaaatggtgttttcccggatcagactgcatttggcggagataaggtaacgaccgaatcctatgatcccaagggggcaaagaaggtcttggaagatgccggctgggtcgatacggatggcgatggcatccgggaaaaagatggtaagaaactggtcgttaaatggctgacctatccgacgcgccaggaactgccacttttggcggaagccgcacaggcaagcctgaaggagatcggtatcgaggtggatatcaacaatacgctggatgtcaatgaggtggctcaggatgcatccgcctgggatgtgtatgccatggcaaatgtgcaggcaccgaccggggatccggaatactggttccgcgtgtttgcacttagcgattccgcgaaaaaccagggcaagtattccaatgcgcagttggatgcactggatgagcagttgagtcaggaatttgatacggcaaaacgtgcagaccttgcggtgcagatgcaacagatccttttggatgacaatgcctttgtcttttgttccttcctcaagatgagcatgatctcaagatccaatgtatccaattatacctcgcacgcctgtgattactaccagatcaccgcagatctggatatcgaatagtgtcaattttgtgaaaagaatgtgtttttgcacattcttttttcttgcactttagcagacacttctttacaataaaatatgggtttttctaaatggaggacacgttagatggaacaaaaggaaatcattgcaaaatccatagatcagatctgtgatatgatccttgcctgtgatcagaccggcaggatcatttatatgaatgagacagcacagaaacaactggaatatcctgtgagtgatccttccatttctatttttgatgtatttcccggcatttttactgaggcaaaagatctggcagagaccagacaaaagaccgaggttgatcgtttgccggtggatatctatcgatacaaccggacctgttttccggtgtggatgcgccttttagatactgggaatgcagattatatctgcattgcacacgaccggacaaaggagatctatctgacgcgtaaggtcgaccagatcggagaagaagccaaggcggcagccaaagtcaaatcagaatttgtggcaaatatcacacatgaattgcggactccggtcaatgggatcttgggcaatatcatgtccttacgggagatcgaagaagattccaagaaattgcagatcatatctttagtggaacgcggttgtgctgatatgaatgccattatcaataatatcctggatttttccaagttggaagcaggcaagtttacattagagcagcgggagtttgatttccgctctatgatggaatatgtcaaggcgaaccataagaataagatcgcagaaaaaggcttgcagtttagcatgagtatctccccggagataccggaacatatcattggagatgaactccgtattgtgcaggtactaaacaatctcttgtccaatgcctgcaagtttacatcggtaggacgtattgccgtggaggtcgtcaagacttcccagatccacaatcgtatggaactcttctttctggtcatcgataccggtattggtatcagcaaagaagatcaggacaaactttttcaaagtttttcccaggtggatgcttctatatccagacgctatggcggtacgggattagggctgaatatctgtaagcagttagtagaactgatggatggctcgatccatgtggagagtacgcagggacaaggttccatgttctcctttcagatctgggtcgagacaccacagagtgagttgcagaccagccggagcctgcaggatccaacgactaagtatgtttcctctatccatagtcttgcggagtttacagcggaaaacggtatggatcatgtaagggaatatggcacacaggaaaatagggaagaattaaaacgagatttaaataaacttatattatccgtggaaatggataattgggtcaaggcggaagaatttgcagccacggtgcgggaattgaccatggatgcaccacaggaagtcaaaagcggtgtgctccgccttaagatggcagtccagaaacaaaattacgataccgtcaacacctattatcaggcgttgaaagagatcttgaagaactagggaggcaggagattatggatcagattacgacacctaagatactggtggtagatgatgtagaagcaaatcgctttgccttgcgtgatatcatccggcaggcgggctacaccccggttctgacggaaagcggtatgcaggcaatcaaggttttggaaagaacgcagatcgatcttgttatcttagatattgccatgccggaaatggatggctttgaagtatgccggcagatcaaggagaatgtgaggacgagagagatcccgatcatctttacgtccgctctggacaatccacaggatatcaaacagggctttgcctgcgggggagcagactacatcacaaaaccttttgtaccggatattgttaaagcaagaattaacatccatcttaaattatatgagacgacacgccagttacaggatatgaaccacaagttgcagttatctgtgatcgaacaactgcggcgtgtggaaaatgaaaaaagaaatgttctctacgccctgctgcgggttgccagagaaaatgctgcctatgatgtggcgcatatggaacgcatcagtaagaattgccgtgtcctggcagaaaccttgcaactgaccaaggaatatgcagacctgatctcggatgcatatgtggataccatagaactggctgccccggtgtgtgacatcggaaacgtggcagtcccgacagagatcttacaaaagaccgatcgcctgacaccggaggagagccgcatcatgcagcgtcataccgaagtcggggagcgtatcctgcaggggatcgatgacgaggagcagggaaatgattttatacagatgtcgcgggatatcgtaaagtatcaccatgagagttgggatggcagcggctatcctaccgggattgcgggagaggagatccctttgtcggcacagatcgtaaatatcgttaccgcctactgtgcgctgacagaagataggtcataccgtagtgctttttccaaggagaaagccgtggagattttaggagaagaagcaggtgtcaagtttaatccggcactttacgatgtgctttatatgataaaacgacagttggtataggggagaatacaaaagagaatgaggactatagtacaatgaagatgacagaagcagaattccaacgtatctaccgatacgtgaagttacattatggaattgatatgtcaaaaaagaaagagatcatgaccgggcgtctggaaaactatgtggtcgtacatggctacgcttcctatgatgcctttatgaatgccttggagacagatccgaccggtcatatggaaaagcgcctgattggcatgcttacgaccaatcatacattttttatgcgggagtttgaacacatggaatatctatcccgcgtggtcttgccggaactttccaaaaaagaggcaaagacaaaagatctgggaatctggtgtgcggcggcatccagtggagaagaaccctatatgttagctatgctgatcaaggattatttcggtctggatcatgcaaattgggatacaacgatcctggcaacggatgtatccgctgagatcctggagcaggcgacgcgggggatctatacggcagatgcgatcgcatccatgccggcgcaatggaaacggcgctattttaaggcatgtccggatggcttgcattatcaggtgacggacgagatcaaaaaggagatcctttttaggcgttttaacctgatgagtccctttttattcaagcataaatttcacattgtctttttacgcaatgtgatgatctattttgataacaaaacaaagcaggaactgatccgcaaggtctatcagtgtatggaaccgggtggatacttatttataggaaggacggaaacgatagatcgttcggtagcaccatttcaaatgatacagccatcgatttttcgcaaataggaggtggcttgatgcttagaaagattagagtgttagttgtggaggattctctggtattccgggaactcctggtacaaaatttgaataaagacgaaggaatcgaagtcgtggctgcggcaagggatccttttgaagcgagggacatgatcctcaaatatcagccggatgtcatgaccctggatattgaaatgccgcgtatggatggcatagagttcttacagaaacttatgccccagtatcctatgccggttgttatgataagttcgctgagtgaccgtgtctttgatgccatgaacgccggagcggttgactttgttgcaaagccgacatccacagaccgaagagcaatcgaagaatttatccgcacggagttgccggtcaagatcaagatcgcgtccattgcaaagatccatcgcagacggacgcatgcggaagttgtaaatgccctgcatattcaaaagccgaccggaaaatgcgacctgatcgctatcggggcatcgaccggtggcacggaggcgaccgtcgatgtcttgcagggattacataaagatgtgccgggaatcgttgtggtacagcatatgccggcaggcttcacggaactgtatgccagccgcctgaacgagcagtgtgaattggaagtgcgtgaggcaaagagtggagatattgtcagaccggggctggtacttttggcaccgggcggtgatcaacatatggagttgataagacaggacaatatgtataaaatagtactcaaaaaggcaccaaaggtaaacggtcactgcccgtcggtagatgttttgttttcttcggtagccaagcatgccaaggaaaatgccatgggggtgatcctgaccggcatgggaggcgatggtgccaaggggcttttggagatgcgcaaaaacggatcccatacgatcggacaggacgagacgacctgtatcgtctacggtatgcccaaggtcgcttatgagatcggggcagtggaatatcaggaaaaattaccggatattgcaaaaagaatttataatgttttaaacaaataagggataaggagaggaaatatgaggattttactggcagaagacgattttgtaacgcgtaagtttatgatgaattttttgtcatcttatggagaatgtgatgcggctgtcgatgggatggaggcagtggatgcctatctcatggcattggaggacggagagccatacgatctggcatgtctggatatcatgatgccggtgatggacggctatcaggtcttgcgtagcatccgtgatctggaggctgatcacggcataccggaggaagaacaggtcaaggtcatcatgacaacggcgctcaacgatgaagaaaatgtaaagatggcatttgatctgggatgcagtgtgtattccggaaagccgatcaacaaagaaaaattcgatcaggcattaaagaaattaggcttgatatagaaaggagtctttcatggcagacgattttaatactggcgatatgctcagtgtttatctatttgaaaaccagcagcttctggaaaatctgcagaatatcgtaatggaacaaaaagatgcggatggctttgacgaagatagtatcaatgagatctttcgtaccatgcacacgatcaaaggatcttccggtattatgatgtttgatgagatcacaaaagtatctcataagttggaagatgtcttttattttatccgtgagtcccatccgaccacagtaccacatgtagaactggtggaacatgtgctggatgtctctgattttatcatggcggagatggacaagttatcggatggcggtgatgccgatggcgacgcgacagaactggtcgcaagtctggatgcttttttgcaaaagatcaagggggagaatggagccaaagaagcggataccaaaccggtacaaaaggaagaaacaccaaagcagttctatattgcgccggaaaccggtggcaacagtcactttttccgtatctatctgacttataatcctgagatccagatggcaagtatgcatgcctacaagacggtatttgccttaaagaagatcgccaaggacattttatactcgccggaggatatcctgacaaacgaggcgacatccgatgagattgttaaagatggatttaatatcctgatcaaaacagatgcgaccgaggaggatatccgcgagatcgtacagccgggctatgatctgactaaagttgaggtctatgaatgtacggcacaggaatttcaactaggattcgaggcagaggaggcacagattctgatcgatctggattcctccgtggaggagatcgaaaagcgggcggatgccaaagaggggcagacagatactgcaccgaaaaagaagatcgcacccggtgatttcgtcattgcttccaaggaaccgggcaagggcaagaacctggcaaaagagcgtccggcgaaaaaggataaggcttcctttatcagtgtcgacattgccaagatggatcaactcatggatctgatcggtgaactggtcatttctcagtcggtcgttttacaaaacccggatttgaaagtgccgggactgaatttagacaatttcaacaaggcagccgggcagatgaaaaagatctcgaccgatctgcaaaatgtgatcatgagcatgcgtatggtgccgctgaccaataccttccagaagatgaaccgtatcgtctttgagatgtcacggaaacttggcaaggatgtaacttttgaaatgatcggcgatacgacagaagtagataagaacatcatcgaacatatttcggacccgctcatgcatctggtgcgcaattccatggatcatggtatcgagaccaatgaggagcgattggcgagcggcaagcaggaaaaagccaaggtcacactttccgccaagacagaatccggcaaggtatggatctctgttgcggataacggaaaaggcttagaccgcgggcagatcatggcaaaagccagacagcagggactcttggaaccgggcagaccggagtcctcttatacagataaagaggtatatcagttcattaccctgccgggcttttcgactaacaagaaagtgacggagttctccggcagaggcgtaggtatggatgtcgttgtttccaacctgcaaaagatcggaggtacgttagagatcgacagcgtacccggtcagggaagtacaatgaatttaaagatcccattgacacttgccattattgatggcattgttatggatgtaggggattcttctttcgtcatggagacaggagccgtaagggaattcgtccatgtcacggaggatatgcttatccatgagccggatggcagagagtcggtcatgattcgtggggcttgctacccggtcatccgtctgggtgatttttatgaactgcatgactatgagaccaagattgaaaatggtatgatggttctagtagaaatagaaaaaaatgtagtctgtctatttgtagaccgtttggtcggcaaacaggagatcgtcgtcaaaccgataccggagtacataaaaaaggtcaaaggtttgtcgggatgcacacaactgggagatggaagcatcgcattgatattggatgccgccggtctgatggaatactaggaaaggacgaaagaagatgagtgagtttgacacacaaaaagacaaatatgtgactttccagtcggggagtgaatattttggacttaagatcgaatatgtcaatgagattattgtttttcaagagataacagagattccggaaagcccggaatatgtcaagggattgatcaatctgcgcggcaagatcataccggtcgtggatgtccgcctgcgttttcatcaggaaccgattccttatacggacaggacctgtatcatcgtgatccgttatgagcagatggtcgtaggtttgatcgttgaaaaaatcgccgaggtcgtagagataccggcagaaaacattttaccttccccttcgattggcaaaaatgataatgccaaaagccgattcgtatccggtataggtaaagttggaaatgatgtcaagttgttgttagatcctgtcaagttacttggggatgaagaagccgcactggtaggacatttgaataatgaagatgagagtgaagaaggagaagagtaacatgaaagagaaaaaagcaatcaaggtacacacattattgatctttgcgtttatcgtgccggagatccttttgatcattacgcagatcttttcgtataagtctgtggctaaggcacagcatggtatgatgtcaccgaaatacttacagtcatacaatctgtttttgtttgtggaattggtgatctgcattgcattgatcacgacggtctgcattacgatttccagaagcatccgcacttcattggcaagcctgaatgcggctgcaagagagattgctaagggaaatgtggatgtagaattaaagaaaaaacgtaatgatgagttcggcgaactggtagattctttccagatggtcgtagacaatatccgttatgagtcacaggtggcaggtcaggtggcagagggtaatctgatgatcgatgtcaagccatcttcggataatgatgcacttggcgcagcgctcaaggacatggtagagaagaaccagacaaccctgtctcatattaccgatgcagccatgcaggtatcgaccagttcttctgaggtggcaaatgcatctgaggcattggcacagggatctaccgagcaggcaagtgcgatcgaggagatcacagcctctatcagtgatgtagccggcaagaccaaggaaaacgcccaagaagcatccaacgcagcagagttggtagaacatgctttagataacgtacatagaggcaatgaccagatgagcgagatgatgaacgctatgcgtgatatcaacgattcttccgagagcatttcaaagatcatcaaggtgattgatgacattgcattccagaccaacatccttgctttaaatgctgcagtagaggcagcaagagccggagaagcgggaaagggatttgccgttgttgcggaagaagtcagaaaccttgcagcaaagagtgctaccgcagcatccgagaccgcagaactgatcgaagactccattcacaaagtcaatgcaggttccaagatcgcatccgagacagccaatgctttagcagagatcacaagcgccgtagaggagagcgaaggcattatccttggcatttccgaggcatccaattatcaggcaacggcgatcgcacagatcaatcaggcgatcgatcaggtctcccaggtcgtacagaacaactctgcgaccagcgaggaatgtgccgcagccagcattgaactttccaaccaggcaaaccgtatgcaggaacttttatcgacctatcatctgggagatatcagccatcacgagttgccggaaagatcttttaacgaagatgctgctgagacaccatacattcatttagatgatggatttggaaaatactaaaatggaatcctatgcagaaaatgatctgatcgatcatttgatggcgtttttgcacgagacctatgaaaaagaacctatgggcatggttatcgactgtgatgtcaatgtgcccaaaagactgacaggggatctgcaaacgacgcagcaggagattttacaaaagatacaagaggttttaagttatggcaagaccagacttttggtcatacgtctgacttatgaaagaagccttccgacaggtaatctgttagtactgatacagacacatcctgttcgggatcaggggcaggcaccgcatgaaatgatggggagaaccgagacattggttctccctcaattacttgtagaagaaggtccgcttgtcacctgtaaagaaccctgccaactgatcggttattatgaaagacaacaaaatacggatgcgggggagcgacaggcatatctgatcacccaggagcatctggccaagcaaatgggactgccttttgttctctgtggcaccatacagcatttgcaggcagaactgcaaaagaaaagagaagtctgtcttatgttatccatggcgcagtatgaggtgcatcaggcatacttttcccatctgccggagcatgtgcgtctgatcgtcttttgccggcagggacacaggatagaagaacgcacgaatcagattgctctctatgttccttttagcagtctggaactggcagatgccattgtcagtcctctgcctgaaaaagaggatgtcctgcctacgctggatgcatccgttggacggctctattgcggcaatgatgagatctaccataagatcttaaaagactatgctttgcggggaaaacacaactgggtgcggatagaggaactttttgccaagcaggattgggacaattacaggatcgaggtacatggaatcaagagttccatgaaggcgatcggtgctatggaactgtcagaggaggcaaaggctttggaagccgccggaaaagaaggagacatcctttatatcctgtcacaccacgaaaaaatgatgcagttttttatccgggatattcatagcatacaggcatattttgatatgccgctttcccctcgaaaagatgtgggagcggaaaacgaagaaagtgcatctgtcaacttatccgaagcagagaaaaaagaacttctgacgcagttggaagatgcagcatacgggctggatggacaggaaatgttaaagatacttcagccactggaggcgtccggcggttttgtggggcttttacaggaagtagagcgaaagatagacagcgaagattatttgtccgcctatgatctggtggaaaagagatttacctaaaaggagaaatggtatggcatacgtgatcggtgatttttcatttgaaacagaagaagatgcaagagaggcacaaaaggaagtccaggcgatctcctatattatgaagcagatcgataacgaagatcccaaggcagtattagcagcctatcagcagatggtaaaaaaagatctctttcatacaaaactcgggctgggatttttggaagacatgagaaaacaactgcttgcccttccggaaattgatgcggcagatctgccgccggttccaagccttccgccaaagccacagaccgagcggatactgatcaaggaagaagaagcaccggcacccaaaaggcctgtagaaaagaaagaaggggcaaagccggcgcctaagccaggagcagaagaaaatagagccgggggaaagagtgcatcccgcccgaccaggcagacaaaagaagaaaaagtagaaaaggcttcttgtaaggaaaaaaagcaaaaagagaaaatagaagatctgacgccagaaaaaatgacggtggctttgaaacgatataagaaattatctcgactacttctgatcgcatgtattaccatgctccttattatcattggcatgtttgccatcaatgcgaccagccagaatccgacgatcttgaattatgaagaaaagatcgtagacaagtatgcgtcatgggaagaagaactggatgccagggaacaggagttaaacgaaagagagcagaagttgaaccaatagggacttggagacgataaggtcacaattttgacataatatatgtgtagcatgagataaaacagtagcagaaagggtgtagtgtaagatggctggaaagaagatattgatcgcagatgacgaggcgagattgcgcaaactggtatcagattatctggtgcgtgagggatatgaggtattggaagccgcagatggtgagcaggcactggatatcttttaccgggaaaaagatctttccctcatgatattggatgtgatgatgccgggcgtggatggatttatggtatgtaaggaagtcagagagacctcccagatcccgatcgtcatgctgaccgcaaaaagtgaagaaaatgacattctaaacggttatgaatatggcgcggatgaatatattccaaagcccttcagtccaaagatcttggtggcacatgtcaatgccattatccgcaggacatcggatgcagatgacggcaacaaagacctcttggaagcaggtggtattgtcattgaccgcaaggcacatatcgttaccattgacggacaggagatcatcctaagcgtaaaggaatttgaactgctgacctattttatgcaaaatgcgggaatcgccttgtcgagagaccggatcttaaatggagtgtggaattatgattattttggggatgccagaaccatcgatacccatgttaagaaactgcgggctaaattaggcgacaagggcaattatatcaagaccatttggggaatggggtataagtttgaagtcgaagaataaagtacagagcatcaaccgccagatggcgggcatttacataaccatcatcgccttgacgatcgtggcaccgctcatcatcaatttctgctttttgggctatttttatcagcacgaaaaggaagaagccatgatctcgacctttgatttggtcaatcgggcggcagtcgcaggcagttttgatgacgaggaatttctggatgaattggaaaaggcgcatgctaattacagtatttccgttgtcgttgtagattcggcggcaaatgtccttttgacgacggcacatgacacggaggacatgaactcccagttgtattacgccatgtttggaaaacagatgcagggcagttcgggggcagaaagaagtggtgacaactatgtcatcaaacagcagatggatcaccggctgggcgaagaataccttgtgctttggggaacacttgacaacggcaatatcatcatgctccgttctgcgatcgagggtatccgtgaaagtaccaacctgaccaaccgctttttgatctggatcggtattctggcactgacgctgagtattttagcgactttctttttgacgagaaggatcaccaagccgattcttgccttaacagacctttccaagcgcatgatcggtctggattttcaagccaaatatcacagtcagaaaaagcgcaacgaggtggacgttttaggtgagcacatgaacgaactgtccgaaacgctggaagagacgatcgtggaattaaagcaggcaaaccatgaattgcaggcagatattgccttaaaagaggaaaatcagaaacggcagcaggagtttatctccaatgtttcacacgaactgaaaacgccgatcgctttgatccagggctatgcggaagggttggcagagggcattacggatgatgaggaaagtcgtgagttttactgtgatgttattattgatgaagccaagaaaatgaaccgtatggtcttgtccatgatctccctcaaccagatcgagaccggcaataacgagatggagtacgatcatttcgacatcgttgccttgctggaaggcatgatccagtccatgaagatcctcttgcagcagaatgacatcagcctgtcttttgcacacgatcaggagatctttgtctatgccgatgaatattcggtggaacaggtcgtcagcaattatctcagcaatgccattcattatgccaaaaatgaaaagaagatcgatatcaaactgacaaagaaagagcatgtactgcgcgtcagcgtatttaatacgggtgacccgatcccgcaggatagcatggagcatatctgggacaagttttacaaggtggataaggcgcgcaccagagaatatggcggcaccggaatcgggctttccatcgtcaaggcgatcatggagagcatggggcaggaatatggtgtgcaaaatcatgaaaatggcgtagaattctggtttgaagtcgagtgctgatttcagaaaaaggacaaatttttgttgaatattgccaataagaatgataacatgatagtatatatagaacaatatcatgtgcaaggagcgcaatatgaaatacaagaaacaggttctttgcgggttgatgttgtgtttctgcttatgcatgaccgggtgcggaaaattatatgtcatgaccgatgatgaggaaaatcaggtcgtgctttatgccgccaagatggtttccaagtacaaccgtgcacaggacacaggttactcttatgtatcggatgagcataaggacaagcaaaaggataccgacgtgggacaatcagacgatgcatcggtggatgagacgcaacaggagaaaacgcagatgacattgtcggatgttattggtatatccgggatcagtttttcataccagggatatgatatatcttcctcatatgaaacgacagatgttgccataccggatgcgggagagggctattcttatctgatcttacatgtgcaggtggcaaatacgacagatcaggctgtgacggtcgatctgatcaaccagccggtcacttatcaggtcaagatcaatgacgggacggcgatcgatggtatcacgacactttctatggcagatctttctacctattacaacaaatctttggaagcacaggcgacgcaggatacggtacttctttttcaggtcagccagaccgagttagagtccattgatacgcttcaactgctggttaccaaggatggacagacgaacacgattgatttaaacaattagcatacattgcctagtaggcatttgggaggaaaaaggtatggacactaatattttacttgagtcagggacaaacgaattggagattttggagtttaaggtagcggataatcactatggtatcaacgtagccaagatccgtgagatcttattgtatcaaccggtcactccgcttccaaattcacatccgtgcgtagaaggtatttttatgccgagagatacgatgatttctgtcattaaccttcgcagatgcttgaatattactgagccggctgagacagacggattatttatcatcaccaacttcaacaagttaaacacagcattccatgtagatgaggtacttggtatccacagagtatcctgggaaaatattatcaagccggatgcgactatcagtgcagatgattctgccgtatctaccggtgttgtcaagttggatgacaagttggtcgtgatcttagactttgagaagatcgtatctgacatcaatccggagaccggacttaaggtttcagatatggataattatgaggagagagaccgtagttcttctccgattctcattgcagaagattctccactcttgagcaagttgatctgcgaatgtctgcgcaaggcaggctacaccaatctgatcgtcaatatgaatggtcaggaagcatgggacaagttgtgtgagatgaatgagcgtggcacagtcttagatgatgttcactgtatcattacagatatcgagatgccactgatggatggacaccgcctgaccaaactggttaaggaaaatgatgtcatgaagaagattccggtggttatcttctcatctctgatcaatgaagagatcagacttaaaggagaatcccttggagcggatgcacagttgacaaagccggagatcggtaagttggtttcagccattgatggattgatcgagaaatacgaagcaaaccgcaaataatataaggtttagaagagggatgtgcttttgacacatcccttatctgtatgtaaataaccattttggaggtaacaatttggctaattcagaagattacttggatagtctgttgaattcggtacagaccgtgcgcaaggatgtcacggatgcccaaaagcagacagaagcaatcctgagagaaaaacaggaacagagaaacagaataaagccggatgatgattttatggaagccagcgggatccgtgattataagccggaaccgaccagccatgaaaatctgcgcaaggcattgtcagaagatgattttctcaagatgttcgaggaagaactgggcgaggatcttgatcagtcagatgactttatccgcgaatttgaagatgagatcgcgcaggatgaactggaatacgaaaagtccttccaagaggaagcatcgttagaagagacgccggaagaagaaatctcagtgccggaggaaactgtaaccggggaagatacggtagaaggaccagccgaggatcaggcatctgatgtgcagacatccgacgaagacagacctgcggatgatacggcatcttttctggaaaatatcgaagaggtcgtcaacaaggcaaaagagcagatcgaacagggcgatgatgacctgccggcgctggatggctatggcgaagatgagatggatgcggaatttgccgaggataagggagaaccggatgcggaggagtcgatcggtgaagcgggcgaggacctactggcaaagtatctacagatgaacgatgccgaggcagcagatgcagaagaaccgtctttattggacgaaaacgatgaagatatggatctcatgggacttttgtccggggatgaagatctggatgatataggcgctttgttacaggcagacggcgaggatcagcctttagaagaagcccaggagacctttgaacagttggcagaacagacagacccttctgcggatgcggaccccgaaggcagtccggcagaaggagacggggcaccgggcaaaaagggtttgggagccttgatcgataagatcaaatccatctttagcaaaaaggataaagaggaagatcaggtcttagatatctctcaggcaccgcaggaggatctgaatcaggaaaatctggatatcttgaaagaactttctgaggctgaacagaaatccaaaaaggcaaaaaaggaaaagaagccgaaaaaagagaaaaaaccgaaagagccaaaagaaaagaaggtaaaagtaaagaaggaaaaaccaccgaagccaccaaaggaaccggacaattctcctaagatcccagccaaggtcattgtcatcttcctggtactggcggtctctatcgttgcgctgatcacactcgcgcagcatatgatgggatataaattatccttaagtgatgcgagaaccgcatataatgcaggagattactttacttcctatgaagatctgatgggtatggatctaaaagaggcagatgaggatcttttcaagaaagcgagacttttgggtgatctgcaaaaacgggatcaggaatatcaggtctttgtaaaaagacagaagtatgagttggcattggattctctggtaataggtgttgccagatatgaggagaatttagacgaggcaaaagaacttggtatcgaggatgaatacaccaagttgggagatgcattagcagaacttttgcaggatcaatatggcgtatcaagcgaggatgcggtcgctatgtatcagttgaaccgcgaggattattcgctccgcattgatgaaatcattgcatccttgcatttagacgactaagaggaaaaggacaggatatgatagcaatactcgattatgatgccggcaatatcaaaagtgtagaaaaagccttgaaccatctgggacaggaaaccattctgacaagggatttccatgagatcctgcgggcggataaggtcatcctgccgggcgtgggttcctttggcgatgcgatggcgcacctcaagaaatacgaattagatcgtgccatccgggaagtcgttgccgagaagaagccatttcttggtatatgtctgggactgcagcttttgtttgaagcaagtcaggagacagagggcgttgagggacttggcattttaaagggacagtgcctgcggatcccggaaacagagggactgaagattccacatatcgggtggaattctctggattttccatcagagggaagactcttttccggtatttcagagggggcttatgtttattttgttcactcttattatcttcaggcagaagatccttccatcgtaaaagcaacctgccagtatggtgtgcagatccatgcatcggtggaaaaggacaatgtgtttgcctgtcagttccacccggagaaaagcggggaagtcggactggcgatcttacagaattttgcggatttataagagataggaagcgtgaggatatatgtttaccaaacgaatcataccatgtctggacgtcaaggacggcagagtggtcaagggtgttaattttgtagatttaaaagatgccggagatccggtggagatcgcggctgcctatgataaggcaggggcggatgaagtggtctttttggatattacggcttccagcgatcaccgggctacggtggtagatatggtgcgcaaggtggcagccaatgtctttatcccttttacggtaggcggcgggatccgcagcgtagaagatttccgcgttctgcttcgggagggcgcagataagatatcgatcaattcttctgccctaaaccgtccggaacttatctcggaagcggcagacaagtttggcagccaatgtgtagtcgttgccatcgatgcccaaaagcgtgcagacggcagtggctggaatgtatataaaaatggtggtcgtattgatgtcggtctggatgctgtagcatgggcaaaaaaggcagaagccttgggggcgggagagattcttcttaccagcatggactgtgacggcaccaagtccggttatgacattgcactcaccagaagcattgctgaggcggtttctattccggtgatcgcttcgggtggagcgggcaccaaggaacatttttacgatgctttgacagagggaaaagcagatgcggctctggcggcatccttatttcattacaaagaattagagatcatggatctaaaagcatatctggcagaaaaaggcgtatctgtcagaagataaaggagagatggcatatgcctgcaatttcaaatgattggctggcaccgctcagtcaggaatttcgtaaaccttactacaaaaaactatatgagacggttctggcagaataccaaagaggaccggtattcccaccggcggacgatattttcaatgcctttcatctgacaccgctttcagatgtcaaggtcgtgatcttaggacaggatccttatcataactataatcaggcgcatggcttgtgcttttccgtacgaccggaggtagagatcccaccatcccttgtcaatatctacaaagaattacaggatgatctgggatgctatattccaaataacggatacttggttaaatgggcagagcaaggcgttcttcttttaaataccgtacttaccgtgcgggcgcatcaggcaaattcccatcagaatattggctgggaggagtttacggatgcggtgatccgcattgtagataagcaggagcagccgatcgttttcctgctctggggcagaccggcgcagatgaaaaagaaacttctgacgccaaatcccaatcatttgatcctggaggctccacatccgagtccgctttcggcttatcggggcttctttggatgtaagcatttttcccagaccaatgccttcttggaggcgcatggtgcagcccctattgactggcagatcgaaaatattgtataatctgtataggattaggtgaaaaaggttatgaaagcaagcctttttgccgaaaataagtatataagtaagtaacgtacatggatgttttttatcaaaggagtgatgaaaatgggacttaccgtatcaggatatgattcttccagtatcagcacattgttctccagtttgaacagttcgagcagcagtggtggatcatctctttcctctatgaccagtcttttaggggaatacaatagtatccaatcaggatcttatttcaaactgcttcgctcttattacacaccaaagaacggaacagatacaacgacaacgaccgataaggacaagttacagacgacggacaagcagatggcagagtggaaaagcgatgctaccgaactgtcggatgcggcgaatacacttttgaaaaagggaaccgattccttattcagcaaggttgaacaaaaggatgcggatggcaagaccacctatggttatgatacagacaagatttactcagcggtcaagaagtttgctgatgcctacaatgacatgatcgatagtggcgacggtgccagtctttccggtgtacgctctgcggtatccggcatggagggattgacttctgccaattcttctatcttaaagagcattggcatcagtgtaggcagcaatgggcatttgtctgtggatgaggcgacttttaaaaagtcagatatgacggttgccaagtctttattccagacatccggcggctatggctatcagatttctgcaaaggcttctatggtcagaagcagtgtactttcacaggcttcgggcggttcttataccagaacgggtgccatttccatgaatgaccttatgtcgacctatagttcttatatttaatatgattgatgatagagccgaactctggaaggggactggctctattttttatgtaataggaaattccactgatacttataaatgaaagacgtgtgataagacagactaatcaatcacattaggaaaagcgcatagtaaaaaacggcgcgatacgttataatcatcttatgtaacaagccatatagcatagactagaaaattttaggaggttatttcatggaaatgttatcattagaagcggaattacagtcaaatgcctacccgggcagaggtatcgtgatcggtaagacaccggatggcacgaaggcagtgaccgcctattttatcatgggcagaagtgagaacagccgtaatcgtgtatttgtagaggacggagaaggcattcgcacacaggcatttgatccatccaagttgagtgatccaagtctgatcatctatgcgcctgtccgcgtgcttggcaacaagaccatcgttaccaatggcgaccagacagatacgatctatgaactcatggacaagcagatgacatttgagcagtccctgcgtaccagagagtttgagccggacggaccaaactacactcctagaatttcaggtatcatgcatatcaaggacggaaaatacaattacgccatgtctattttaaagagtaacaatggcaatccggatgcctgtaatcgttatacctttgcctatgaaaatccggtcgcaggcgagggacattttatccatacttacaagtgtgacggcaatccacttccgagttttgaaggagagccgaaactggttgccatcgaagacgatatggatgcttttgcagacaagatctggaagtctttaaatgaggacaataaagtttctctgtttgttcgttatatcgatattgcaacaggaaaatatgagtcaaagatcatcaacaagaacaagtagatagtattgattatataaaggggacgaaaatatgcaggaattagaattaaaatatggatgcaatccaaatcagaaaccatcacgtatctatatggaagagggcgaactgccgatcaaggtgctttgcggtaagccgggatatatcaatttcttggatgcttttaatggctggcagttagttagagaattaaagcgtgcaacaggtcttgctgcagcaacatcttttaaacatgtttctccggcgggcgcagccgtaggactgccgctttctgacgtagagcgaaaaatctactgggtagacgatatggatatggaatttaccccgcttgccaatgcctatgccagagccagaggggctgaccgtatgtcatctttcggtgattttatttcattgtccgatgtatgtgacaaggcaaccgcacttttgatcaagcgagaggtgtctgacggtgtcatcgcaccgggctatacggatgaggcgttggagatcttaaagcaaaagaaaaagggcaattataatgtgatcgagatcgacccggattatgagccaaagaagatcgagagaaaagaagtctttggcgttacgtttgagcagggaagaaatgaactggtcattgatgacgatttcttctccaatatcgtgaccgaaaataaggaacttccggagcaggcaaagatcgatctggcacttgccatgatcactttgaaatacacgcagtccaactctgtatgctacgcaaaggacggacaggcaatcggtatcggagccggtcagcagtcacgtatccactgcacacgtctggcaggaagcaaggcagataactggtggctgcgccagtctccacaggtgctgggactgcaatttgtagacggtatccgtcgtgcagatagagataatgccattgatctgtatatcggcgaggattatatggatgtgcttgcggatggcgaatgggaaaagatctttaaggtaaaaccggaggtctttaccagagaagaaaagagagcatggctggataagaacacaggcgttgctttaggatccgacgccttcttcccatttggggataatatcgaaagagcccataagagtggtgtggcatatgttgcacagccgggcggatctatccgcgatgatcatgtgatcgcaacctgtaacaaatatggtatgacgatggcgtttaccggcatccgtcttttccatcactaatcagaaatttttcagtggggacgttccttttgccataaggagtgtcccctttttatgaaaactttctggtatattcgtttggaaaaaactgtccggtcttattggaaagcatcatgcgataaacatccgatgcaaagatgtccttatccaaaaggtgcatggcctccggtgagaggagtcccttggcattctgggggcttgtgattagaggaacagttccgttttttttgatctgttttaataaaggacgaccattatctgaaaaacctaagatgcgtagatatggcgccagttctttcgcatcgagagggcaagtatcgtttggcaggagcatatcttgcttttttatatccaaaagaatatggcataaaacgcgggagatcctgctataggcaagatctttggattttaacagttgacagaaagaatgaaaacttgcaaataaatgtcgattctgcaagattttattcgaaatatcaaaattagaatcggcgatctctgtaaagttctgcgtttccgtcaatgcatagtgcaacagaagcgaagtgtcatctgcaaaaagaaattgtccgtcatggatcaattctttcacagaagcatgcaaggcttccggaatctggtctaaaagcagggcaagttcctggtcgctcatctgcggatggtctaccagaaaatgccggaggccggaggcagatgccatgtcctcatccagagaggtttcgtgatagccggcaccctgtctttgcagacaaaggggtgtcatggaagaatctaagcgggagagagcccctagatattctatggctaagatattgttgggctgggctaagatctcagcataggcaggattttctatggcttttgcgcgggcagcggcataggaggatccctcctgcaaagcctggcgcaggagcgcctgataggcaggggattcttcagatagcctgtctgcaatattttttaaagccgcaagatcaggacattcgctgccgaataagagggtatccaccagccctgcattttgcaaaagagccacaccgccggtagcaaagatctgggcactggcggtcgcatagacgaccggaagttccaagaccaggtcggcaccgcaggcaagggcatggcctgcccggctgtacttgtcaaaaagtgccggcgtgccacgctgggtaaaaggaccgctcatagcaacgatcacatagtctgcgccgagcctttctttggcatagcggatctggtatgcatgtcctttatggaatggattgtattctgcaatgatgcctacgactttcatgtatggtctccttgaagataaatgcaatattgatattaaaacgatagcataaaggcgatcgggcgacaagcgacaaatcatattctgccatgcagattgaacttaaataaatccatactggtatcttgtaccaaaaaatatttgatagtataatagatttaagtttgggcttgtcccaagaaaaggaaataagaaatggagagataaacgatgaatattttagttatcaactgtggaagt

SEQ ID NO: 12529 - DNA, 13598 bp, Unknown
  gut microbiota DNA sequence
tcattgattctgaaagcgaatctgtacttgcaaagggactttgtgaacgtatcggtattgacggcagacttgtatatcagaagaccggtctggataaggagatcactgagacagatatgccaacacataagcaggcaatccaacttgtgatcgaggcacttatcaacgacaagacaggcgcgatcaagagcctggaggagattgatgccgttggacaccgtgtcgtacatggcggagaaaagttcgcatcttccgttgtacttaccgatgaagtattaaagaccatcgaagagtgtaatgatcttgcaccgctgcataatccggcaaacctgatcggtatcaatgcctgcaaggaacttatgccaaacgtacctatggtaggtgtttttgatactgctttccatcagaccatgccgagaaaggcttatctgtacggacttccatatgaatattatgagaagtatgcagtaagacgttatggtttccacggaaccagccatagtttcgtatctaagagatgtgcagagtacttagacatggatctgaaaaattccaagatcatcgtagcacaccttggaaacggcgcatctatcagtgctgttttaaacggcgagtgtgtagacacttccatgggactgaccccgcttgaaggtcttgtcatgggaacccgttctggtgatattgatccggcaatcatggagttcatcgcaaagaaagaaaacttaaacatcgaagagatggttactgtattaaataagaagtccggtctttccggtatgacaaagggcggatccagcgacttccgtgatctgcaggctgagatcaaggctggcaaccagttggcagcagacgctgttgaagtattctgttatcgtgtagcaaaatacatcggttcttatgtagcagccatgaatggtgtggatgccatcgcatttaccgccggtatcggtgaaaatgttgcacttgtccgccgcaaggtatgcgaatacttaggttatcttggtatcgctattgatgaggagaccaaccttaagactttcggtgatgaagttaccttatctacaccggacagcaaggttaaggtatgcgtgatccctaccaacgaagaacttgctattgcaagagaaacggtagcacttgtaaaataagaaatagggcgaaaaagttgttgacaagcgcctgacatctatgtataatagtttgagtgtgaataggagagactatgaagtttgatattttagatgtcatttctacagccgataagaaacgggagatacctgttacaacagagatgtcagaagtttctgtgagcggaggaagatttcctattaccgacattaagccattcagtatatgtctgacaaatgataacaataagcaattattgatttcaggtgacactactctggatgtggtagttccgtgtgatcgatgtctgtcggatgtcgatgttacactccagattgccattgatcgcaaggttatgcttgcagatggtcatgtgcaatttgcagaggacgaggaaaatacctttctggaggaacatgagttagatgttgacagactgatttatgacgaaatcttggtgaactggccgacaaaagtcttgtgtaaggatgattgcaagggtatttgcccggtgtgtggtcagaatttgaaccagcaggactgcggatgtgatcgtcaggtaatagatccaagaatggcaaagttccaagatatctttaatgaatttaaggaggtgtgacccgatatgtcaatttgtccaaagaataagtcttctaagggtagaagagataagagaagagcaaactggaagatgacagctcctacattagtaaaatgtagcaagtgtggagagttaatggttccacatagagtttgtaagaactgcggttcctacaataagaaagagatcatcgctcaggactaagatgaaacaggaggctttccaatttcggaaagccttatttttttgctctttttctggggagatttggtgttgatttataggtacacttatagtatatttttcttataatgcatttttatgcataggaggaaggcgtatcatggataatataaaagtcgtagcagtagatgctatgggtggtgataacgcgccggtagagatcgtcaagggatgtgtagaggcagtcaaggagcgggaagacatcaaagtccttttggtggggcttgcagatgtggttcaggcagaactgaccaaatacacctatccgacagaccgcatcgaggtcgttccggcaagtcaggttatcgagacagcagaaccaccggttatggcaatacgcaaaaagaaagattcatcgatcgttgtggcattaaaactggtcaaggaaggcaaggcggatggctttgtttccgcaggcagttccggggcggtcttagtgggcggacaagtgatcgttggtaagatcaagggcgtagaacgtgcacctttggcaccattgatcccgaccaagaaaggcgtatcgcttctgatcgattgtggagccaatgtggatgcgagatcttcccatctggtacagtttgcgcgtatgggatcgatctacatggagcatgtcgtaggtatcccgaatccgaaagttgccattgtcaatattggcgctgaggaagaaaaaggaaatgctttagtcaaggagacctatcctttattaaaagaatgtaaggacatcaattttataggaagtattgaggcgagagatattccgtcgggacaggcggatgtcattgtctgtgaggcatttgtgggcaatgtgatcttgaaattatacgagggactcagttcgacactgatcggtgttataaagacaggtttgatgagtaccttaaggagcaagatcggagcggcactggctttgccggctttgaagaacaccttgaaggcatttgatgcatccgcatatggcggagcaccgcttttgggtttgaaggggctggtcgttaagacccacggcagttccaaagcaaaagagatcaaaaattcaattattcaatgtgtgtcctttaaagaacaggatattagtggtaaaatacaagcaaacatttgcgtgggagataagacagaatagaggaggtaattcgagatggaattagaaatgctgagaaaggtcattgccgaggtcttgaatgtggatcaggcagagatcacaatggataccacatttgtggatgatcttggagcagattcacttgatgttttccagattattatgggaattgaagaagaacttgacattgaagtgaatgtagaagaggctgaaaagatcgtgaccgttggcgatgctgtagaattgatcaaaaagacggttggttaatcgaacagaatgttagatgacaaaagcccttggttcaagggcttttgctctgttaaggagaaaaaagtgaagacaatcaaagagtttcaggaagtaataggatatgagtttgaaaacgaaagtttattgcgccaggcactgacccacagttcttatgcgaatgaaaagcatatgaaaaagttatccgacaacgaacggttggaatttttgggcgatgctgtgcttgaggctgtttccagtgaatttttgtttttgaattacagggatctgccggaaggagatcttacgagacttcgtgcaagtatggtctgtgaaccgactcttgcctattgtaccaaagagatcgatctgggatcttatatctatctgggcaaaggagaggacatgacagggggcaggacccgcaaatcggtcttgtcagatgccttggaggcagtgatcggtgctatctttttggatggcggttttgacgctgccaaagcctttgtgctccgttatatcatgacggatattgagcacaagcgcatgttttatgacagcaagaccattttacaggaagtgtgtcaggcaaagttccaccagaatgtgacctatcatcttctgggagagagcggaccggatcacgccaaagtattccatgtggatgtgacggtgggagatcacaaattgggcgacggcagcggcggtacgaaaaaggcagccgagcaggaagccgcttatcatggactcttgtatttaaagcagcaggagagtcagaacaaatagaaagtttttggggaagaatatgtatttaaaaagcattgaaatgtatggattcaagtccttcgcaaataagatcgtatttgattttcataacggcatcaccggcattgtaggaccgaatggcagtggaaagagtaatgtttccgatgcggtccgctgggtacttggtgaacaaagtgccaagcagttgcgtggtgcgagcatgcaggacgttatctttgcaggaacagagaaccgtaagccgctcagttacgcttatgtagcgatcacgatggacaactcggatcatctgcttccgattgattatgaggaagtgacgatcgccagacgtgtctaccgttcgggtgagagtgaatatctgctcaacggttcgccttgccgtctgaaagatgtcaatgaacttttctatgataccggtatcggtaaggaaggttattccatcattggtcagggacagatcgagaggatcctgagtggcaagccggaggaacgccgtgaactttttgacgaggcggtcggcattgttaagtttaaaaagcgcaaagccgcaacagtcaaaaaactggaacatgagcgggaaaatctggtgcgtgtcaatgatattttatccgaattggagcgtcaggtaggacccttggagcgtcaggcagagaatgccaaacttttcttaaagaaaaaagaggagttaaagaccttagaagtcaatatgtttttgcttgagattcaagatatgaaccgtcgtctttccgagatcgagaaaaattatcagatcgccgaaacgcagatgacggaaaataaggacaagcaggaaaagatcaaagaccagtatgcatctctggaagaaggattaaatgccatggatgagcagattcagggtatccgtgaggaacagagcaatacaacgcttatgaagggcaaactggaaaaccagatccgcattttggaagaacagatccgttttgcggagagtgctgatgagaatctttcggaaagaaagggtgccttagaggcggaaaagaaagaatatatccgtcaaaaagatgcctacgagactgaaaaagcccagttgcaggagcagttggaagaagtggaaagacgtcttgcttctgtgcgtaagttcaatgatgacttgcaggcagacatcaagaaatacacggatgggatcgagcagaacaatcaggctatgatggaacttttaaatagcaagggaaccatccaatccaaagagcagcgtctggataccatgttggagcagatcaatatccgcaaggcacaactcaaccagcgactcttacagcgtaagacagaggaagtagatctgaatgaaagactaaagtgttgccagaaggaatatgaagacgccaagtctgccttagatgccagcaagcataaggaagaagaatacggacataaggcggttgagtggaagaacaagcgcagggaagcccagaaccgtctgacaagcagtcaggatgactataataaattatcttccaagttggaggctttaaagaatattgccgagcgctatgacggctacggcaacagtatccgcaaggtcatggagcaaaaggacagcaatccgggcatcattggtgttgtttccgatctgatccatgtagagaaaaagtatgagattgccattgagacggcacttagcggtaatatccaaaatatcgtgaccaaggatgaggcaaccgccaaaaagatgatcacttatctgaaagaaaatcgtctgggacgtgcgactttcctgccactgaccagcgtttccggcaagggctttgccaaggataagagcattttatccgatacgggtgtgctggggcttgccaacgaattggtggaggcagatgcagagtatgccaatgttctttcttatctgttgggacgtgtgatcgtggtcgatacggtcgatcatggtatcgcattggcaaagaagaatcattattctttacatatcgttacactcgaaggcgagtatttcagtccgggcggatctctttccggtggacgtttcaagaacaacagcaatctcttaggaagaaaccgtgagattgatgatctggaaaagaaactggcatccctgcgggatgaaaaaaaggcagcaaaggaccgcatcgcagagattgagaccgcacaggcgctcttggaggcagaccgcgaagaaaaccgcagcgagatggagaaaaatgcacttgcctgcaacacggcgcagatccatttgcagcgtgtgcaggagcagaagtccgaaagccagaatgctttctccagtctgaataccgagagcgaggagatggagcgtcagttgcgtgacatcgctgccggcaagaaagagatcgagcgcgagcgtagcgaagctgcccaaaaggaacaatccttaaaagagcagaccgaggaatatcagaaacttttggatgaaaagacctatatggagacatcggcagcccgcaatgtttccgaggcacagatcgaagaagccagtgccagacaaaaagttacttttgtcatggaaaactgccagcgtgtcgcaagcgagatcgagaagaaggaagccgatatcgttcgtctggtagaagaagcccaaaatggcaaggaagatgccaataaaaaacgcggcgatattgaagaaatcaaaaagaccatgatcgccagcgatgacaacttcgcaacactggaaaaacgtctgaaagaagccttggaacaaaaggatgctatgaaccaggaatacaagggatttttcggacagagagaagagatcgcagaccgcatttctgctttggataaagaaatctaccgcttgaattcacagcgtgaaaagttggaagaagccatcaattatcagaacacctatatgtgggaagaatatgaactgacccagcgtggggcagaaaaactccgcgatccggaatatgataatttggatgagatgcgaagggcaacatccggtgtcaaggatgagatccgtcgcatgggaaatgttaatgtcaatgcgatcgaggaatataaggaagtatcggaacgatacaatttcttaaagggacagcatgacgatctggttgaggcagagcagactttgatgggtattatcgacgatctggacgagggtatgcgcaaacagttcacggaaggttttgccgatatccaaagagagtttgataaggcatttaaagaactctttggcggaggcaagggtacactggaattggtcgagggtgaggatatccttgagactggcatccgtatcatcgcacaaccgccaggcaagaaactgcagaatatgatgcagttatccggtggagagaagtcactgacggcgatcgcgcttctttttgccatccagaacttaaaaccgtcaccattctgtctcttggacgagatcgaggcggcactggatgactcgaatgttggacgttttgcaaattatttacataagttgacgaagaacacgcagtttattatcattactcatagaagaggtacgatgaatgcggcagacagactctatggtattaccatgcaggaaaagggtgtatctgcactggtatccgtcaacctgatcgaaaatgatttggatgcataaggagagaaaaaatggcagaaggcggatttttcaaacgattactggcaggacttacaaagaccagagataattttgtcaaaaacatggactatattttccggggctttaccaatattgatgatgagttttatgaggaactcgaagagatcctgatcatgggtgatattggtgttaccacaacggaaaatatcttagaagatttaaagcgcaaggtcaaagaacaaaagatcaaagagccggcagagtgtaaggaactgcttatagagagcatccgacagcagatggatatcggtgaggcggcatatgaatttgaaaaccgtacatcggtcgttttggtggtcggtgtcaatggtgtgggcaagacgaccacgatcggtaaattggcagccaagttgcgcgcacagaataaaaaggttcttctggcagcagcggacactttccgtgcggcggcaggtcagcagttgaaagaatgggcaaaccgttcccaggtggatatgatcggcggacaggaaggctctgatccggcctccgttgtctatgatgctgtatctgcggcaaaggcaagagggtgtgatgtgctcctgatcgataccgcaggcagacttcataataagaaaaatctcatggaagaactgcggaagatcaacaatatcgttgaccgcgagttcccggaggcttatcgggagactttggttgtcttagatggtacgaccggacaaaatgcgctcaatcaggcaaaggagttttcggaggtcactgatctaagcggtatcgtgcttaccaagttggacggtacagccaagggtggtatcgcggtggcgatccaggcagaacttggcataccggtcaagtatatcggtgtcggtgagtcgattgaggatttagagaagtttaatgcagaagaatttgtgaatgcattgttttatacagaagaacagtaaaggagaaaaagatgttgacattagacaagtttgaagaagcaagtaagatcgtcagcgaagttactttggagacaaagttgatctacagtgattttctgagtgaaaagtgtggtaacagcatttatctgaaaccggaaaatatgcagttgaccggggcttataaggtaagaggcgcttattataagatcagcacactgacagcagaggaaagaaagaagggactgatcacagcgtccgcaggtaaccatgcgcagggtgttgcatatgccgcaaagaaatttggagcaaaggcaacgatcgttatgccgaccacaacaccgctcatcaaggtaaaccgtaccaagaatttaggggcagaagttgtcctttatggcgatgtctatgatgaggcatgcgcaaaggcttacgaactggcagatgagcatggatatacctttatccatccttttgacgatctggcagttgcaacaggacagggtacgatcgctatggagatttttaaggagttaccgctggtagaatatatcctggttccgatcggtggcggcggacttgctaccggtgtatcaacactggcaaaacttttaaatccaaagatcaaggtgatcggtgtagagccggcaggggcaaattgcatgcaggcatccatcaaaaacggaaaagttacaacccttccgacggtcaatacgatcgcagatggtacagctgtaaagacaccgggaagcaatattttcccatatatccagaaaaatttggatgatatcatcacagttgaggatgatgaactgatcgcagcctttctggatatggtagaaaaccacaagatggtcgtagaaaattccggactgcttaccgtggcagccttaaacaaattaaatgtcaaaggcaagcgtgtggtttctatccttagtggcggtaatatggatgtcatcaccatgtcatctgtcgttcagcagggcttgatctttagagaccgtatctttactgtatccgtactgcttccggacaagccgggagaacttgcaagagtcgcagagacgatcgcaggggtacagggcaatgtcatcaaattggagcataaccagtttgtaacgaccaaccgtaacgcagccgtagaacttcgcatcaccttggaggcatttggcacagatcataagaaccagattttagatgcccttgaaaagggcgattatcagcccaagattgtgagaacgagtttgtaagagcaaaatataaaaatacaagcaggtgtcaagaaaaaatacttgacacctgctttttgctatagtatattatacgaggtgatgatatgaacgataagattgagcagggagatctttatgatttctatggtgaacttttaaacgatcatcagagaagcatctatgaagatttcgtactaaatgacctgtctttgggagagatcgcagccgatcgaggcatcagtcgtcaggcggtgcatgatgtgatcaagcgatccactcgaacattagaagaatatgaggacaagttacatctgattgaaaagtttgttcatatcagagacaaagtgaggacgatcgatactttggttcacactaccgatcaacattctgtggaagagatcttagcacagatcacaatcatatccaacgatatcctagaggagttataagatggcatttgagagtctttcagacaaactacaaaatgtattcaagaaccttcgtggcaagggacgtctgagcgaggaagatgtcaaggctgctcttaaggaagtcaagatggcactcttagaagcagatgtcaatttcaaagtcgtaaagaactttgtcaagacagtgcaggagcgtgcgatcggtgcggatgtcatgaacggtctgaatccgggacagatggtcatcaagatcgtaaatgaagaacttacgaatctgatgggatctgagacgacggagattgcttatcgtccgggacagcagattacggtcatcatgatggtaggtctgcagggcgccggtaaaacgactacgactgccaagttagcaggtcatgtaaagaaaaaaggcaagaagccgctcttggttgcctgtgatgtatatcgtccggctgccattacccagttacagatcaacggggaaaagcagggtgtaccggtattttccatgggagacaagaacaagccggcagatatcgcaaaggcatccatcgagcatgcaaagaaaaacggctttaatgttgtgatcctcgatactgcaggtcgactgcatatcgatgagggcatgatggatgagttggtagagatcaaggaatccgtagatgtggcacagacgcttttggttgtcgatgccatgaccggacaggatgctgtcaatgtagcaggtactttcgatgagaagatcggtattgatggcgttgttcttacaaagttagatggtgataccagaggtggtgcggcactttccattcgtgccgtgacaggcaagccgatccttttctgtggtatgggagagaaactggatgatctggagcagttttatccggatcgtatggcatctcgtatccttggcatgggtgatgtgctttctctgatcgaaaaggcagaggcatccattgatgaggacaaggcaaaggacttatcccgcaagatgcgcaaggcagaatttgattacaatgattatctcgactctatggcgcagatgaagaaaatgggcggtatcggcagtgtgcttggtatgatgccggggatgatcccaggcatgaacagtgcgcaggtctcacagttagagggcgctattgatgacaaaaagatggcacacatcgaggcaatcatcctttcgatgaccccggaggagagagccaatccaaaacttatgaatccgagtcgtaaaaagcgactggcaagaggtgccggcgttgacattgcagaagtcaaccgtttcatcaaacagttcgatcagacgaaaaagatgatgaaaaaaatgccgggcatgatgggtggtaaaagaggaagaatgaaatttcctttttaacaacataaatttataatttttaatttcttaggaggaaaacaaaatggcagtaaagattagattaagaagaatgggacagaagaagaatcctttctacagaatcgtagtagcagattccagatcacctagagatggtaagtgcatcgaggagatcggaacatacgatccaaatcaggatccttccgtatatcatgtaaacgaagagttggcaaagaagtggctcgctaacggagcacagccaacagagactgtagcaagaattttcaagcaggctggtattgagaaataatccataaaaacaggcattgaaagaacgaggtattaggtgatgaaagaattagttgaagtaattgcaaagtcactggtagattacccggaggaagttgttgttacagaaacagaaaatgacaagaccattgttgttgagttacatgtggcttcatcagatatgggcaaggtaatcggcaagcagggacgtattgcaaaagcaatccgttccgtagtgaaggcagcagcctcaaagtcggataaaaaagtcgttgtagatattgtataagactaagatccctaattgccatgcgaatgtatggcggttggggatttcttcttatataaaagaataattttgggagagaagtatggatttgtatcaggtgggcgcgatcactcagacgcatggcgtccggggcgaggtcaaggtatttcctttgacggatgatgtgatgcgctttaaaaatatgaaagatctgatcttagataccggtcgagagcagattacgctggaggtgacctcggcgagaccacagaaaaatctggtgatcttaaagttcaagggctatgacagcatcaatgatgtagaaaagtacaagggcgccaagttgtatgtgacaaaagaaaatcgtgttgcatgtgatgaggatgagtattttattgcagatctgatcggacttacagttgtgacggatgatggaagtgtacttggtacactgacagatgttattacaacaggggcaaatgatgtctatgcagtaaagatggagtcgggaaaagaacttttgattcctgccattcatgactgtattttacaggtaaatgatgacgagagaaaaatgacggttcatttgctggatggactgttggatgaggagtaatcacgtgaaatttttcattttgactttattcccggagatggtaatgcagggattgcatacaagtattatcggtcgcgccgttgagaagggaaaaatatccatcgaagcagtaaatatcagagattttacgacagaaaaacatggtaaagtagatgattatccttatggcggcggtgcgggcatggtcatgcaggcgcagccgatctacgatgcgtggaagtctgttgtcgatcgtgtggaaggcagtgtacgcaccatttatctgaccccccagggaaagacttttgtacagaacgatgcaaaggaactggctaaggaggaaaatctgatcctgctttgcggccattatgaaggcgtcgatgaacgggtattagaggaggttgttaccgattatatgtccattggggattttgtccttaccggtggtgaacttcctgccatggtcatggtcgatgctatttcccgtatggttccgggcgtgctttccaatggagactccaaagagacggagagttttgaaaataatctcttagagtatccacagtattccagaccggaagaatggaatggcaagaaggtgcctgccattcttttatccggagatcatgccaaggtggatgcctggcggcatgaacaatccctgcttcgtacaaaagagaggcgaccggatcttctggcagcagcggatctttcaaaacaagatcgggaatttttagaaaaatgtaaggaaatagaataaatacttgccttttgcacgggtttatgatattatcaacgagttgtgaaaagagatggtcctctggtacgcatgtatt

SEQ ID NO: 12530 - DNA, 43441 bp, Unknown
  gut microbiota DNA sequence
caagataatttaattaggaggtcacaaaatgagcgcaaatgaaatcatcaagaacattgaagcagaacagttaaagtctgaagtagacgagttccacgtaggtgatactgttagggtacacgctaagatcaaagagggtaaccgtgaaagaatccaggtattcgaaggtactgttttaaagagacagggtggaagcaatcgtgagacatttactgttagaaagttctctaacggtgttggagtagaaaagacatggccagtgcatagccctaacgtagagaagatcgaagtagtacgtcgtggtaaggtaagacgtgctaaacttaactacttaagagatcgtatcggcaagaaggctaaggttaaagaattagttcagtagtaagaccagaagagagcaaccacaaatgtggttgttcttttttttcatatcgtgtatagtaatataggattgttatatatccgataaatgagatatgataataggatgaattatgaataaaagacagattatacgcatggcgaggcaggtagggaaaaaaataggcactggtagaagtgggctgaatttccgccgccgacgtcgcaagatacagggtgaaaaagtccgctatgtcagtatttggatcgcagagatcttagccgttatcgccttagcctttcttgttaccttaggctatggcaaaagaatctcctgctcgggagaatccatggcaccggcagttgcggaaaatggcagtgtgctggtcgatcgtgtggcatatcacatccggtcaccgaaaaaaggggatgtcgtggcttttacaccaaagggcaataccagtgccaacgataatgtcaagcgtatcgtggcggtgccgggggatacggtgcagatcaaaagtggtagactttatgtcaacggaacagccacaaacctcaaacagaccggattgtctattaaggatgccggacgggctgagacggagatcaccttaggggatgatgagtactttgtactgggtgacaatgtcaacaacagtgaggatagccgctacgaatccattggcaatgtgacgtgcaaggaaatgataggaaaggtatggttctgtttatccctcaagggattcggaccggtaaactaggagtagatatggaatttcaatggtacccgggtcatatgaccaaggcaaaaagacagatgcaggaggacataaaactgatcgatctggtgatcgaactggtggatgcaaggattcctctgagcagccgcaatccggatatagacgaactgggcaagcagaaggcaagactgatcttgctgaataaggcagatctggcagaccctaaggtgacagcaggctggaaaacatattttcaggataagggatattttgtcgtaaccctggattcccgcaatcgcaagggcatgaaggaagtgacacaggtcgtcatggatgcctgtgccaaaaagatcgaacgagaccgggcgagagggatcaagaaccgaccggtgcgtgctatggtcgtaggtattccaaatgtaggaaagtcgacctttatcaattcttatgctggaaaagcctgcgccaagaccggcaataagccgggcgttaccaagggcaagcagtggatacgcctcaataaaaatgtcgagttgctcgatacaccgggcatcttatggccaaagtttgaagatcagacggtcggactgcatttagcatgcatcggctcgatcaaagatgaacttttgcagacagaagaactcgccttagaactctgcaagatcttaaaggacaagtatccgggggctctggcagggcgttatcagatcgatgagacaaaagaagttcttactttcttagagcagatcgctgaaaatcggaattgccgctctaagggaaaccagttggattacagcaaggcagcccttctggtgatcgatgatttccgcagcggaacgatcggcaagatttctctggaatttccggagaaaataaaaaaggaagagacggaagtataaaatgacacaagaacaaaaaagtacaaaaaaaccggatcaggcagagcagacatcaccggcacatgagatcttaagtttgcttttatatatcgttattgtttttggcatctgttttttgatcataacctttgtgggacagcgatcccgcgtgagtggttcttccatggaaccgacactttccgatggggacaatctgatcgtggataagatctcttaccgcttacatgatcctgagcgttttgatatcatcatcttcccttatcgatatgaagaaaacacctattatatcaagcgtatcatcggtcttccgggcgagacggtctacatcaatgatgccggagagatctatatcaacggcactcttttgaaagaaaattacggactggagaccatccagaatccgggactggcatcggaacccatcacactgggcgatgatgaatactttgttatgggtgacaatcgcaacaacagtaccgacagccgttttgcctcggtaggagcgatcaagcgtcaggacatcatcggtaaggcatgggtgcgtatctatccattcaacaagatcatggtcatcaaacaccagtagcatttaggagaagtcgtggatatggaaaaaaagatcaaagatatccagcaggaatacaaggaaaaagacgatctggaattgccggattttattgaagaatacataagagacggcagaccgggtgttgccaagatcatcgggcaggcgaaaaaaagactggaccggttagaacaggaaaggcagcgtttggaggtcttgcggacttatgagcaccgctatgaagatgcataccctatgatctgtggcattgatgaggtgggcagaggaccgcttgccgggccggtgtgtgcggcggcagtcattttaccaagggattgtgagatcctttatatcaatgattccaagaaattatcggaggcaagacgtgagtcgctctatgatgagatcatggaaaaagcagttgcagtaggtcttggttttgcttcgccggaaaagatcgatgaggtcaatattttacaggcgacttatattgccatgcgtcaggcaatcgcagaacttgcggttgcaccggatcttttgttaaatgatgccgtgaccataccggaggtatccgtcaaacaggtgccgatcatcaagggggatgccaagagcatttccatcggggcggcaagtatcattgcaaaagtgaccagagatcgactgatgaaagaatacgatgccatcatgccggagtatggctttgcacagaacaagggctatggtacgaaagaacatatcgaagcgttacagaagtacggaccaagtcctatccacagaaagtcctttatcggtcattttgtggaatgtgagtaacttttctaagggggaagagaagtgcaggtttctgatttgctgacacagtatcaaaacaatttatcttccggcagtgaggtctccaccaagacaaaggggatagagcaattagtcgagacggtaaaacaattaaagacaggcaatatctttgagggaaccgtaaatagcatacgcggtactcaggtaatattagggctgagcagtggacagaatattacagccagattggacgcgggcttgtctctttctaaggggcagtctgttttttttcaggtgaaatccaatgacggagaacagatccggataaagccgatctccatgggagcaggtcagggcaatccgacactgatgcaggcactggatgccgcaagtctggcagtgagcgagcgtaacttaaacatggtaaatgccatgatgaaagaaggcatgtcgatcgattccaaaagcctgcaaaatatggcaagacagatcggcagtgtcccgggcagtcagccggagaccattgtgcagatgcagaaattacaacttcccatcgatgccaacagtgtcgagcagtttgaaaattataaggcggacaggcgtcaagtcctaagtcaggtgcaggatctggtggcggcattgggagagtcttttttagatgatgcggtagatacccagacgatggtcgggcagaacaaccggctggtggcatttttcggagatccttccatgcaggaggcgtttgccacaggcgaagcggtctatgcagaggaaatgctacccgcagaagggcaggagtctgtggatctggaatacttatcccagagggcggggatcttctcgcagacactggaggatatggatgcctatgaagccggaacacttggcaatagtctggatcaggggacatttgcagacctgcaaaatgtattgggacagatgccgtcttttatcaaggaacacgccaacttttttacggcagaggggcagcttctaccacagaccaaggtggatgcttttttgcaggaagtctctgtttttttagagcaaaatgccggcaggctttccaaggagagtgtgcaagatcttttgcgttccaggggctatcagaagttattttctgatctggtgacaaaagagtggacggttgcgccgcaggatctgccaaaagaacacagtatcagccacctgtatgagaaaatgtcgcagcagatccatgatctggaacaactggcagacaaatttccaagtgccaaagagaccatacaggggacagccaattccctgtcacaaaatatagaattcatgaaccagttaagccagatgtattcctatgtgcaggtgccgatacgcctgcgcggacagaatgtcaacagcgaactttttgtttatcgcaacggggggcgcgacaagggggcagacgatgaactgacggcttttttacattttgatatggacaatctgggcggtgtggatatttcggtcaagatgctccaaaaaaatgtatctgccaactggtacttagaggatgcagacagtctgacgcttttggaggagaatatgcatcttttgactgagcgtttagaaaaaaagggttacacctgtagcatgaaattggaacaggatgccaaaaagatcgattttgtggaagattttttaaaggcagaccagaaaagcagcggcgaggtgcatcggtattcctttgatgtgagggcataagtatggaaaataaagagtggaaaccccaggatttttcaaaagaaaagacagcagtcgccctatcctatgatccaaatgatattgcaccaaagatcgtggcgacgggcaagggacatgtggcggaaaagatcattacctccgccaaggaaaatgatgtgcctttttatcaggatggaaaactggcagataccttatccaaatttgacattggagaagccattccaccagaattatatgaggtcgttgcggagatactggtctttgtggacggcatggaaaaggtgaaagcaaaactggacgggaggaaataggaacgaaagcaaataaaagaagtgtggggagcagatatgaaaaagaagcggcagactatttaaggcgtcagggctatgagatccttgttatgaattatcgcaaccgcaagggtgagatcgatatcgtggcgagggacggggactacctttgttttgtggaggtaaagtaccgcaaggatgctgccgccggagatcctttggaggcggtcggctggcgaaagcagacggtcatctgtcgggtggcggatcatttccttttgacgcacagacagtgggcagatctacagatccgctttgatgtcgttgccattttaaaggacgagatcacacttcttaccaatgcctttccttatatcggcttatgatagaaaaaagaaactacagatcagaggaaggatatgttctgccttatctttccttttcaagttatgaggcactgccttatatccggcatatgtttacgaccagagagggcggtgtcagcaaggatatctatgaaagcctgaacctaagttttaccagaggggatgacgagacggcagttttggaaaactaccgaagggtggctcaggcactggggacgtccatagatcatatcgtgacgagcgaccagacccacacgaccaatgtgagacctgtgggaaaggaagatcttggcaaggggatcacgcgcccacgcgattataaagatgtggacggcatgatcacagaccagccgggtgttttgcttgccactttctatgcagactgtgtcccgctttattttgtggatccggtgcataaggcgatcggtctgtcccattccggctggagagggacggtaggacgtatgggacaggcgacggtagaagccatggaaagatcctttggaagtcagccgaaagacctgctctgtgccatcggtccatccatctgccaggactgctatgaggtgagccgggatgtggcagaggcatttatatttgcatttccgacccatgaaaaggagatcttacaggcaggagcgctcggcaaataccagttggatctgtggaaagccaatgagatcgtattgacagaggcaggtgtgttgaaagagcatatagaccttgcagggctttgtacctgctgcaacagcagtattttattttcgcacagagccagcaaggggaaacgaggaaatctgggagcatttttgatgcttaccgagtgacgagaaagatgaggatagatttatgagcacatcacatcagattgcttttgtaagatccgggagtcccgcggcacttgcaggagtggaaccgatggatatcataaaagagatcaatggtgtcgaactgattgatatctttgattattattactacgaggatgaaccggcatttgatatgctgatcgaaaagccggatcagacaagacatcttgtgcatatcacaaaatcagagggcgaagatcttggtatcacctttgaaaatggactgatggacgattatcggttctgccacaataaatgcatgttctgtttcattgaccagatgccgccgggcatgcgggaaaccttatattttaaggatgacgataccagactttcttttttacagggcaactatgtgaccctgaccaacatgaaggaggaagatctcaaacgtatcatccactaccatctggcacccatcaatatctctgtgcaggcgaccaatcccgaactgcgctgcaaaatgctccacaatcgttttgccggtgacatcttagccaagatcaagatgttagcggatgccgatattgagatgaatgcccagatcgttttgtgcaagggagaaaatgatggggcagaactggatcgttccatcggagatcttttatctttttacccgcagatgcagagcatgtctgtagtgccggtagggttgaccaagtttcgagaggggctgtacccgctggaaccttttgaaagagaagaagcgcgcgaagtgcttgctaccatccacaaatggcaggacatcagttttgaaaagtatggcacacattttgtgcaggcatcggatgaatggtatctgatcgccggttatgacctgccgacggaagaacgctatgacggctatacccagttggaaaacggtgtcggcatgatccggcttttgatggacgaattccgggaagccttagccaaagagaaaaagcatccttttatgcggaaaaaagaatgtgcgatcgcgaccggaaggctggcagccccttttatccgcatgctgtgtcaggaattcatggagaaattccccaaggtcaccgtgtatgtctatgagatccgcaacgatttctttggcgaaaagatcacggtttctggtctgatcacaggacaggatctgatggcacaactcaaggaacagccgctgggaagccacctgctcttaccacagaatatggtgcgtgccgaggaacaggatttcttggatgatgtgacggtcgcccagttaagtgacgctttacaagtaaaggtggatattgtaaaatcaagcggacaagatctcgtgaaacagttaatgacattataaatagatggaggaaaatatgagtaagcctgtagttgccattgtaggacgaccaaatgtaggaaagtctactttgttcaatgccttggcaggagagaggatttcgattgtaaaagatacgccgggagtgacccgagaccgtatctatgcagatgttacatggttgaagcatgaatttaccatgatcgataccggtggtattgagccggaatcaaaagatattatcatcagccagatgcgtgagcaggcgcagatcgccattgatacggcagatgtcatcatctttatgacagatgtcagacagggattggtggatgcggatgcaaaagtagcggatatgctgcgccgttccaaaaaaccggtcgttttggtagtcaacaaggttgacagttttgaaaaatacatggcagatgtctatgaattttataatttaggtatcggggatccgattccgatctcatcctcatccatgttaggactgggtgatatgttagaccaggtgatcgcacatttcccggaggatgccggcgtagatgaagatcaggatattcctaagatcgcgatcgttggtaagccaaacgtaggaaaatcgtcccttgtcaaccgtctggtgggcgagaaccgtgtgatcgtttccaatgtggcaggaaccaccagagatgcggtcgataccaaggtcaagttccatggcaaggaatatatctttatcgacacggcaggattgcgccgcaagagcaagatcaaggaagaattggagcgatttagtatcattcgtgctgttgctgccgtagaaaaggcagatgtcgtgatcgtgatgatcgatgcgaccgagggcgtgacagagcaggatgccaagatcgccgggatcgcacatgagcgcggcaagggcattatcattgcagtcaacaagtgggatgccatcgaaaaggatgacaagaccatttacaagcataaggaaaagatcaggcagaccttatcctttatgccatatgcgcagatcatgtttatttccgttttgacgggacagcgtctgccaaagatctatgagaccatcgatgccgtgatcgagaataattctatgcgtgttgcgacaggagtcttaaatgagatcgtgaccgaggctgttgctatgcagcaaccgccatctgataagggcaagcgtctcaagatctactatgtgactcaggtggcagtcaagccgccgacatttgttatctttgtcaatgacaaggaattgatgcatttctcctacaccagatatttggagaaccgtatccgtgatgcctttggatttgaggggacttcccttaagtttatcatccgggagagaaaggacgactaattatggaattgatgaggctcgtcgcacttgcgatcggttatgcctttggattgatcttatcgggctatctttttggaaagaagaaagatgtggatatccgcaaacagggaagcggcaatattggtacgaccaacaccatgcgtattttaggcatcaaggtaggtgcgctgacactggtgtgtgactgcttaaaatgtgtggcggcagtggtagtcgtctggcttctttttcgcacatcatacccggagcatattgtcttgttggaattatacggggcactgggtgccatactggggcatgatttccctttctttatgaagtttaaggggggcaagggcattgcctgtagttttggtatgatcatagccctctttccgcagtgtctgccactttgtgttctgatctttgttctggcagtggcgatcacacgctatgtgtctctgggatctatcctggcggcgctgggactcatggtacagatctggatctttggggcaaagggctggctggcatttgccacgtcggatcttttagaagcccagatcttagtatcttttgcctgtatccttgccattgtattgcatcggggcaatatcaagcgacttttggcaggtaatgaaaacaagttttcttttaaatcaaaacgagactagcaaatcagtcaaggaatcctgcttttggcagggttcttttgcatggaagtaaaggagcgaaaaatgaaagttggtgtcatcggcgcaggaagttggggatgtgcgctggcaattttattacagaataacggatgtcaggtgagtctgtggggacatagaagggaacagatcgaaaagatgcaggcaagcggggagtgtgacaaactgccgggagtcatgcttccaaaggaaatgagcctgacctgggatctttcctcctgtcttttgggcaaggatcttctggtcttagcggttccttctacggcaaccagagagaccgcagaaaagatcaagccttatgtggaaaagaaccagatcctttgcagtgtttccaagggaatcgaggaagatagccttttgacccaatgcggtattttagaagatgtcttggggaaggatgctaaggtgggcgttctaagcggtccgtctcatgcagaagaagtcgtaaaaggtctgccgaccgttgtggttgccggctcacgcgatatagccgtggcagaatttttacagaatgcctttatgaatgaaaatttccgtgtctataccagcacggatgtgaccgggattgagatcggtgcctctttaaagaatgtcatcgcgctggctgccggtatgtcggatggtctgggctatggggacaataccaaggcggcactgatcacacgcggcatcaaggaaatatcttccttggcacttgccatgggaggacttccgcagaccctgagtggtcttgcaggcacaggggatctgatcgtgacctgttccagccgtcacagcagaaaccgtaaggcaggtatgctgatcggtcagggcttgcgtccaaaggatgccatggatcaggtgcatatggttgtagaaggtgtttattcagccaaggcggcactggcgctgggaaaaaaataccaggtcagtctgcccatcatagaacaggtcaatgaggtcttgtttcatgacgtagatccccgccttgccgtgcgcagtctcatggaacgtgacaaaaaatcagagattgcttaaaaatctattgactgccatttcctatgatgctagaatgtagaaacggagcacaagatatagtatattgcaggatgtgctatatcgacatatagataagaaagggagcgtaatcgttgataaaagtagtaaaaaaagacggaacattagaggattttaacgtacaaaaagtcgtggatgcagtcaacaaatctgcatgcagggtattgatcaattttacagaagaagaagaaaagtttatttgccagtttgtagaagaaaaggtatttgctctcggcatcgaccgcatcgagatcgcacagatgcataacatcgtagagggcgcactggaaagagtcaatccggtggtagccaagagttatagggattaccgtaattacaagcaggactttgtgcagatgttagacgatgtctataccaagagccagtccattatgtatatcggtgacaaggaaaatgccaatacggactctgctttggtatctaccaagcgaagcctgatctttaacgagttcaaccgtgaattatacaagaagttcttcctgacgacagaggagattcaggccattcgtgacggctatatctatatccatgatatgtcagccagacgtgataccatgaactgctgcctttttgatgtcaaagcagtcttggagggcggctttgagatgggaaatatctggtacaatgagccgaaatccctggatgttgcctttgacgtgatcggagatatcgtgctgagtgccgccagccagcagtatggcggctttacggtgccaagcgcagatctgatcctggataaatacgcagagatctcttttgccaagtatgtggaaaaatatacaggtcttggactttcccaagaaaaggcagaagcaaccgctatggcagatgtagaacgtgactttgaacagggcttccagggctgggagtacaagttcaataccgttgccagcagccgtggagattatccgtttatcacggtgaccgccggaaccggaacgactcgttttgccaagatggcgaccatctgcatgctccgtgtccgcatgaacggacagggcaaaaagggacataagaaaccggtacttttcccgaagatcgtatttttatatgatgagaatttacacggaccgggcaaggaattggaagatgtctttgaagcaggcatcgaatgttccagaaagaccatgtatccggattggctgagcctgaccggtaagggctatatcgccagcatgtataagcaatacggagagatcatcagtccgatgggctgtcgtgccttcctttctccttggtatgaaagaggcggtatgtatccggcagacgatcaggatcgtccggtctttgtcggcagatttaatatcggagccgtcagcctgcatctgccaatgatcttggcaaaggcaagacaggagagccgcgacttttacgaagtgttggattactatctggaacttatccgtaaactccatatccgtacctatgcttatcttggtgagatgcgtgcatccaccaatccactggcatattgtgaaggcggattttatggcggacatctgaaatacaatgacaagatcaaaccaatcttaaagacagctacagcttctttcggcattactgcattcaacgaattgcaggaactctacaatggcaagtccctggtagaggacggacagtttgcggtagaggtcttggagcacatcaatgacaagatcaatgagtttaaaaaagaagacggcaatctttatgcgatctacggtacaccggcagaaaacctctgcggtttacaggtaaagcagttccgcaagaaatacggtatcgttgaaaatgtatctgaccgtgaatatgtcagcaacagttttcattgtcatgtcacagaagatatcacaccgatccagaagcaggatctggaatatcgtttctgggaactttccaatggtggcaagatccagtatgtaaaatacccgatcggctacaacaaagaggcagtcaagaccttggtacgccgtgctatggaaatgggattttacgagggcgtcaacctttccctttcctattgtgatgattgtggtcatgaggaattggatatggatgtgtgtccggtctgcggcagcaagaatctgaccaagatcgagcgtatgaatggatatctttcttactccagagtcaagggagataccagattgaatgatgccaagatggcagaaatagcagaaagaaagagtatgtagtataggtggaataaatgcgttatcataatataacaaaagacgatatgctaaacggcgacggtctgcgtgtggtcttatgggttgccggctgcgatcattgctgcaaggattgccagaacccggtcacatgggatcccaatggcggtctggagtttgatgcagaggcaaaggcagagttatttgaggcactggatcatgattatatttccggtatcacttttagcggtggagatcctcttttttatggcaaccgggaagatgtgaccctgcttgccaaagaggtaaaggatcgttttccggaaaaaaccatatggctttataccggctttacctacgagactatccagacgcttcctgtcatggaatacgtggatgttttggtggacggagaatttgtcgtagaaaagaaagataccagtctttactggcgcggcagcagcaatcagcgtgtgatcgatgtagttgccactagaaaaacaaacgaaatcgtgttacattgtaaatagcaattcttttttaggagtagatggaatgaaaatagcatggaaaaaactgacatcttccgcaaaaatgccggagagaggaagtgcttgggcagcgggctatgatctgtttgcagatattgcagaggagacaaggcttgcaccgcacgaaaccaaaatgatcggcacaggtgtcgcactggcagtgccggaaggatattttggcggtgtttttgccagaagcggactttctgccaaggagggacttcgtcctgccaactgtaccggcgtggtcgatgcagactatcgtggtgaggtcaaggtggcactacataacgacagcggggaggagcgcgtcgtagcgccgggacaaaagatcgcacaactggtcatcatgccatttctttccgtagaatttgaagaggttgcagatttagacgagacagaacggggacaaggtggatttggatctaccggtaaaatgtaggaggtatgcattatgggagaggcagtaaagagtattcgggatcgtatggtcaagttttatgcaaaggatgacaataccattacgttaaacgcgacaccggggcattttgcaacgagttcatcacacatcaacttctatatcgatgtgacgcgattaaaggtacgtgccaatgaggcgagggaagcagcaagaagcatcaagaacaagatgctgcatcatgtgacgacagtggataccattgtctgcatggatggtacggaggtactgggcgcttatctggcagaggaattagaaaaaggacatttcgcaaataacaacaaacatgagactgtttatatcgtgtctccggaagtcaacagcatcaaccagttgcttttccgtgaaaatgtacgtccggcgatcgaggggaaaaatgtattgcttttgctggcaaccatgacgacgggcgagaccgtgcgcaggagtctggaatgtattgagtattacggaggtaatatcgtgggtgtatcttctatctttggtaccatgaccaaggttggcaataccgaggtatttccactctttaccacggatgatctgccgggctatcagacctatgcaccgcatgaatgtccgtattgcaagaaaggcataccgatcgaggccatggtcaatggcttcggctattcaaagttataataagagcaaaaggatgcgccaagcattgcttcggcgcatttctttaggcaattttttagtgaggttaggaaatggcgaaaaagaacgtttacgacgagagcagtattgccgtattagagggacttgaggcagtgcgcaaaagaccgggtatgtatatcggaagtgtatcccgcaaggggctgaaccatctggtgtatgagatcgtggacaactcggtagatgagcatttggcaggagcctgtgatacgatctgggtgacactggaagccgatggttcttgtaccgtagaagataatggacgaggtattccggttggtttacatgcgaccggtgcctctgccgcgcgcgtggtatttaccacattacatgcaggtggaaaatttgatgacagtgtctataagaccagtggtggcttacacggtgtaggttcttccgtggtcaatgccctgtctacctatatggatgtggagatctcccgcgatggctttatccatcacgacagatatgagcagggacatccggtgatcgcactggaaaatggtctgctgccgaccatcggcaagactaagaagaccgggacaaagatcaatttcctgccggatccccaaatttttgaaaagaccaatttcaaagaggacgagatcaagagccgtatgcatgagactgcctatctgaatcccaaactgaccatcatttatgaggacagaagaaaagaagaagtcgagcatatcgagtatcacgaaccggacggcattatcggctttgtcaaggacatcaataaaaatgcagaaaaactccatgatgtcgtttattttagcggagagtctgatggaatcagcgtggagatcgcttttcagtattgcaacgaattccatgaaaatattctgggattttgtaacaatatctacaatgcagaggggggtacccatattaccggatttaagacggtctttacgacagtcatcaataattacgcaagggaacttggcattttaaaggataaagatgccaattttaacggggctgatgtcagaaacggtatgacggcagttgtatccatcaagcacccggcaccgcgttttgagggacagaccaagaccaaactggataaccaggacgcttccaaggcaaccgctaaagtgaccggggacgagatccagttgtattttgaccgaaatcttgacactttaaagaccgtgatctcctgtgcggaaaaagcagccaagatccgtaagacagaagaacgtgccaagaccaatcttctgaccaagcagaagttttcttttgacagcaacggaaaacttgccaactgcgagagcagggatgcttccaagtgcgagatctttatcgtggagggagattctgcgggcggttctgccaagatggcgagaaaccgtatgtatcaggcgatcatgccgatccgtggaaagatcctgaacgtggaaaaggcaagcatcgataaggtacttgccaatgccgagatcaagactatgatcaatgctttcggttgtggtttttccgagggctacggcaacgattttgatattaccaaactgcgttacgacaagatcatcatcatggcggatgccgatgtggacggtgcccacatttctaccttgcttttgaccttgttctatcgctttatgccggaactcatttatgagggacatgtttatattgctatgccgcctctttataaggcaatcccatccaagggaaaggaagaatatctctatgatgatgccgccttggaaaaatacagaaagacccatacgggtaattttaccctgcaaagatataagggactgggtgagatggatgcggaacagttgtgggagacgactttggatccggaacgcaggatcttgaaaaaggtagagatcgaggatggacgtatggcatccgatgtgaccgaaatgttgatgggaaatgatgtgccaccgcgccgtgcctttatctacgaacacgcgagagatgcgcagcttgacgtatagacgtttgaaatagtaagtaggagagaaagaacagatggcagtagaggaaaaattgattcgcatggaatattcggagatcatggagaaatcctatatcgattatgccatgagcgttattattgcaagagccttaccggatgtccgcgatggattaaagccggtgcagagacgtacgctttatgatatgcacgaactggggatccgttacgataagcctttccgtaagtcagccagaatcgtcggagataccatgggtaagtatcatccacatggtgattcttccatttatgacgccttggtcgttatgtcacaggactttaaaaagggacttcctttggtggaagggcatggtaactttggctcgatcgagggtgacggtgcagcggcaatgcgttataccgaggcacgtctgcacaaggtgacccaggagtgttatctggcggatctggataaggatgttgttgattttattccaaactttgacgagacggaaaaagagccggaagtccttccggtcaaggtgccaaaccttctcatcaacggtgcggaaggtatcgccgttggtatggcgaccagtattccgccacataattttggggaagtgatcgacggtgtcattgcctatatgaaagacccggatatcaatacccagcagatgatggaatacatcaagggaccggattttccgaccggcggtatcgtggtcaacaaggatgatctgcatgccatttatgcgaccggtgtcggtaagatcaaggtgcgtggcaaggtggagatcgaaaaggtcaagggcggcaaggaacgtctgatcatcacggagatcccatataccatgatcggtgccaacatcggaaagttcttaaatgacgtatatggtctggtcgagtcgaaaaagacgacagatatcgttgatatttccaaccagtcctccaaagaaggcattcgtatcgtcattgacctgaaaaagggagccgatgccgaaaatctctgcaatctgctctacaaaaaaacaagattggaagatacctttggcgtgaatatgcttgccgttgcagacggcagaccggagaccatgggcattgtcccgatcatccgccatcatgtcaacttccagtatgaattggctaccagaaaatatacgaccctgcttgccaaggaacgccagaaaaaggagattcaggaaggtttgatcaaggcatgcgatgtcattgatctgatcattgagatcctgcgcggcagtaaggatatgaaaatggcaaaagcatgtctggttgaggggattaccgaaggcatccgctttaagtcggaagtgtcaaaaagagacgccgaaaaactgcattttacagaacgacaggcaactgccatcttggaaatgcgtttgtataaactgatcggtctggagatccaggcactcatgaacgactatgaaaagaccatgaaaaatattcaggaatattctgatatcctggaaaaccgtgcttccatggcaaaggtcatcatgaaggaattaaaagagtttaagaaggaatatgccaaggagcgccgcacggtcattgataatgtggcagaagttgtggtagaagaaaagccgatcgaggaagtggatgttgctgtcatgatcgatcgttttgcctacggccgtgttgtggatatgcctacctttgaacgcaacaaagaggcggctgaggcagagagccgtcagatcatcttctgtaaaaatacggataaactggcactttttaccgataagggacagatgcatctgatcaaggtcttagacctgccgtttggcaagttccgcgataagggacagccgctggataatgtaagtaactttgatgcgagcaaggaagaaagccttttgatcgcgtccgttgctgcattaaaagataaaaaactggtatttgcgaccaagacatccatgttaaaggtagtcgatggcggcgagtttgatgtggcaaagagaacgacggctgccaccaagttagccccggatgatggtctgcttttagtcggagtcttagaagaccaggatagcattgtcatgcaaagcgagaaggaaatgttcctgcgcattgatacggcggccataccggagaaaaagaagggcgcgattggtgtcaggggcatgcgcttagccgataaggatctcttgcaggctgtctatctcttgcatacaggtgatagcaagacggtcaaagtcaagggcaaggatgtggtcttaaaccgcctgcacattggcaatcgcgatacgaaaggtgtcaagaaataatgacgtttgatgataagacccgtgcttttatggataaaattgcaaaaaaaggcagtgtcttagggctggatgccatgtgcctgcttatgcaggctctgggcgatccgcaggagcaattacaggtcatccacgtggcaggaaccaatggaaagggttctacctgtgctatgctgcagagtattttatgccgacagggctaccgggtcgggctttatacgtccccggcagtcttttgctacgaggaacgtttttccatcgatggcgcgtacatagacgcagcggcttttaatgcctatatgcaccgcatggaggatgcctggcaggaagttgaaagacagcatggtgtatgcgcgaccatttttgaagtggagacggcactggcatatctttatttttacgaagcaggctgtgactatgtcatcatggaagttggcatgggcggggcgaccgatgcaagcaatgtattgaaccatagcctatgcagcgtttttgccgcaatcggcagagaccatatgcagttcttaggaccggatctggaaagcattgcccgcatcaaggctggcattatgaaagcagggggacaggctgtttccacctggcaggagccaaaggctgccaaagtcttagaggatgtggctaaggctggaaagaccggacttactttttgtgatgagagcaaggtaaagataaagcaaagaaagccgctctgttatgactataaggaattttcggatatagaggtacccctggagggctcctatcaactgcaaaacagtgtcctggtcttagagaccattcggatcttgcgcaaactgggcgtttttatttcggatgcggcggtaaaagagggcatgcaaaagaccgtctggcagggaaggatggagtgcctttgtaaggaaccgctgatctatatggatggggcacacaacctgcccgcagccaaaagattatgggaaacgctggaaagtgattttacaaataaatccataacctatataatgggggtacttgcggataaggaatacgaggaaatgctggcactgcttctgccaagagcagggcatatctatacggtcacaccggacaatgccagagccttgccggccgaaaaattgcaaaagaccatagagaatctttcctatgcggcgcttgcctgtccttctttagaggatgcactttatcaggcactgcaggcgggggatgatatgatcttagcctttggttccctttcttatctgggagactttaagaagattgtaaaagcatctgtaaaggagtaagagatgtttgatcacgaaaaaataaaagagggcgtgcgcctgatcttggagggcgtgggcgaagacgtggagcgcgagggacttttagagacaccggatcgtgtagcacgcatgtatgaggagatctttgccggtatgtatcaggatgccgcagagccgctttccaagcgttttcatgtggctggaaatgagatggtcttggaaaaggatattgtattttacagcacctgcgagcatcatctgatgccattctttggcaaggcacatgtagcctatatcccaaagggcgaggtcgtgggactcagcaagatcgccaggacggttgaggtctttgcaaaaagaccccaactgcaggagcagttgacggcacagatcgcggatgctatcaatgaacaactgcatcccatgggcgttatggtcatgcttgaggcagagcatacctgtatgaccatgcgcggcgtcaaaaagccgggcagcaagacagtcagttatgtgacaaggggcatctttgcagaggatacggcactacaggatcgtttttttcaattagtaaaataaagtttggatacggcatatggacacagtgacacaggttttagaacatccccaatataaggcatgctgcgagacaatcacggactacgaagcagataggacttattgcagacatgatatggaacattttcttcgggtaggacagatcgctattttgttggcaaaagaaaatgggctttcgatcgatgcagaggagatcctgcttgcagccctctttcatgatctggggcgtgccttgcagtatcagaatggaatctcccatgcagaatcgtcagcgatccttgcagaggagattttgttgtctattggctatgatcctgctaagacagacaggatatgtgcagcggtgaaatgccatagcaaaaggcaggatgtcaagattcgttatgccaagcgtggcagccaaaagaccttggaagacttgctttcctttgccgatcatttttcgagggaatgttttgcctgcctagcaagcgatacctgcaaatggaaagcagaagaaaggatcgacagaccctattttgagataaaggaagattatgatataagaaagagaggcttgctatgatcataggaaatcaggaatttttggaagagggacacacttatgtcatgggaatcttaaatgtgacaccggattccttttcggatggcggcagatataatcatttggacgctgccttaaaacatactgagcagatgataaaagatggtgcggctatcattgatgttggtggagagtctacaagaccgggacatgaaaagatcacagaccaggaggagatcgaccgcatccttccggtgatcgaaaagatcaagcaggaattttccgtcccggtatccttagatacctataaggcagccgtggcaaaagagggaattcaggcaggagccgatcttttaaatgatatctggggtttacagtatgatcctgccatgggaaagatcgtagcagacagcggtgtcgcttattgcctcatgcacaatcgggataagatcacggaggagatggacgccgatctttttatcgagcagatgaaagaagatgcaaaaagggcactggatgccggcatcaagaaagagcggattattttggatccgggggtaggctttgccaagacccaggaacagaaccttatgactatcgcaaatctggaccgcctcaaggcactgggctatccggttttactggggacatccagaaagtctgtgatcggttatgtcttagatgtgccgaccgacaagcgtctggtgggaactctggcgacaagtgccgtagccgtacagacaggctgtatgttcgtgcgtgtgcatgatgtcaaagaaaatgtggaattgattcagatgttagaacgcatccgggaaagcaggtaaaaatggaacagatcatagtagaaggattagaagtatttggataccatggcgtatatgaacaggaaaaagaggaaggacagatctttgtcgtgaattgctggattgatacttcctttgccggagcgattcattctgatgacctgtcaaatacggtggactatggaaatgtatgtctttttatcaaaaaatattttgcggaaaatgcacatgatctcttggaaaaggtagcagatgaacttgcaacatccatcatgtatgcttttccgggcgtacaaaagttagttttagagatcaaaaaaccgcatgcaccgattcctatggaatttgcaaacgtgggtgtcaaggtagaaaaggcatggcatcaggtagccattgcgatcggaagcaatatgggcgacaaggaaaagtatctgaccgatgccatggaagagttgatcagtgatcctaatgtcagaaatgtcattgtttcagactatatagaaaccgagccttatggatatgtggatcaggataagttcttaaatggggcagcgaccatagagacccttttatcaccggaagacctgcttgcctttttacataggatcgaggagaaagcagaccgtaagcgcgagatccactggggaccacggacactggatctggatattcttttgtatgatgatgcctgcatccataccaaagacctgatcgtgccgcatattgatatgtgcaaccgcatgtttgtcttagaaccgctcatgcagatcgcaccggggctggtacatccggtcagaagacgtaccatctatgatctctattacatgttgaaggaaaaagaaaatgcgtaagtttcggacaaacagactctggcagatcatttatccgattgtggtatattatctgctatacaatgtatttttcgtggcactgcgcctgctttttggcgcacacgccagtcatttgtttttgctggggatcgccagtcttttgaccatacctttttgctatggtatttacaaaaaagccccaatcgtgcgggcagaaaaagtctgggataaagagactttcccaagagaatgtctgtatatccttggtgttgtggcattgggactgatcttaaatttcatcatttcccatacgccgctggtggcttattcttccggctatgcccaggcgaatgccacgctttatgcgggcggtcttttgaccaagatctttgcaaattgcatcagtattccgattttggaggaactggtctaccgtgggatcgtatgcgggcagttgagcctctggtatgacgaaaaaattgcagtcattatttctgcattttgttttggtatcatgcactttaatgtggtacaattcttatatggatttctggtaggtcttgcgatcgcaacggtatatatcaaaacgcgcaaactctgggtcgttatcgtggctcatggattgacgaattttatcgttgtcatattggcaagcctcggatagataagacatttttaaaagagacataaggaggatctgattatggacgacagcaagatcacacttaccattggtaagcaaaagaacattgcactcattgcacatgacggaaaaaaggctgagatcattgcatggtgtgaagaacacaaagaagaattaaagaagcactttttatgcggtaccggcacgaccgcgcgtatgatcacagatcgtaccggacttccggtacgcggttataacagcggtcctttaggcggtgaccagcaggtaggagccaaggtcgtagagggcaagatcgatctgatcattttcttctccgatccgcttacggcacagccgcatgacccggatgtaaaggcactgcttcgtatcgcacaggtctatgacattccgatcgccaacaacaaggcgacggctgactttatcatcacatcggatttcatcgacaaggaatacaatcatgatgtgatcaacttcaagaagaacatttcagagagagcagaaacactgtaagacagtggggaggaatggatgagcaaacaggataatcccaatgttgttggaaatattgcgatcgtctttatgtcgatcctcttgatcgccgtgggctgcatcatgttatttacggatgcggtcaggatgatctatttctgctacggtgccggtgcctgtcttttggtatggggcatctggatgatcagccgttactttttacataaggaatttcagagaacgaccaattatggcttttcggtcggcacgctggtcgtgatcttgggagccattgatttgatccgtgcacaggatattgcggactccatacccaattatctgggtatcctggttctgatcgagggcgttgtcatgttgcagaacaccgtccagttaaagaacttacatggagatctttggatcgtcagtctgatcttttccctgctttccgtagcaggatcggttgtcatattattggatatcgggaatatgataacaaggtatgagactgccttttatggtattctgatcttggtcggtgcatttgcactcttatccctgtgttttgttggggtgaggaccaagcattatcacaaggaaagcaaacgggagttggaacgcaatatcgaagaatccgaccagtggtttgaaggcaagcaggagacgaccacggctattacggaggaagtggcagaggaccatgccgatgagacagaaagtgatccactgccggatacagatcaagcggattctgccttggtagaggaagaagtgtaggatttttgaaaggagtttggcatggcaaatatttcggattatttagattggcgtggtgatattaccatggagattgacccctttaatgaagtagataatctggtcttagcagaactggcatacacagattttggcggcattgtcccgggcttgaatcaaaagggacaatggatcacgatccgggaggcacacgatcgcttcttttctatgtattcagaagaagagatcatggcgaagaactctaccaccaaggtcgcaccttttttgatgcacaagatggtagcatctgcacgttttcaaaatctgcggcttatgaactatgtcaatgagatcgacgaagaaaatcagacccagttttcggttttgtcttttcttttagatgatgacagggtctatgtggcattccgcgggacggataataccattgtcggttggaaagaagactttaatatgtctttcctttatcagacggagggacagatccgggcagcccagtatctgaatgactgctatggcgatacttcttatgaactgcttgtaggaggacattccaagggcggcaactttgccgtatatgcatctgcattttgccagcctgccattcaggatcgcattacttgggtttattccaatgatggtccgggctttttaaaagagatcacgacgcaggagtcttatgagcgcattatgccccgggtcgtcagtaccataccggaatcttccattgttggcatgcttttggaaaacgagatggatcatcgggtggtaaagagttcacagaccggcgccatgcagcatgatgccatgtcatgggaagtccttggcaatcattttgtttttgccgaaaatctgtcagagtcttccgtgatgctggatcgtactttaaaaaattggatctatggtctgagtgcggaggagagggaagaatttgtcaatatcttatttggtaccctgcaatcgaccggagcaacgacgctggacgaactgacggcaaacaaattttccatgatgaccaatatctctaagaccctatctgccatgccggtggaaaagcagcaggtcttaaaggatgtcattcgccgttttgcctattccagcggagagacctttgcagataatgtgcaggaaaaactctttcacaatccgctgtcagaaatgcttatgaatacgacaaaaagtattgagcgtaagaaaaagtgagaaaataagagtatacgttagataaagataggattcttggaattattggatgtgactaaagttgcaacttggttcttagaatcctattatatgaattgtggttagcactcgtacaaagtgagtgctaacaaagaatgagagaaatataaggaggcatatagaaatgaaattagtaccattaacagatcgcgttgttttaaaacagtgtcaggcagaagaaacgacaaagtcaggcattatcctggcaagtgcagcacaggaaaagccaatggaggcagaggttattgccgtaggtcctggcggaatggtagatggtaaagaggttgttatgcaggttaaggctggtcagaaggtcatctattccaagtatgccggaacagaagtaaagttagaaggcgaagattatatcatcgttcgtcagaatgacattcttgctgtagtagagtaaaaatagatataagaaagaaggattaaattatggctaaggaaattaaatatggcgcagaagctaggaaagcattagaagcaggtgtagatcagttggcagacactgtcagagttacgatcggaccaaagggacgcaacgttgttttggataagtcttacggtgctccactcatcacaaacgatggtgttaccattgcaaaagagatcgaattggaagatccgtttgagaacatgggagcacaacttgtcaaggaagttgctaccaagaccaatgatgttgccggtgatggtacaacaaccgcaaccgtattggcacaggctatgatcaaagaaggtatgaagaacttagcagccggagcaaatccgatcgttcttcgtaaaggtatgaagaaggctacagatgccgcagtagaatctattgtttccatgtctgaaaaggtcaacggaaaagagcagatcgctaaggtcgctgcaatttcagcaggtgatgaagccgttggtaacatggtagcagatgccatggaaaaggtttccaatgatggcgttatcacgatcgaggaatctaagaccatgcagacagaacttgacttggtagaaggtatgcagtttgaccgtggttatatttcagcatatatggcaaccgatatggataagatggaagctgttctggatgatccatatatcctgatcacagacaagaagatcagcaatattcaggagatcctgccactcttagagcagatcgtgcagtcaggatcccgtcttcttatcattgcagaggatgtagagggtgaagcccttacaaccctgatcctgaacaagttgagaggtactttcaatgttgttgctgttaaggcacctggttatggcgaccgcagaaaagaaatgttacaggatatcgccatccttaccggtggtcaggtaatctctgaagaagtaggtctggaattaaaggatgctaccatggatcaacttggtcgtgcaaaatcagttaaggttcagaaagagtctaccgttatcgttgacggcgagggtgataaggatgccattgcagccagagtatcacagatccgtggacagatcgaagagacaacttctgagttcgataaagagaaattacaggagcgtctggctaaacttgccggtggcgttgccgttatccgtgtaggtgctgctaccgagacagaaatgaaagaaagcaaactccgtatggaagatgccttaaacgcaacacgtgctgctgtagaggaaggtatcatcgcaggtggcggatctgcttacatccacgcttccaaggaagttgcaaaactggttgattctctggaaggtgatgaaaagacaggtgccaaggttgtattaaaggcgctggaggctccgcttttccatatttcagcaaatgccggattggaaggaagcgttatcatcaataaggtaagagaagcacagccgggatttggctttgatgcttataatgagacttatgtcaatatggtagaggcaggtatcctggatcctgtcaaggtaacacgtagcgcattacagaatgcatgctctgttgcatctaccttgcttacaacagaatctgttgttgcagacatcaaggaaccggcaccggaaatgccagcaaatccgagtatgggaatgatgtaagatctttaaaaaggacggcggaaacgccgccctttttttgtgcaaaacgcatttgccagtacctataaagtatggtatgataaaccatgtgtgtgaagacatgcacaagatggataaaaacgaaacgaggaccatatgagtaaagtagcgattttaacagacagtaacagtggaatcacacaggaagaagccaagcaggcagggatttacgtcttcccgacaccggtctatatcaatgacgaggtcttttatgaaggcgtggatcttacgacagaccagttctttgcaagacaggcagagggggcagagatcaaaacttccatgccggtcgtaggtgatgtgatcgacaagtgggaaagtctgcttgaggaatatgatgaggtcgtatatattcctttgtccagcggactcagcagttcctgtgagacagccatcatgttggctgaggattacgatggtaaggtgcaggttgtcaacaatcagcgtatttccgttaccatgaagttatccgtttatgatgccaagaaacttgcagatgcaggaaagtctgccacagagatcaaagagatattagaggcgatgaagtttgagtcaaccatctacatcatggtagatacgctggagtatctcaaaaagggtggaaggatcacaccggctgctgcggctattggttctttgcttaagataaaaccggtattgcagatccgcggagaaaagttagacagttttgctaaggcgagaacggtcaaacaggcaaagcagatcatgatggatgccattgccaaggatatggacgaagtgctccatgatccgaccggcgagaatactatcattgctatggcacatacccagaatgaggaagagatcgccaagttcaaggcagaagtggaagaacgcttcccgggacatgatatttttgtggatcctttatctttggtcgtatccagtcatattggaccgggtgcacttgcagtgacttgtacaaagaaattaacatcattttaataaattttttaggaggaacaagagcatggtaaaagcagttgttggtgccaattggggtgacgaaggaaaaggtaagatcacagatatgcttgcgcagaatgcagatatcattgtgagatttcagggaggagcgaatgcaggacataccatcgtcaataattatggtaagtttgcccttcataccttgccatccggcgtattttatgatcacacaacaagcgttattggtaatggggtagccttaaacattccggtcttgtttgacgagatcaagtctattacagacaaaaatgtgccaatgccaaagatcaaggtatcagatcgtgcacagatcgttatgccgtatcatattttatttgatcagtatgaagaggagcgtttaggaaaggcttctttcggctctaccaaatccggcattgcaccattttattctgataagtatgcaaaggttggatatcaggtcagcgaactctttgatgatgaacttttaaaggaaaaggttgcacgtacctgtgagtccaagaatgtattgttagagcacctttatcacaagccactcattgacccggatgatttgttggagactttacatagttaccgcgatatgatcgcaccttatgtctgcgatgtttcttcttatttgtggaatgccttaaaggaaggcaagactattcttttggaaggtcagcttggtactttaaaggatccggatcatggtatctatccgatggtaacatcttcctctaccttggctgcttacggtgccattggtgcaggtattccggcacagtctatcgagcaggtcgttaccgtatgtaaggcttattcttccgcagttggagccggtgcttttgtcagcgagatctttggtgatgaagcagacgaactccgcagacgcggtggtgatggcggtgagtttggtgccacaacaggtcgtccaagacgtatgggatggtttgactgtgttgccagcaaatacggctgccgtatgcagggcacgacggatgtagcctttaccgtgcttgatgtattgggctatctggatgagatcccggtatgtgtgggctatgaaatcgatggtcaggttacgaccgacttcccggttacccatttactggaaaaggcaaaacctgtctataagacacttccgggctggaaatgtgatatccgcggtatcagaaagtatgaagatcttccggaaaactgccgtaactacattgagtttgtagaaaaagagatcggcttcccgatcaccatgatttcaaatggaccgggaagagaagatattatttaccgcgacgtaaagtaatatgagataagataaaggcaagacgaaagagagcacttggcggagggctctcttttttcgtggtacgccttatctcattcacagaattgacacaattccaacaccttatcagcacataggtgaaatacaataatcaatgtgtgattttggaaaaattagggaggaaattaatttgatagaagtagaaaatctggtaaaaaaatatggctcgctcacggctgtagatgatctgagcatgaagattgaaccggggcatatttatggcttgcttggaaagaatggtgcaggcaagacaacgacaatgaatatggtcacaggttatatcggtgcgacatccggcagtgtcaaagtgtgtgggcatgacattttcaaagaggcagaggctgccaaaaaggagatcggctatctgccggagattccgcccctttatacggatatgagcgtatatgaatatctggacttttgtgcagagttaaaaggcatcggtaaaaaagagcgcgacgaacatatcgtggatgtcatggaaaaagccggcatctctgagatggagcatcgcctgatccgcaatttgtcaaaaggttacaaacagcgtgtcggattggcacaggcaatcctaggcaacccatccattatcattttggatgagcctaccgttggtctggatccggtgcagatgatcgaaatgcgtgatctgatcaaggaacttggcaaagaccataccgtgatcttaagttcccatatcttatccgaggtcagtgccgtatgtgactacatttatatcattgatcatggaaaattagtggcagattttgccatggatgaagagaaagcagcatccttggaagaaatatttatcgaactgacaggaaaggaggacaaagaataatgcttgcaatttttaaacgagaatttaaatccttattctggaacattaccggatggctgttcatcggtattaccttagcactatttggactctatttctttgtctataatctgtcctatggttatccttatatatcttattctttgtcagccatcgcctttttatttatggtgaccgtgccgatccttaccatgcgtgttttggcagaggaaaaacatgccaagaccgaccagttgctcttgacggcaccgatatccgtaggaaagatcgtacttggtaagtttttggcgcttgcccttgtctatacgatctgtatcggcgttatctgtgtggcacctttggtacttatgatctttggtgaggtgccgctggcagagacttatgtgggtattttaggcttctggctctatggtctggcaacgatcgccatcggtacctttgtatcttcactcacagagagccaggtcatttccgctgttgtatcctttggcttgatctttgttggctatatgatgtcatccatctgcagcgtgatctcatcatccggtaatcttttgaccaagatcttaggatgttatgacctttatacgccattggatgatttcttcaatggaaccctttctgttaccggtatcgtctattatctttctgtgatcgcgctggcactctttttgacagagcagatgatccagaagcgcagatggacgatcagccgcaacatgatctctacctccgtatttagtaccggtatgatcgctattgtcgtggcactgacggtggttgtcaatctgatcgcatccgctttgccggagacttatacgcagatcgatgcaacatcccagaaactttattccattacggaagacacggagaagtatctggataccttaaaagatgatgtgacactttatgtcatggtaaataaaaacagcaaagatgataatgtagaccgcaccttgcagaaatatgcatctgcatccaagcatgtcaaggtaaaatatgtggatccgaatgtcagtccgacttttgcatccaagtatacggacaatgatgtgaccagtaattccattattgttgtctgtggagaccgctctaaggtcattgactacaattccgatatttatgagtattcttatgactccagttacaattattccgtgacaggatatgattgtgagggacaggtgacagcagccatccagtatgtgacatccgagtctacgactaatgtatatgaactgacagggcatgatgagtcaacgctttccggtgacttttcagaagtattccagaagcgtttcatgaatgtaggatcactcagccttttgaccgtagatgcgatcccggaggattgtcaggcaatctttatcacagcaccgcagtcggatctgtctgaggatgatctgagcaaattgagccagtatctgggaaatggcggaaagatctatctgtcgatcgattattccaagtggaatgatctgacaaactttaagaaattactttctgataataacattgagacaactgagagtcttttggcagagacagatcgttcttattattatcagagtccattttatcttttgccaaatgtagaaaatacggaagtgtcatcttctgtggctggtatgacacaggtctttgtgccttacagtgtgggacttacctatacgggagaggatgacagcaatgtgacatcatttatgacgacttcagacactacgatcgctaaagcagcggccaatattgctgccgttcagtcacaggcggatgcagccaatatagcgagtgctcaggatggcgatacccagggacaatatagtctgggcatgatggtcacaaatgaaaatggaggcgaactctgtgtgcttggttcagctatgatgtgtacagatagtgccaatcagatcgtatccggtcataatgcaacgcttttcaatggaatcgtaaatgcacttgtgacaacagatgatggaaacagtgataatgcggtagtgatcgcagccaaggattatactgtatccaacctgacagtttcagcaaatgccatgcttgtctatggtattctttggggcatctttatgccgatcgcacttatcattatcggtatcattgtctgggcaagaaggagaaaacgttagatggataagcaaaaaaagaccctgctcattctggcagtgctattgggtgtagcactgctgggattgctgggggctaagaaattggcagataaaaaagagaaggcagatgccattgactctgcggaggaaagtattcaggtatattctgtggatgcagatgatgtgacaaaggtagcctattataacaatggtgcgcaggtgacactgacgaaaacggatgatcagtggcaggatgcggacggtgtgatcttagatgatgacaaggtcaagaccatgttatcttatcttaccaccatcaaagccagtgatgtcattgaggacacagacgatatcagccagtatggattttcgtcagccaccaatgaagtgaccgtcacaaccaaagatagtgagacgacctttacgatcggtatgcaaaacgccatcaccgataaatattatctcatggtaaattatgatgagagcaaggtctatgtgatcgattcttctatgttgacggcatgcggctatagcacttccgacttaatgccggatgagtcttagtgctcctttttttcgtcctgatctttctttttgttctggatcatgatatttaacagccacagggtaaatggcacgagaatggttgccgcaatggaggctgtcagataagacatggtcttggtattgtcaaagacggcggcaaagatggtgaggacatacatgccgaccaataagataatgccgatgatggcaaggatctgtcgtaaacgttgcataagggttctccttcataattgataaggacatgataccacatataaagggattgtgctagaggacggtggagagagcgcgagccgtccttgccctctggcaaaattatgttttgcttttttttatggtctgtggtatcgtatatgtgctacaaaagtgataaaggatggaaaaagatatggcattattacaggaatggcagaaaatctcctacaaccaggagcaggatcgtgccacattacagagattttggcagaattatttcttgatcgagaagggtatctatgaaaaattactggacaatccggatgaagaagtttccggcaccgtcaaggaattggctgataagtatgagatcgacattatggctatgaccggatttttggatggtatcaatgacagtctgatcacaccgaacccgatcgagaccatggaagaggataccgtagtttctctggcttttgataaggagaagttatatgagaatatggtagatgctaaggctgactggctctatgaacttccacagtgggatgagatctttgatgcagacaggaaaaaaaccttgtatcgtgaagcaaagaatgcacacacgatccgtaataccgttaaggtaggacgtaatgatccttgtccttgtggatcaggtcgcaagtacaagcagtgctgcggcaagaaaaataaataagaaatacaaaaaagtctctgacttaggatgtaatgcatcttaagccagagacttttttatgtgcgaaggatcgatctacgatgagatcttttgtaaagtgtcataaaagtttggataggagatgacaacgcaatccgggtcatcaaaagttgttacgccatccgcggcaaggccggcaatggcaaaggacatagcaatgcggtgatctgcataggtcttgatctgagttccatgcatggatcgtccgccatgaatgatcatgccgtcctctgttccgatggcatcagcccccatggcattgaggttttctacaactgaggtaacacggtcagactctttgacacggagttctttggcatcccggataatggtatcgccctctgcaaatgcagccatgacagcaatgaccgggatctcgtcgatcagcgtcgggatcaggtctccctcaatggtcgtaccgtgtaaagaagaagaacggacgatcagatcacagacctcctcaccggataccttgcgtctgttttcgtaagtgatatctgcacccatctgttcggcaacttttaggatgccgtcgcgtgtagggttacagttgacattgtagatcataagttctgcattcggaacgatagaagcggctgcaataaaataagcagcggaagaaatatcgctcggaatctgaatcttttgtccgaccaggtgcggattgccctcaatgcttgcagttcttccggatgaggtcacattcgcaccaaaaccactcaacataagttcggtgtggttacgggataagaccggctctgtgacagaagtcgtgccatcgcagtaaagtccagccaaaaggatggcggatttgacctgggcggaagccacaggagagtcatagtggatggcatgcagatcaccacctttgatctctaaaggcgcgcagtcattgccacgcagggaggtgattcttgcccccatcatagaaagtggcttgatgatacgctgcataggtcttttctggatggatgcatccccatttaaggtggaggtaaaaggacagccggataggataccgctgatcagtcttgtcgtggtgccgctgttgccaacgtccaaaatgttccttggctccgtcagaccatgtaagccttttccttggatcacgacgtgatcggcatcctgtttaatggcaatgcccattttttgaaagcaggcgatcgtggaacgacagtctgccccatccaaaaagccggtcagttcggtcgtgccatcggcaatggcgccgaacatgacaccgcggtgggatatggatttatcaccgggaatgtggatctgacctttgatatgatttgcttttttgatttccattttcttacctcggatagtctaggattcgtgaatcgtgtaatgcttgctgagaacaagttctgctgcatccatggcagcctgatcgtataactcgatacgcaggacacctttttcaaattctcggttgtgcacaataccaatattcttgatactgatgccgttggctgccagtgttgtcgcgatcgtggcaatggcaccggcttcatctgcaagatccagataaaactcgtaggacgaaggaagtaccccttgttttttgaggggaagatcatcccggtaatcttttgccgaagaaaagagccttatcacagcatcttccttttggtctgtgatagatgtgataaagtcctgcaggcttttctggtaaagggcagcagcctttaagatctcatcccgattggtggcacagatgtgctgccacatgacaggagaggaggatgcgatccttgtaatgtcgcgaaaaccgccggcggcgatcgtcttcatggtctcatccgcaaaatcattctctgcaacaaaattgactaaagatgctgcaatgacgtgaggcagatgactgatgcaagccgttgcaaaatcatgtttctccgggctcatgatcagtgtgagcgcaccaagagaagtgataaaggcagaaaagtctgccagtctttccctagaaaaatcatctgttaccgtaaggatataataagcattttccagaaggtatggactggagtggtcgtaaccgatggcttctgaacctgccattgggtgaccgccgataaagcgggaggtcagtcccagatcagcaacggcttttgtgatatcccccttgacgcttcctacatctgtaatgatacagtgagccggcagaatattcgccagacgggtaaggtaatcgacattgaccctgaccggaccgcataaaaataaaaggtcacaatccgcaaaagcctccaaatccagcatagtatcgtttgtgatgatgccatcggcataggcagcctgtatggtgctttcgcgtgaggcgatcgcaatcatttccgtttctgggtatttttctttgataatcttagcgatggatccaccgatcaatcccagaccgataaatccgatttttgggtataacataatgattctccttatgtaactataatgtccgacctgcaagtgaaatataaggctttaagccttccatcacagaagcaaactggtcaaaatcaagcgactgcggaccgtcggacagggcatgtgccggatcattgtggacttcgatcataagaccgtcagcaccgcaggcgatggctgcttttgccaaaggttctacgaaagagcgcacgccggtagcatggcttggatcgacgatgaccggaaggtgtgtacgttcctttaagacgcagacagcagacaaatccaaggtatttctggtggaagtctcataggtgcggataccgcgctcgcataaggctaccttggaactgccggaagacatgatatattctgctgcatttaaccattcatcgatcgtagcgcaaagtccccgctttagaagtaccggcataccggtttttccgacttcttttaagagttcaaagttctgcatattgcgagcaccaacctgtaacatatctacatatttaaaagcagatgctacggcgtgagcagaagtgacttcacagatggtagccagaccggtctctttggatgcggtctgcatatagcggagaccgtcttcttccaagccctgaaaagagtatggggaagtacgtggcttgtaggcaccgccgcgcaagatggtcgcaccctctttctttacggctctggcgatcgtaagcagttgttcttcggattccacggcacaaggaccggacatgatcgtgatgttgtctggaccgattttggtgtctttgacagcaaattcggttggctgtggatgaaactttttgttggcaagtttgtaactttccgtgaccgggatcatcttgtcgacgatcgggttggactcgatggcagtcaggtcgatcttggtcttatcaccgatcagaccgatgatcgtgacttcctcgccacgggacaggtgtgtatgtaatccggtggcttcgatatcttttataaggtgatgcagggcatcctcaggtgtttgtggtttgactactaagatcatagtgcattactccttttcatattaaatacagattttatcatagtcacttttattcttaaagtcaacactttaaagcgtaaaagtttaaagtacgaaaaataatcaaatccataaaattgggaagactacttttatgaaagtaaaagaaacgtgtatcattgcctgttttgtgatcgccttgcttggcatgcggcagacattagaggcaaaatggggattggaagatgtcatagaaaaaggacagatcctttatgaactgggcggcgggagcaattctatcttaaacccggagtctgtgacagaagatgaactgcctatccttttaaaaaatccaaaaagagagggatatctctttggcggctggtatctggacgaaaattgggaagaacggatctatcgcatagaggataccgggggcaaaaggttgtatgccaaatggaatctttgcatcgaacccaaccgcaatgtgcaggaatatccttacaaggcaaaggctggcgatcttttgctcaaagacctgacctacagttttttatatgaactggaaacgccgggcaatcccggaacccggatccaggatcttttgcagcaaaagtatgcctcagagtatcagtgtccgcaggggctttgcatcacaccggactatatcatcgtatcgtcttatgcactggaagaagataaactgggcgccctgaccttgtatgaccggacaagtcatacctatatcatgtcttttggcatggaggcagacagccatcttggcgggatcgcttatgacggcaaggcactctggatctgtcattccaatagcaaagaagtggagcggatctcctatgcctttatcaaaaaactggcaggagtgagccggcagaattttatcgacatcacttcctgctttgaacgttatccggtcgacaatacaccgtctgccattgcctgtatggatggtcagatctatgtcgcaacccatcatgtttatacgcccgggatcctgtgtgcttatacttatgatggcaaaagccttacagcagacaaaaagtgtttgctgccgcccaaggtgcaggggatctgccgggatgagactggacgtatttttttaagcctgtcctatgggcgcaatcagtcttcctatttaaatatttattccgacatggatcatttacagaaaaatttctggacgccttctgcacgggtggaaatgccgccgggatcggaggcgatcgctgtggaaaacgggctttgctatgttttgtttgagacggcttcctataaatattttgaggggagcgacggcaagggaacctgcaagtatccgctggataaaatcctcctgctttccgaggagagcattttttatgattgaggcgtgtaaaagccagttttataagctctgctgctgacagatgaataagatttctttattgacaaatagtagtgatatgctaaaatatattacgaattgcattcgtgatatatgatattgctatcgtgaatgtacaaatgaaatcgactaggaaaggtatctgtatcatacgaaatagagtggtaccacggagtaagatacttcgcctctaattagatgattctagttaggggcttgttttttaggaggaaaagaaaatgtcaaaaccttacaatcacaaagtcgttgagaagaaatggcagaaggtctgggatgatgagaaggctttcgccgcaacagatgattattcaaaaccaaaatattatgcattggtggagttcccatatccatccggacagggacttcatgtaggacatccgagaccatataccgcattagatattgtggcaagaaaaagaagaatgcagggatacaatgtactttatccgatgggctgggatgcgttcggacttccaaccgagaactatgccatcaaaaataaagtacatccaaagatcgtaactgcaaacaatgtggcgcattttaaggatcagttacattcccttggatattcttttgactgggacagagagatcaacacaacagatccgaattattacaaatggacacagtggatcttcttaaaattattcaaagccggacttgcatacaagaaagagatgccgatcaactggtgtacttcctgtaaagtaggtcttgcaaacgaggaagttgtcaacggacgttgtgagagatgtggttctgaggttgtccgcaaggtaaagagcgagtggatgcttaagattacagaatacgctgacaaattgatcgaaggcttgaatgatgtcgactacattgagcgtgtcaaagtatcccagaggaactggatcggaaaatcaaccggagcagaagttgatttttctatcaagggaaaagaagacaaactccgcatttatacaacaagatgtgataccttattcggtgtcacttacatggtagtatctccggagcacccatatcttgacaaatacaaggcagagatcaaaaactggtctgagatcgaagcataccgtgaggctgcttccaagaaatccgattttgagcgtgcagaacttgcaaaagataagacaggcgttcagatcgatggtcttgttgccgtaaatcctgtcaatggaaaagaagtgccgatctgggtttctgattatgtactgatgagttatggaacaggagccattatggcggttccggcacatgatgagagagactgggaatttgcaaagaaattcaatcttccgattattcaggtagtcgcaaaaaatggcgaggctgttgatgtcaatgaggcagcatttacagatgttgcaacaggagttttgatcaattccgatttcttaaacggattggaagtaaaagatgcaaaagaaaagatgatctcttacttagaggaaaaaggaatcggtactgcaaagacaaactacaaattacgtgactgggtgttctcacgccagcgttactggggcgagccgatcccgattgtagaatgtgagaaatgcggttatgtgccgattgatgaaagcgaacttccattgatgcttccggaagtagagagttatatgcctaccgataacggagaatcaccgcttgctgccatgacagactgggtaaataccacctgtccatgttgtggaggacctgcaaaacgtgagacagataccatgccgcagtgggcaggatcttcatggtatttcctaagatactgtgatccgcataatgataaggcacttgccagtccggagtcgttaaaatactggcttccggttgactggtacaatggcggtatggagcatacgaccctgcatttgctttattcaagattctggcataaattcctctatgatcagaaggtcgttccgacaccggaaccatatcagaagagaacatcccacggaatgatcctcggtgagaatggcgaaaagatgtctaagtcaagaggaaacgtcgtaaatccggatgacattgtaagagagtacggggctgataccttaagaacttatgaaatgtttatcggtgcctttgatttggcagcatcctggtcagaagatggcgtaaaaggctgccgccgtttcttagagcgtgtctggaaattacaggatatcatgacagatgaggaaggttattctgcagatttagagacaaagatgcatcagaccatcaagaaggtcagcaatgactttgaaaacttaaaatacaacacagcaattgcagcaatgatggcattgatcaatgacttctataagaagaatgccgttaccaagggcgaatataagaccctgatcaccttattgaatccggttgcacctcatattacagaagagttatggcagatcgttggtggagagggatacctttaccagacgacatggccggaatatgatgaagcaaagaccgttgagtcaaccgttgagatcgcagtacagatcaacggaaagacaaaaggaacgataaccattggtaaagacgatgcaaaagatgatgttattgcaaaagcaaaagaatctattgcagataagttgaccggtaacattgtaaaagagatctatgtaccgggacgcattgtcaacatcgtagcaaaataagagcaagatatacataaggacgactcatgtgggtcgtccttattgtctgtcttaatgtgggcggaaagtatgtaccagttggatgatacgatccgcttttttttgttcttccggtgacatgttctgctttaacataccgatgagcagtgtcgtctcagcatcggtaaaagtcagtcccttggatcttgcctccattgcggcactggataactggcttgccagttcgttggctgtccccgtgtgggatctggcggcaaaagcctgcaaaaactgttgcttttctttgggaatggattggaagatcgggttgttcagaaaagaaggatccattagtcgttgcctccgttaaataggatttcgtaggtggataacatctgcatggcgtttaatacctgatcgatctgtctcttttcattgtcgttacaatagaccttgatggcatttaagatgtcagatgttgaattctttttttccatggcactgatctgcatggtattttccggattttcaaaatattccatcgtcttttgcatttgcagataggagatcatcatggagatattcttttgtgccgtcgatcccaggtaaggcaggatcgtttttaatatgtttatttccttattttgtaaacggttgtcataaagagaaagagattcattttccataagcgttttttatttactatatgacggattttaaaagttagaataagataataagaaaatacttgtaggaaaatagaaatatgagacgattgat

SEQ ID NO: 12531 - DNA, 21014 bp, Unknown
  gut microbiota DNA sequence
tatcatgtatcaagtcgtttgtcaacaacttttttatttatttccgagtcgtttgtggcccgaacaacttcattatcatatcacatgactagaagtctgtcaacaacttttttcaagatttcaaatctctttttcgttgttgtttgctgccgttttgcgtcagctagattatattatcatttcgaccttttcttgtcaacaactttttacatcttttttccaaaaagtgaaaagccgttttctcatggtcttttcctataatctaacggagaaggagggatttgaaccctcgcgccgctattaacgacctgcaccctttccaggggtgtcccttcggccagcttgggtacttctccaagtgtgtcgaataaagactgacataaaatatgctcaccaccatgcgatgacaagcatataacggagagggtgggattcgaacccacgcgcccttgcggacaaacggttttcaagaccgcctcgttatgaccacttcgatacctctccaagccatatatgtttatgtgtttttcagcacgaataagataatatcattcttgcatctgcgtgtcaattctttttttcaaatttcttcacttttttcgggactgcaaaatacgctcccccatgagcagatcttccggggtcgtcaccttgatattctcgtaactgccctcgatcaatttcacacgcgcctgcatggtcttttctacgaccatggcatcatcggtcaccccggtcttatcgcatgcctgcaatctggtataggcttcatacactaatggataggaaaaactctggggtgtctgcacactccagaccagatcacgccttggggtcgcctctacccagccgctctcatccgcgatcttgatcgtatccttgacaggcatcccgacaacacaggcaccgtatccctttgcacctctaatggatctttctatgatatcttccgtcacaaaggctctggcacaatcgtggatcaagacatagtcgcagtggatgacttttaacccctcatagacagagtcatagcgttctgctcctccgtctacaatggcacttacctttgtaatatgatatttttctacgatctctttccggcaatatgcccggtctcccggtgccactaccagaactatctcatccacccggctcttttcaaatgcctccagacaatataccatgaccggtttgccgcacagggcaagatattgttttggaatatctgctcccatacgctttccggaacctgccgccaatacgactgctcctattctttccatcccattctcctgctcaagatcttctgtcactaccgcatgcctttgatcacgattccacgcgctgtcccaatgccagattcggcacagcattcaaagacatagaatctctgcgtcccgacatatattcataataggctgccgcaccgatcatggcggcattatccgtacaaaggatcggtgacggatggtaaaatctgacaccacgcctctcgcaggcttcctgcatggctgcacgcagagtaccattggacgcaacgcctccggcaatggcaaacttgtccccgccgaattcatccagcgcatgcatggcatgtcccaccagagcatctatgaccgcctgctggaaggatgcagcgatatctgcctcgttgattgtttcgcccttcatcttggcgccgttgatataatttaagactgcggactttaagccgctgaaactaaagtcgtaagcactgtcattgacctttgccaccgggaaaggtatggcatgcgggtctccctcttttgccttttgctcgatcttaggaccacccggatagcccagaccaatggctcttgccactttatcaaaagcctctcctgccgcatcgtctctggtacgccctaagatctcatactgcccataatctttgacgcggaccagatgggtatgtcctcccgataccaccaggcaaaggaatggcggttccaaagttttatcttctatataattagcgcagatatgtccctcgatgtgatgcacacctaccaacggaatatcttttgcaaaactgatcgcctttgcctcagaaagtcctacgagcagggctccaacaagacccggtccataggtaacaccgatcgcatcaatctcatcaagtgatgtatgagcttctttcagtgcttcctcaatcacctgattgatacgttcaatatgttttctggatgcgatctccggcacgacaccgccatataaggtatggatcggtatctgtgtggaaatgacattgctcaagacctgtctgccgtttaccacgaccgccgccgccgtctcgtcacacgaactctctatcgctaatatgcatatttctttatcactcatcattgtctccttctgtcaaacgaaaactcaggatcttccagtgcccctcatcatccctgcgcagcacaaactcctcgtaagtcctgctatagtcacttgcctctctggaaaaataataggcatccacataggcgcagtactctccgtctaccgtggcataggtaatatcattgctgtcactgaccgaggactgcacaatgatcttatccctggtcttatagtcctcaatgtctgccttgaggctcttcagataggtatctctcggattgtaggacaggagttcatcatccatcaggcttctcgcctgatctgccatcttctccagttcctcgtccgtatattcctcgccgtaaaaagccgtgatgatccggttgtaccacttcacgacctcgcgtggtgttttaggatactttttatcaaagtccctttcgatgatcttttccacttctgtcgtcttgtcttgtgcatcttctgcactttttgcattcttgtgcgacagataataatagtagccgcacaccagccccacacagatcacgatcgatattcctatacgaaatgccttcttcatcgcttattcctccaaaaagtccaactccagcatcttgccgtcctctcccagatatgattccgcgaaaatccgcttcacatccttcatgtatccttttgcacctaccaaagacgggctgaaatgggtcagccacatctgcttgacctctgccttctttgccagttctgccgcttcataaaaagtcatatgcttgtactgttttgccttagcaagtttgtccggctccgcatacatgccctcacagataaatagatctgcccccttggcgttgtccgcaatgcggtcgatcggtctggtatccgtgcagtatgccaccttgatccctttgcgaggcggtcccatcaccatgtccggcgcgtattccttatcctcccacaggatggtctcgcctttttgcaggcggttccaggtctgtaccgggagtcccagagcacttgccgctgcggcatcaaatctgccactgcgcggaatctcgatgcaatagccgtagcaaggcacattatgctggacacggtatgcccggatatgatagccatgcaagaccagatcctgctctgcctcggtaagttctataaaatgaatgtcaaacggtagttccggtgcgatcacacgcaaagaattgactacgcgttccagaccttttggtccgatcatagtcaccggttccgtgcggtctgagttgcccatggacaaaagcagtccaggcaagccactgatatggtccgcgtgataatgggtaaagcagatggtatcgatcggatttgggctgagccccgcctccttcatcgcaatctgggttccctcgccacagtcgatcaatagactgctgccattaaaacgagccatcattgccgtaagccagcggtgtggctgcggcatcatccctgctgttcccagcaagcaaatatctaacatatatcctccttatgaaaagccatgacgaaagcatcctcgtccggcttgtggtaaaagccctttctttgtcctacaagagaaaatccacatgcctggtataatctttgtgccggcaggttgctctttcgcacttccagataaacatgggctacgccccttttttccgcttcctccatcatccgggataaaagcctctttcccagacctctgccgcgcgcttcttctgaaactgcgatcgttgggatctccccttcatcactgttgcaatataagatgccataggcacacaggttttcttgatcttctgccactaaaaagacatgttctgtctcggaaagcgtctccaaaaatccggtctttgtccatggctcgctaaagatcgccgcttccatcgctgcgatcctgtcgatatcttccaccctgcagggtctgatccggatatccattatgcctgaccgctcttttgcgcttccatgcgttctctttccgcctgtgacagacgcagatattccggtctgtgctcggctgccgtctgcacttttcccgcaagataataagcctctgcccttgcacataaagatgcggcacgctggcggttcatatgagccggtgcaaaatggtaaggaaccttgcatttatctgcgattgcttcttgaaagaccggcacgccatcgcctaagaaagtcacggacccgcccgtagcattgatcttttctatgatctctgtgatgtcaacagcacaaggttctacgatgcactccatctctgtatccgtaaagtgataaagaccggtataggtctgcccccgccttgcatccatgatcggacacacattatctgcgcttccccagagattgtaagccatcgcctcaatcgttgagacggatatgatcggcttgtccagagcaagtcccaatccctttgccgtcgccgaaccgatacggagtccggtaaaagagcccggtcctgctgcaaccgcaatggcatcgatcgtatccagatccaatgcgatcatctttttcagttcttccaacattggaagcaatgtctgtgaatgcgtctttttaaaattagtagagtattcgcccacaacaatatcatcttccacgatcgctacgctggcaaccatgcccgatgcatcaattcctaatatcttcatgccttacccacttcctcaactgtaatcatgcgatagtcaaaacctttttccagatctttttcgatcatgatctgccagaaatggtccggcagaatctcctcgatcaaatttgcccactcaatcatagtcaggccttcgccatagacgtaatcgtcaaaaccaatctcatccatttcttccacacagccgatacgatacacatcgaaatggtaaaacggcatgcgcccggtgtgatattcctgcacaatggtaaaggtcggactacagatggcttcatcaattcccaggccctttgcgattccctgcgtaagaactgtctttcccacgccaagatcgccgatcagggtgtaaacctgtcccggtctggcattttttcctaattcttccccaaaggcaaacgtttcctctggtgaaaatgtttcttttatcatctatttgtctcccttaatatgtaagcgataatccttgcaatgctgacgcaacatggcatagatctgtggcagttcctccgtcgcctgtgcctttggtatgatgtacgcattgacgcggttactatatataagaagattgtgtttggttgtcacggctttatagatcatatcccatggcagaactgcctcctccgtctcgtgatctgtcgtgacggcaatgccatcttctctcatttcaaaatgcaggacatccttcaaagcatctgacatatgaatctgtcgcttcgagcggatgcgcagcgtcaaaggcacatataacagaaagatcaacgcgatcaaaagataaggcagggcatgacggatgtcgtgcagattttcggaaagcgcgatcaccacgattacaaagatccccatgacaagcgacaagatgccctgcatggatgtatatgcatgatacatattgaaacgatacatatcctcactgctcagttttacgttaaatttgatggtcatgatatatcttcctccatataagcccacttctgattgttatattatcatattccatacaaaatcaaaagccccaatccgtctaccgacatgcaagacgccggacggattgaggcttttatcctatttctttattttgtttttaaactcttccttttaagatcggtgagatctttttatataccaccattgtgatcaggacggaaaacagacctttgacaaaggtaaacggcacattaaagaataagaggcactgccacaattcttttacggatggcacaattgcctgataagcaccgatgatcacatccattggcatcatcttggtgtagatcggataaaccacgaaatagttggatgggaaactgaagagtgccatgcaaagtgctccgatcagagcgcctgtgatggctgacttcttattctttttgtgcttgtagatcagtcctgccggaagtacgaaggctacgccaagaacaaagttactcaattctccgacgccacctgtggatgtcataaacagatgcaagagatttttaactaagcatacccatacgccacatgccggtcccatggcaaaagcaccgatcaaggccggtaattctgacagatccatgcggatgaaatttggcatgaccggaacagaaaaatcaagaaacatcaggataaatgcgatcgccgataacattgccgtcaccgtcagatagcgcacattcatcttagatgctgctgcactctttgttccattgtttacgtttgctctttttgttgttacctcactcattttgtaacactcctttttcctttttatttaggaaaatcggtctctggtaagtcagccttgtacgcaaaaagccccgaacactaattccagcgttcggggcaatacattgcacgcaaaaatcaacttatcttctctcatccagactatactgtcggtatcggattcacaccgattcaactgcaaatgcaggtcacggactcgttgccgtagcaacatcaccgtcggtcgggaatctatgatctctcatatcaccctgccccgaagattcctatttacaagcatcagtatatgcatatagagcctatctgtcaaccactattcgataataatattgtcaaaaaagttattgccttttttgaccggcttcctgtgctcctgttttttcttgaaattctgcttattggcaggctttttgcatcttgccgcaggctggtctttcgcagcctcttttttgtcctgtcgatcgcccagtttcatggtcaactggatcctttgctttttgaaatccacgctcaagacctgcacatccacaatatcgccgatcgatacagcctccagcggatgcctgatgaagcggtcgcagatctcagaaatatggacaagtccgtcctggtgcacgccgatatccacgaaagcaccaaaatcaatgacattgcggacagtgcctttcaagaccatgcccggttttaaatcttccatgctcaggacatcactgcgaagaattggctttggcatatcctctcttggatcacgccccggcttttggagttcttttacaatatcctccaaagtcatggcaccgataccaagttcttctgccagtcgatccagatcgcctacttcctttccgatctgcccgataccgccactggtgatctccgtcagatcatgtcctaattcggcaagaagcttttccgtcacttcataggactccgggtgtacgctggtcgcgtctaaaggattcttgcccccgcggatccgcaggaagcctgcacactgttcgtatgcctttggtcctaattttggtacctttaataattgttttcttgaagtgaactgtccgttctcctcacgatatgccacgatattcttggcaatggtcttattgatgcctgaaatgtgttccagcaaggatgctgaagccgtgttcaggtcaacgcccacattgttgacgcacgcctcaacaacaccggataaggcttcgtccaactttttctggttcatatcatgctgatactgtcctacaccgatcgactttggatcgatctttaccagttcagccaagggatcctgtacacgtctggcaatggatgtcgcactacgctgccctacgtcaaactgcggaaattcctctgttgccagtttgctggcagaatagacggatgcgcccgcctcgttggtgatcacatactgcaccggaaccgggatctcctttaagagatctacgatgatcatttctgattcacgcgatgccgtaccatttcctacggagatcagggtaacatggtatttggagatgagtttctttaaaactgcctttgcctcctccaccttattctgcggtgctgtcgggaaaataactgtcgtatccaatacctttccggtcgcatctacaactgcaagtttacagccggtacgaaatgccggatcccatcccaagaccacctgtcctgcgatcggtggctgcatgagcaactgctgtaagttcttgccaaagacaccgatcgcgccgtcctctgctttttcggtcagggcagaccggatctcacgctcaatagccggtgcgatcaggcggtcatacgcatccgcgatggtctccgtcagtaccggtgtcgtataagggttatccttggtaataacctgtttggaaagataacgaatgatctcctcggtcggtgccaagatcttgaccgtcaggatcttttccttttctcctcggttgagtgccagaatacggtgtcccggcaacttttcgattggttcgtcaaactcatagtacatctcgtagaccgactccgcggtctcatccttggcacttgatatgatatgtccctttttctctgtcagcccacggatatgcatacgataatccgcctgatctgcgatggtctctgccagaatatccatggctcctgcgatcgcatcctgcgccgtagccacttccttctctgcatttacataatctcctgcaatctcctctaacggctgatcgatctcctgcaaaaagatcagatctgccagcggctctaagcccttttccttggcgatcgtcgcacgggtgcggcgctttggacggtatgggcgatacagatcatctacaacgacctgtgtctctgctgccaggatctgcgcacgcagttcctccgtcaatttgccctgctcttcgatgctcgccaagactgacgctttcttgtcctccaggttgcgcagataattcagacgttcatacaggtttcgcagaatctcatcactgagtgcacccgttgcttcctttcgatatcttgcgataaagggaatggtattgccctcatcgatcagttttaccgccgcatctacctgttttggcagaacgccaagttcacttgccagttttctattgatgtccatctatgttactccatttcttttctaatttctcgatcaaaaccgcctgcatcaggcactcagatccaccttgcccccgatcaggctggctgcaaccagcgatttttgattttgtccgtaaggattgctctcgttgtagcggatcgttgtgttggtcgtgccacccgaaacataagtcctgccacattccgggcagaccgatgtgtggatggatacgctggcatttaccaccgttccgttattttgggcagccttggtataggcattgctgacatgttcaccctcgtgtgcccgcacggcaccgccggctgcctccggtgaaatgtgtgccgccgccttaaaggaaacattttcatccgacccatcgatatacttgcgctccttgcaagtctgacattccgccggcgtggatttataacccggcttgacgccgtccgtatcccctgccccggtcatagtcggatccgtcacgcctgcggtgacatcataagtccccatgccataagttcccggctgatatgaagttgtaaggatagaaccaagacttcctatctgcatacaccattccccctttctttgatcgcgtcctctttacaaatcgtccgtcattcctttatagtagattttgtacttaatatcactatttcaattagatgtgaggcctaatatgcaagcacttgccagactactacaaaactatatgagccatgcacccaaatgccttttccatctagtaaccggctactattgtcccggctgcggtggcaccagagccctgtatttatttcttaccggacactggatcaagtcttttctctttcacccgctggtggtctatgccttttttgtctgcctctatctatgtatccgcaagatcctagatcataagtaccaccccagcgcccgtctgctatggatcgcactgggcttactggcagtaaattttgtcatcaaaaaccttgcccttgtctgttttcatgtagacctattgcagatcttctagttctggtttcccgcaatctctcttgctacataaacaccacttgcagaagcgtgtgacagggagtgggtaataccgcttccatcaccgatcacataaagtcccttataattggtctgcaaatgttcgtccacttccacttccatattgtagaacttgacttcgacaccataaagcagagtatcgtcatttgcggtacccggtgcgatcttatccagtgcgtagatcatctctacaatgccgtccaagattcgctttggcagtaccagggagagatctcccggcgtagcattgagtgtcggtgtgacaaaggactcctcgatacgcttcctggtagaacgctgtccacggatcaggtctccgaaacgctgtaccatcacgccaccgccaagcatattggaaagtctggcgattgactcgccataaccgttggaatccttaaaaggctcggaaaaatgcttagaaaccaaaagtgcgaaattggtattctccgtctgtttctccgggtcttcgtaactgtgtccgtttaccgtaatgatgccattggtattttcatttacgaccgccccctttggattcatacagaaggtacgcaccttatcctcgtatttctgggtacggtaaacaatcttgctctcgtataattcatccgtcagatgtgaaaagatctctgccggcaattccacacgcaccccgatatccacacggttggaattggttggaatagaaagatccttgcagacttcttccatccatttgcttccgctgcgtccgacagaaataatacaatctttgcaggtgtaacttgcatccttgcaatggatacggtagccttcctcaccatctgctaagacttcgactgactccaccagcgtgtcaaaataaaactctaccttgtcctttaaatattcgtagagattttccaataccacatagttgatgtccgtacccaaatggcggacagatgcatccagcaaatgcaggtcattttgcatacactgctttttaaaacgactgcctgcggtagagtataatttggtcccctcgccgccatatgccagattgatcgtatcgacatagcgcatcagatcaatagcttcttttttaccgatatattcatataaagtaccgccaaaatcattggtgatattgtattttccatctgaaaaagcaccggctccgccaaaaccgctcatgatcgaacaggtcttacatccgatacaggacttgatcttatttccgtcgatcgggcattttctgcctcccagagcgtgtcctgcctcaaaaacgcccacacgcaaattcggatcctgcttgatcagttcataggcggaaaaaatacctcccgggcctgcgccaataatcagtacatcgtaattcatacattctcctatccgtcgtcttttcataaaaacgaccgcttttctacttcattatcatatcatagtttcctctgtcccgccagtaaaataaagccgtaagcgggcgtagaaaaggagatgccagccttgacatctccttatagtgtccttttttatcagaatacctttactcgtcgtcctcgtcctgacgtgcccagccaaaagcatacttgactgccttattccagcctttacgctttgctgcgcgctcctccgggtcgatggatggaatgaagactcggtcatactgcacattcttcatgacttcttccttgctctcccagtaaccaaccgcaagacctgccaggtatgctgcaccaagagccgtagactctacgcaggacggtctgttgaccggcttatccagcatatctgcctggaactgcatcagaaaatcattggcactggcaccaccatctacattcagggtacgaagatcggtctcggcatctgccttcatagcatcaataacatcgcatacctgataagcgatagattccagcgtcgcacggatgatatggttcttgttggtgcctctggtaatacctacgatcgtacctctcgcatactgatcccaatgcggtgcgcccagtccggtaaatgccggaacgacataagtaccatgggtgcccttggctttctttgccatatattcggaatcctcagcggaatcgatcagtttcatgccgtcacgcagccactggatcgcagcaccagcgacgaagatagatccctccagcgcgtaattgaccttgccgtccaatccccatgcgatcgttgtaaccagaccgttcttggagaataccggcttttctcccgtgttcatcaaaaggaaacaaccggtaccatatgtattcttggcttcgccctcggtaaaacaggtctgtccgaaaagggctgcctgctgatctccggctgctcccgcgatcgggatctctgcaccgaagaaactcggatctgccataccgtaaacacaacttgacggcttggcttccggtaacatggaacgcggaatatcgagttcttttaagatctcatcatcccattccagagtattgatattgaaaagcatggttctggaagcgttggaataatctgtaacatgtactgcgcccttggttagtttccagatcaaccatgtctctaccgtaccgaataaaagatctccagcttccgctttttctcttgctccctctacattttccaaaatccaacgaatcttggtagcggagaaataggcatcgatcatcagacctgtcttggaacggatcatgtcctccaagcctcttgcctttaattcatctgcgtactcagaagtacggcgacactgccaaacgatcgcgtgatatacaggttccccagtatgtttatcccacacaatgacagtctctctctggttcgtaataccaattccggcaatatcgtctgcggtcgcgccgatctttgacatcgcctctacggctacaccaagctgtgtagaccagatctcattggcatcgtgttccacccatcccggattcgggaagatctgacgaaactccttctgtgccatactacaaatgttcccctcatgatcaaacaggatacagcgattgcttgtcgtccctgcatccaatgccataatatattttggcatagtaaaaacccccttatattgaaatcaaatctttaatgatcctgaccctattataaaaaatcccccatgatttttcaataaagtttccgcgattttctattcttccacggatggtcgtaatgtgtctatttatgatgcattttagaccagacggatcatttgacgcacttcgccaagtgccgctgcctttgtcgcatagtcagactctttcatggcctctgtgacaaatccgatctcatcatccagaccgctctcaacgaactctacctgaccaaagatattctcaatctcagcctctgatgcagcggaacgtacaaagaaacgattgacctgctcgtttggatccgcaaggacaagtttctccttttcccactccagatagatgttcttgtcgatatgcttggcaatggcgaccatatcacccacgactgcactggcggtcgggagtttgcccgcaccgcttccgtagaacataccgtcgcccagcatattgccatgaacaaaaatagcgttgaatacatcatgcacattgtaaagcggatgctccggtgataaaaggaaaggtgctactcttgccacataggagtctcccacctttttgctggtagccagtaacttgatggctcttcccattttatttgcatacttgatatcggttgccgtgatatgtgaaattccctcagtcgggatatcttcataatccacctgtctgccgcagacaagagatgtcaggatggcgatcttacggcaggcatcgtgtccttcgatatctgctgtcggatccttttctgcatagccctttgcctgtgcatcctttaatacatcatcaaattccagaccttctttggtcatctttgacatcatatagttggtcgtaccattgacgatacccgtgatctcctcgatcacatcacctgtcaggcaggaggtcaacggacggatgatcggaataccgccgccaacggatgcctcaaataagaaattgaccttgtgatttctggcgatctcgatcaattctgcacccttgtctgccacaagtgccttgttggaggtcgtaacatgctttcctgcctcaagcattgccttaacaaaggtatatgccggctccacgccacccatggtctccacaacaatggcaacttccggatcttctacgatcgtcttgtagtcatggacgatcttgtccgcgatcgggtctccctcaaaatcacgcagatccaaaacatattttaattctaatggctcgccacaacgctttgccacaacatctctgtttacctctaaaatctctgctacaccggaaccgatagttccgtatcccataattgctactttcatctgatcactccctagctaatatttttacgtattgtattccctgtgttttttccatgacttccaccatctccgagacatcgcctgtctccggcagcacatcgaccgataaggtcagtgacgcgatcccattgaccggaatactctggtggatcgtcagtatgttggcatgataccgggcgactgtctgtaagatctctgacagaatgccgggctcgtcctccaactggatcaccatagtgatcgtctttcctttgacgttgtcatgaaagggaaaaatatcctctttgtacttatagaaagaactccggctgatccccacgcgatctgtcgcctcctgcacggagatacaacgaccggattcgatcaggcgctttgcctccactaccttgcggagcacttccggcactgccttttcctttaacacaaaataggtagtcttctctgacatattccctcccgagtgtctttgacacaaacacaaatgttctcactcgaaagataataccacaagaagactacctaaatcaagccttttatgattcctgcgtatgacgatccggtcgtcccagagaacaccatctcagataggcattcataaacggggtgatggcaccgtctaaaacggcatccacatttccggtttcctcgccggtccgcagatcttttaccatggtgtaaggctgtaagacataagaacggatctggttgccccagccgatctcggtcacctctccacggatgccctgcgcttcgcgctcctgctcctctttttgcaaaagatacaactttgcctttaacatctgcatagccttatctttgttcatatgctgggaacgctcattctggcattgtaccacgatcccagtcgggaagtgcgtgatacggatggcagatgatgtcttgttgatgtgctggccaccagcaccgctggacctataggtatcgatacggatatcgtcatcattgatctccacctcgacattatcatccaactccggcatgacgtcgcaggatgcaaaggaagtctgccttttgcctgctgcattaaaaggcgagatacgtaccagacggtggacacccttttcagatttcagataaccataggcatttgccccattgacctggaaggtcacagacttgatgcccgcttcctcaccgtccagataatccagtacctctacctcatagccacgactcactgcccatctggtatacatacggtacagcatggatacccaatcgcaactctccgtaccaccggctccggcatggagcgatacgatggcatttctgtcatcatactcatctgagagcaaagtcttcatgcgcagttcttccagttccccatcaaactcctgtaaaagagattcgatctccggcaaaagatccgggtcattctcctcatatcccaatgtgatataggtgtcgatctcctcatatagttcctgtaaatgggaaaagatactgacatcatcttttaaacttttcagttccttcattttggcagtagactgtgctgcatcattccaaaagtccgctgcctccatttctctttctaattcttcgatacgctttgacttgttagccaggtcaaagtgaatccctcacttcctgtagtggagattcgtatgcttgcaactgctgtttataagcgtcaagttctaccacagtattcacctctttcattttttatttgtccagttcctcgtggaggacttcaagccccttctggatctggttgtcgagcgactcatcataagcctcgtcatcaccgcctaagaactggtattccagttcgatatccggtgtgatgcctgtcttgtggatacactcaccactcggcgtatagtaggtcgccatcgtgaccttgatcgcacttccgtcggaaagcggcaccgtcgtctgcacgatcccctttccaaaagtcttggtaccgattagggtaccatagtcaaaatcgcggatggctccggcaaagatctctgccgcgctggctgtattgccggatgtcagtacgaccatcggcatattgatctgcttttcatcatccgatgtataagtcgtgcgctcgccgtttttgtcttccatataaacggtcgtacccgccggtaagatgtcatccaggatcccggtcacggaatctaccagcccgccaccattaaagcgcaaatcgtagatcacggctttcatgccctgggactccaagtctgccattgctgcttcaaactgatctttggtattatcggaaaactctgacagataaatataaccgacagcgtcatccagcatcttgtatttgacactcggtacctccacctgtgcacgcgttacttccacgacatctgtcttgccgtcacgctcatattgcaccgtgatcttggtgccttcttcgccacgcacataatgcacgaattgatccaggtcttctgattgtcccttgtgtccgtccacagatacgatgatatcatccgcctgaagccctgcctttgccgccggggaatcatcatatacattgacgatacgcacctgcccggtcgtcgtatcctttgtaagcacagcgccgataccggcataattgcctgtcgtatcgatcatcatatcctcatattcctgcgccgtataataaaccgaatacggatcatccaatccttccatatagcccttgtaaatgccttctgccagtgcctcttcatccacatcttcataatagtaatgatgtaccagtgtagaaatgtattgcaacttggaaaggtttaaatctgccagcgtgccaagactgccccacaaggcaaataccagcccgccaagaatcagcgccatgacaagcaggctgcacaaaacgccggtcaggacaccacgacgaaatgtctttggctttttttccttttttgtcacttccggttgctcttttatttcttccatcttcctatccttcttatatgacttttttccaatatattgcaagatcacatatcctatgcggttagacctgcaaatgtttgtgcagggtcattcggctgccaatgtaaccgataccaatacccagtaccagcgataccggaaccaagatggtaaatacggttcctaccggcacgaaagaaaccagatcgccaataaactggaagcgctccgatacataacttacaatgccctgatagaggaagaataaaagcaccagcggaatgattgaaccgatcagaccgataaatacaccctctacgacaaacggcgcacggacaaacttgtccttggcaccgatcagtttcatgatggcgatctcctctttacgcacggaaataccaacagtaaccgtgttattgatcaaaaagacggcaactgccaccagaatgatgatcacgccaacaaaaatataaccgatcagactgttaaaatctgataaggtctgtgctgcaacctcggaataacttacctttctgacaccatccaaaccttgcagatagtctactaaggtctgctgcatggatacatcattcagatagatctcatagtgttcggaattagcaagcggattatcctcggcaaagccctctgcggctgcctcattgccctcaaaatacttgtctttataagatgcccaagcctcatctgcggtcacgaaatcatattttgcaacctcagcacgcttgccgatctcctcgcctaccttgtcgatctgttcctggctgactccctgatcaaagtaaacaatgatcgtcacgccttcctcggcagaatgtaccattgaggtaaaattcacacctatggaataaaagacaccaaacaaaaaaatgcaggcagacatggtcgcaatggatgccagggagaataacttgttacgccagatatttttcagtccctgtcctacgttataccaaaatgtactaaacttcatgtgtatcaccccatttcccgtcactgacaacgacgccttttttgatcgtgatgacacgcttattcatctttttgacaatttcgctattatgtgttaccaccacaacggtcgttccacgctcattgatctcctccaataaatgcatgatctcccacgcattggtattgtccaggtttcctgtcggctcatctgccagaaggatctttggctcattaaccagtgctcttgcaatggcaacgcgctgctgctcaccaccggacaactggcgtggcagcgacttgtactttgcagccagtccgaccaaagacagcatgagcggcaccttgcgcttgatctcacgtgttgaggactcaacgactttcatggcaaatgccacattttcatagacgttgcgatcctgtaaaagacggaaattctggaatacaacaccgatatttctgcggaaatatggcgtctttttgtgggtgaccgaagacaacttctgctcattgatgtaaatctcgccctctgtcggttccagttccttgagcaaaagtttgatcagggtcgatttacccgaaccgctcttacccatgataaaaacgaactccccctgctcaatgtcaatattgacatcattgagcgccggcaccccctgctggtatgtcttactaacgtgttctagtcgaatcattgtttcttctatctcctaaatgctgtaaattaaaaatcctgattttccatatacttcatatacttcacgaccatgagtgcgatcttgaaggtgatcgcatcttcaaagacgcgcagatccagtccagtgctcttttgcaacttatccagacgatagaccagtgtatttctatgtatatagagttgtctggatgtctcagaaacattcaaactgttttcaaagaatttgttgatggtggaaagtgtctcctcatcaaaatcatccagatccttgccgtcaaagatctccttgataaacattttgcaaagcggaatcggcagctgatagatcaggcgtccgatgcccagtgctgaatatgcgatgatgcgcttgtcggcaaagaagatcttgcctacatccagagccatgcctgcttctttataggagcgagatacctccttgatctctccgacaatcgtaccgtaagaaacgcggatcgcatcatcacggtcctttaaggcatcaatgatcactgccgcggtctttcggatatcgtcataggtctcctgctctgtgagttctttgacaacgatgatattgtgctcatctacggcggtcacaaagtcctttgtctttccgctaaagaggctgcgcacccggtcaatggaatctccatccttgtgctcacctgtctctacgatcataacaacacgtctggcattgatatctacatgtaacttcttggaacggttgtaaatgtcaaccagcaataagttatccagcaaaaggttcttgatgaagttatccttgtcaaagcgttccctgtatgccaccatcaattcctgaatctggaatgtggcgatcttgcctaccaataaggcttcttcctcatccgtaccttttgcaagaacaatgaactctaactgctgctcgtcatacaccttaaagaactggcagccggacactacctgactctctgcttcagagattgcaaatgtaactgctgattcgcgatactggcccggattcgtaagtgtagatgccaagacaccaccctcgctatccacaacagcgaaatcaaccttggtgatctggtgcagaccgtcgatggtattctgtagcgtctgattcgaaatcatatcctttcctcccttatctatgcaatttccacaatttgaccctgtggttttttgaagtttttcacatacttatttgctattttaatataatctgccaaaaaaagaaagaggcaagcgccatttttttatgcaaaatcccttttgctgcaaatattctgtcaatatctccacattttgacatttttttacattttaaaagtcaatgcttttttcctttttcgacaaattttatcagaaacttacaaaacgcttgttctttttgccatctacagattccgcgtttttatccccaaaattgtggataaagttaataattccgtgtataagtccatttttcccactttttcgttgcaaaaattgtggataagtttttgcggtcttccacccggatttttttgtttcttaccaaaatttggatttttgtgcagttcttccaaaaaacactttttaccttgacaaaattattgtctgaatactttttggggggaggagataggacttaccgtggatggggcgctggagtgtgtgataggggcggggaggcggactacgagagaatactgtcacagaacaggcaatttctatatgagggcatttg

SEQ ID NO: 12532 - DNA, 3338 bp, Unknown
  gut microbiota DNA sequence
tctcaaagatcatctggccggacggctcatcggttgggaagcagacggtagcagttgttgctacgtcagttgtagttgcatttatcatcgtaatcctggattacgtgattcagtatggcgttgattttctagtgaaattataatggaggcagaagtattatggcagaggcacactggtatgtagtccatacctactcaggttatgagaataaagtcaaagcgaatattgacaagaccatcgagaatcgtcatttggaagatcagattattgaggttcgtgttcctatgcaggatgtcacagaattgaaagatggtgttagaaaaacatcttccaagaagatgttcccgggatatgttctgatcaatatggtcatgaacgatgacacatggtatgtggtcagaaataccagaggcgtgacagggttcgttggaccaggaagcaagcctgtaccacttacagatgctgaaatgagaccactggggatcaagacagacaatgtggtcgttgactttgatgaaggtgataccgttgctgttatcggcggcgtttggaaagataccgttggtgttattcagacaatgaatcacaacaagcagagcgtgacgatcaatgtagaactgttcggtcgtgaaacaccggtcgagatcagttttgcggatgttaagaaaatgaattaaggaggaacaatccaatggcaaagaaaatcgaaggatatattaagttgcagattcctgctggtaaagctacacctgcaccaccagttggccctgcacttggacagcatggtgtaaacattgtagagtttacaaagcagtttaacgcaaagacagctgatatgggagatactgttatccctgttgttatcactgtttatgcagacagaagttttagtttcatcactaagacaccgccagcagcagttatgatcaagaaggctgctaagatccagtctggatcaggcgaaccgaacaagaaaaaggttgctaagatcacaaaggctcaggtaaaggaaattgctgagacaaaacttcctgacctgaacgcagcaacagttgaggctgctatgagcatgatcgaaggaacagcacgcagcatgggtgttgaggtgaccgaataggccgaaagcaacttaatgagagcgggcgtaagcacagctcgaatttagtgcgaggtcgttctttgagattaacgagagcgagcgtaagcgatgctcgagtttagcgaaaagaacttccttatttgcgcgatttaaaacaagttgaaacagtgggagggacctctcccgatactaccacaggaggtaaatagaatgaaaagaggaaagaaatacgttgaggctgcaaagtcatacgacaagtcagctcaatttgaaacagcagaagcaatcgctcaggtaaagaagaatgctactgctaagtttgatgagacaatcgaggctcatatcagaaccggttgtgacggacgtcatgcagaacagcagatccgtggtgctgtagttttaccacatggtacaggtaaggctgtcaaggttttagtattcgctaagggtgctaaggctgatgaggctactgcagcaggcgcagatttcgttggagcagatgaactgatcccaagaatccagaacgatggatggttggactttgatgtagttgttgctacacctgacatgatgggtgttgtaggtcgtttgggacgtgtacttggacctaagggcttaatgccaaacccaaaggcaggaacagttactatggatgtaaccaaggctgtcaacgatatcaaggctggtaagattgagtacagattggataagaccaatattatccatgtgccaattggaaaagcttcctttacagaggaacaattagcggacaacttccagacccttatggatgccattaacaaggctaagccaagcagtcttaagggccagtacattaagagcatttctttggctcctacaatgggacctggcgttaaggtaaatgttgcaaaagttgcacagtagttattgacattcgtataatacaatgatataatgcgaaagcatgttgccgaagacagtaggtgccgcaaggcataacgtatacgacctaccgaggacagtcgatcgtttttaaacgatgtgattatgattttttgagcctctttgtctagcgcagagaggcttttgttttgcctgttggcaggacatcagataaaatctccaaagtctaagcaagatgaaataaaataaggaggtacacgaaacgtggcaaaagttgaattaaagcagccggtcattgacgagatctcagcaaacatcaaagacgcacagtctgtagttgttgttgattatcgtggattgacggtggcagaagacacacagttacgtaaggaattaagagaagcaggcgttacttacaaggtatacaagaacacaatgatgaactttgctttcaagggaactgactatgaaagcctggctccagtgttagaaggacctagcgctattgctatttctacagaagatgcgacagctcctgcacgtatccttgctaagtttgcaaagacagcacctgcacttgaaatcaaggctggtgtcgtagaaggtacattctatgatgcaaacggaatgcaggcagtagcagcagttccgtcaagagacgaattgttgtccaagttacttggaagcttgcagtcacctatcacaaatctggctagagttcttaaccagatcgctgagcagggcggcgaagcaccggcaacagaagagtaatcacttcattaaaaagaaaatattaaatcaaatttaaaacggaggaaattatcatggcaaagatgacaacagaagaatttatcgaagctatcaaagagttaagcgtattagagttaaatgacttagtaaaggcttgtgaagaagagtttggcgtatctgcagcagcaggcgttgtagtagcagcagcaggcggagacgcagcagcagctgaagagaaggacgagttcgatgtagaacttacagaagtaggtcctaacaaggttaaggttatcaaggttgttcgtgaagcaactggtcttggcttgaaggaagctaaggaattagttgatggcgctcctaagatcgttaaggaagcagctgacaaggctacagcagaagacatcaagactaagttagaagcagaaggcgctaaggttacattaaagtaattcccgcctgatggcataattagtattgcaagcagagacaccagggttattcgtgatcctggtgtctttttgtgtgatgggatttttccgtgggattccctattacacaaaaggccctaacgtgccaaaaatccgcacaatgcaaaaaaatggc

SEQ ID NO: 12533 - DNA, 4617 bp, Unknown
  gut microbiota DNA sequence
gttcttgcatcctgagagaaattgttgtatagtataggatgctttattgtggtgcaatgggaattttatgcccatttttcaatagacttaaaatataaacgagaggtgaaacgtcaatggagaaaaacagaatacgtccagtcaagtctggaaaaagcatgcgtatgagttactcgagacaaaaagaggtattggagatgcctaacctgattgagatccaaagggattcttatcagtggttcctcgatgagggattaaaagaagtcttcgatgatatctctccgatcgctgattacagcggtcagttaagcttggagtttgttgattttacattatgcaaagatgatgtgaaatatacaattccacagtgtaaggaaagagacgcgacatatgctgctcctttgaaagtaaaggttcgtctttacaacaaagagaccgacgagatcaacgagcacgagatctttatgggagatctgcctttgatgacagagacaggtacctttgtgatcaatggtgcagagcgtgtcatcgtcagccagttagttcgttccccgggaatctattatgcaatcggacacgacaaggtaggtaaagaattgtattcttgtaccgtgatcccgaatcgtggtgcttggctcgagtatgagacagactctaatgacgttttctatgttcgtgttgatagaaccagaaaagtgccgatctctgtattgatccgtgcacttggtgttggtaccaaccagcagatcatcgatctgttcggtgaggagccaaaactccttgcatcttttggcaaggatccatctattacggaaaaagaaccaaacggttcttacgaaggcggtcttttggaattataccgcaagatccgtccgggcgaaccgcttaccgtggaaagtgcagaaagcctgatttctgctatgttctttgacccaagacgttatgaccttgcaaaggtaggacgttacaagttcaacaagaaattagcactccgcaaccgtatcaacggacagattctcgcagaggacgtagtggacgagactacaggcgagattcttgcagaggcaggtaaggtcgtaaaccgtgaactggcagatgctatccagaatgcagccgtaccatatgtatgggtacaggctgaggagagaaatgtcaaagttctttccaatatgatggtagatatcagcaattatgttgacttcgataccaaggcattgggcgtaaacgaactcgtttactatccggttttggcacagatcttagaagagaatgagacagcagaagaccttgctgatgcaatcaagaagaatatccatgacctgatcccgaagcatattacaagagaggatatcttcgcatccatcaactacaatatgcacttagagtatggcgttggtcatgatgacgatatcgaccatttgggcaaccgtcgtatccgcgcggtcggcgaattgttacagaaccagtatcgtatcggtctttcccgtctggaaagagtggtacgtgaacgtatgacaacacaggatctggaaggcatttcaccacagagcctgatcaacatcaagccggtaacggcagcagtgaaggagttcttcggatcttcccagttgtcacagttcatggatcagaacaacccacttggcgagttgacccacaagagacgtttatccgcattgggacctggtggtctgtcaagagaccgtgccggattcgaggttcgagacgtacactattctcactacggtagaatgtgccctatcgagacccctgaaggaccaaacatcggtttgatcaactctctggctagttatgcacgtatcaacgagtatggtttcatcgaggcaccatatcgtaagatcgacaagagcgacccacagaatccgcgtgttacggatgaagttgtatatatgacagcagacgaagaagacaattaccatgtagcacaggcgaacgagaaactggatgaggaaggacattttgtacgtaattccgtttccggtcgtttccgcgaggagacccaggagtacgataagctcatgtttgattacatggacgtatctcctaagatggtattctctgtcgctacagcattgatcccgttcctgcagaacgatgatgctaaccgtgcgctgatgggatccaacatgcagcgtcaggcagtgccacttcttactacagaagcacctgttgtcggaaccggtatggagccaaaggcagcagtcgattccggtgtctgcgttgttgcaaagcacgcaggtgtggtagagcgttctgagtccaatcgcatcatcatccgcacagaagatggcgacaaggatgagtatatcctgacaaagttctctcgaagcaaccagtcaaactgctacaaccagcgtccgatcgtattcaagggcgatcatgtcgaagaaggcgaggttatcgcagatggaccttctacatccaagggcgaacttgcacttggtaagaaccctctgattggtttcatgacttgggaaggttacaactacgaggatgcggttcttctttcagagagattggtacaggatgatgtttacacatctatccatatggaagaatacgaagtagaagccagagataccaaacttggaccggaagagatcacaagagacgttccgggtgtcggtgatgacgcactcaaggatctggatgaaaatggtatcatccgtatcggtgcagaagtccgtgccggagatatcctggtcggaaaggttactccaaagggagagacagaactgaccgcagaggaaagattgctccgtgccatctttggtgaaaaagcaagagaagtccgtgatacatcccttaaggtgccacacggcgaatacggtattatcgtagatgccaaggtatttacccgtgaaaacggtgatgaactgtcaccgggcgtaaacaaggcagtccgcatctatatcgcacagaagagaaagatctctgtcggtgataagatggctggtcgtcatggtaacaagggtgtcgtttcccgcgtgcttcctgtagaagatatgccattcttgccaaacggtcgtccgcttgacatcgtgctgaacccactgggtgtaccttctcgtatgaatatcggtcaggtcctggagatccatcttagccttgcagcaaaggcactgggcttcaatatcgagacaccggtatttgatggcgcaaaggaaatcgatattcaggatactttggaactttccaacgactatgtaaacatggagtgggatgagttcgaagcaaaatataaagatcagttgcgtgatgatgtcatgcagtatttatctgataacagagaacacagagaactgtggaagggcgttaagttaggacgcgacggaaaggtacagttgcgtgatggacgtacaggcgaggaatttgattcaccggtaaccatcggacacatgcattacctgaagttgcaccacttggtagacgataagatccatgctcgttctaccggtccttactcactggttacacagcagccacttggtggtaaggcacagttcggtggacagcgtttcggagaaatggaagtttgggcactcgaggcttatggtgcttcttacacattgcaggagatcctgacaatgaagtccgatgacgttgtaggacgtgttaagacatatgaagccattatcaagggcgagaatatccctgaaccgggtattccagagtcattcaaggtactcctcaaggaattacaggctctgggtctggatgtcaaagtcttagacgaagacagaaacgaagtacagttgatggagaccagcgaatatggcaatacagacatcaatgctatcattgccggagataagaacttcgcatttgaaagcagcgaatcttttgcaaagagtggatttaccaagcaggaattcgatgcagacagcgaagagttagtcaacattgaggatgaggaagaagagccggatatggatgctttttctgatgatttcgatggagacgatcttggcgacgaatagtaagaagggagattagcaatgccagaagcaatgaataaagaagcaacaaatcagccaatagaatttgatgcaattcagattggcttggcatcaccggaaaagatcagagagtggtccagaggcgaagtaaagaagcctgagacgatcaactacagaactttgaagccggaaaaggacggattattctgtgaaaagatcttcggaccgagcaaggactgggaatgccattgtggtaaatacaagaagattcgctataagggcgtagtctgcgaccgttgtggtgttgagatcacaaaggcaagtgttcgtagagagcgtatgggacatatcgaactggcagctcctgtatctcatatctggtacttcaagggtatcccatcccgtatgggactgatccttgatctgtcaccaagaacactggaaaaggtattgtattttgcatcttatatcgtacttgatgcaggagacacacctcttatgtataaacaggtattgtcagagcaggaatatcaggatgccagagaacagtacggctcaaccttcaaggtgggcatgggtgctgaggcgatccagaaattgctccgcgatatcgatctggaaaaagatgcggctgaactga

SEQ ID NO: 12534 - DNA, 5125 bp, Unknown
  gut microbiota DNA sequence
accatgacatacgtctctgaaaaaccggctaaaatagcatttaacacagagattaagaaggacggcagtgccatgttgagtgttgccgggattcctacgccatagagtcttttcagaatcgaagcatctggtttgcagtcggtaatggtaatatgtacaacgcggggtttgcgatagtaaaaaatgaaataagcaaccagcgtcagtacctgaccggatccggttgcgaaagcagccccccagatgccccatttcggaaaaggaccaatgccaaaaatgagaagtggatccaaaataatatttgttacaaagcctaccaacatgcagaccatagtttctttcatccagccgattgcctggaaaattttctcataggtaatcccaacggtgacgacaggcgcaaacaaaaagaccagattagcatacgtcaaagcgagagagagcacattggtattgcttgtgtacatggacaaaaagctcttcatgccaagaagccctaaaatggttaaaagaacaccgtggatgaggttgaaaaatacgccttgacttgcagcgagatctgctgtcgtttgttcctttgcaccgaggaaaaaggcaatggcagcattgataccgacaccaaagccaacggcgactgaggtgatgatattttgtgcgggaaatacaagagagagggctgtcatggcatcctcactcagctttgcgatgaaatagctgtcaatgatgttgtagagagaattgactgccatggaaacgaccatgggaagtgccatggaaagtactaagggaagtattttcttttctttcataaacgtttgattcattttcgcgcatcctttcaaaaataaatattttaaagcataaaaatcgccacaagtaaaatgcaatgcacattctactgtggcgaaaaagactatgcctgaaaagtccacatcctacaaagagtatgtaggttttaggagtttattataaggggagaagttgacagtgtcaatgatttagactatattcttattaatcttagggggaataccatgatagggaaaaaagaaatatatattggcttgaaaaatgaaagatatgatagcatcttacggatattggatgagaagaaaattaaatatgaggtaagagcaatggaagaacatcatgttctggatataaatcgtggtggagcggtaggacgttttggcgaaaataatgaaagcaataagtgcgtaagaatacttatatccagaaaggattacaaaagggtaggggagttatcacagtaatttgcaacacaggacactttttctagttaaaaggtgtcctttttttgtgccctgacaggcagtagaatacaagtagaaatcaaaaatgggggtagcaaatgaagtattatttagcgattgatattggcgcatccagtggacgccatatgttaagttggatagaagacggcaagatgcgcttgcaggaagtctaccgtttttataatggtatggatcaggtggacggacatctttgctgggatgtgggacgtctttttgccgagattgtcgccggtatgaaagagtgtaaaaagattggcaagatcccgacctctatggggatcgatacctgggcagttgactatgtgcttttggatgacaaggatcaggtactgggaaatacctatgcctaccgcgacagtcggacggatggcatggatgccctagtctatgaaaagatcccgcaggaagatctgtatgccagaaccggtatccagaagcagatctttaattccatctatcagttgatggcacacaagacacaggaggcagaactgcttggaaaagccaagactttccttatgatcccggattatttccacttcctgctcacaggtgtaaagaagcaggaatataccaatgcatccacgactcaactggtcaatgccaagaccaatgattgggactatgatctgatcgcaaaactgggttatccgagagacatctttttgccgatcgaaatgccgggtacagaggtcggacatttgagccagacgatacaggatcaagtgggctttgattgcagcgtggtacttccggcaacacatgatacgggggcggcggtcatggcagtgccgagcctgtcggacgatacgctctatatcagttccggcacatggtctttgatgggaacggaattaaagacagcaaattgcagcccggacagtatggcatgcaattttacaaacgagggtggctatgaccatcgctatcgttatctgaaaaatatcatgggactttggatgatccagtcggtacgcaaggagttatccccggacgagggattcggttctatctgcgaacatgcggcaactgagacaatcacatcgatcgtggatgccaatgacgaccgttttttggcaccgcagaatatgacagcagaagtacaggcggcttgcagggagtccggacagaaagtaccggagggcatctatcaggtggcagccgtgatctacaacagtcttgccaaatgttatgccgatacggttagggaaatcgagaagatcgagcatgtgacctatccttgcatcaacattgtaggtggtggtgccaatgctgcttatctgaatgaacttacggcaaaggctaccggaaaaacggtctatgccggtccaacggaggcgacagccatcggcaatatcatggcgcagatgatcgccgcaggcgaactgcaggacttggcagaagcaagaaaatgtgtattccattcatttgaaataaaggaggaaaaaggatgttagttgaaacaaaagcaagagttggtgtatttgccatcgcattgggagcctatttgccacagttcccatcactggtccctgaatttgaaggacagtttgcagattttaaaaagaccataccggacagtgtcgaactggtagacggcggcattgtcacaacaaaagaggcagccatggcagccggagacaagttccgcgcagcagatgttgatcttgttctcttacagatgcttacctatgcgaccagctacaatatgcttccggcgattcgtgatctgaatgtgccggtcgtactggtcaatgtgcagaagaaaaaagcaccggactatgccaatacagatacagccacctggctgggcgaactttacgcctgcggcgctgttggtgaaatggttgcagacttggagcgtgcaggaaagagacatgccgttatcacaggtgttgttgagggcggcgatcctgaggtggaaaagcagattgctgagtggtgtaccgcagcacaggtaagacgtagatttcgtgataccaatatcgcccagatcggtcgtccgtatccgggcatgatggatctttatatcgacgagaccaatctttacaaccgcatgggcttatataccaagcagtttgactgggaaaaaatgtggtcgatcgccgacgacatcacagatgaagatgccatccgtgccaaggcagaagacatcttagatacctttgacatcgaaggcggtgcgacagttgagacggtctgggaaatggcaaaatatgtagtggcttttgaaaaatgggtcaaggacgagcagttagcactggttgcttcccattatgacggttttgcacagggcgttgccggaaaactggactctatgctgatccctgcattttctatgctgatcaagcaggggacggcatgtgctgtagaaggtgacatcaaggttgctatggcgatgagcatcttaaagaccattgccggaaccggtcagttgtccgagatgtactctatcgactttaacgaggacatctgcattatcggacattcgggctcaggcgatgccgatatttccgtagacagtaagccgaccatgaagatcgtaccggtattccatggcaagaccggcggcggttatctgacccagttctatccaccggcaggcgatgtcacttatcttgctatcacacaggataaggacggacatttcaagtttgttgtggcagagggtgtcaatgaggaaggaccgatctttacgtttggagataccaatatgagaacccgcttctctattggtgccagagagttctgcaatcgctggagcgaggctggtccgacacatcatatggcagcagccattggcagacatatcgatgtcattgaaaaggttggaaagatcttagacattccggtagaagttgtttgtagataaaatatatttatgaagagagaggaaataaaaatgaaatttttagacgcagaatttgtacagggatttatccgtatggccaacgatggctgggaacagggctggcatgagagaaatggcggtaacctttcttaccgtgtaaagccggaagaagtagagtctgtcaaagagaactttgagccaaaggagtggcagccgatcggcacaagtgtgccaaaccttgcaggagagtatttccttgtaacaggcagtggcaaatatttccgcaatgttatcattaagccggaagattccatctgcatgatcgagttggacgaggcaggcgagaattaccgtatcgtctgggggcttgtcaatggcggcagaccaacctctgaacttccaagccacttgatgaacctggaagtaaagaagttacaggatccgaagtatcgtgttgtttatcatgcacatacgaccaatatcattgcccttacctttgttcttccattggaggacaaagtctttacaagagagttgtgggaaatggcaaccgagtgtccggttgtattcccggatggtatcggcgttgtaccttggatggttccgggcggcagggagatcgctgtggcgaccagtgaactgatgaagaaatatgatcttgccatctgggcacatcatggtacttttgcagcaggcgaagactttgatctgacctttggccttatgcatacggctgaaaagtctgctgagatcttagtcaagatgctgtctatgcagcctaacaaacgtcagactatcacaccggatgatttccgtcatctggcaaaagatttcggggtaaccctcccggaagaattcttatatgaaaaataagatcgtatataagataggtagagtatagaagaaaaaaagaagtccgaaaatgctagtcatgttcggacttctttgttataatggg

SEQ ID NO: 12535 - DNA, 19726 bp, Unknown
  gut microbiota DNA sequence
gatgctgccttatatcctgcttatggtgcgcttttttaaaggattgatcgcacaggcggcagagaaaaaaaataagataaaatatatctttgttgccatcggggcaggaaccatcctgccagacctgctcttaaaggtggatttcggacgctggatgtatgcgatcatcgcctattattgcgttgtgttgctggcactgtttgccatgggggatgaggcggtcggcaggcagtttgtcctagcggtggagcgcatcaaaaaacacggatttgcggctcttgtcatgctcttgtatccgctgatcttccagccgctttgggatgtggcaatctgcagcgtcgttgccaaacttgccggttatatcaataccgggctgggcttgggttggtggtaggcttagggaagggtgcgttccttcagccaactgcaaaactgcggtgaccggaccggataatataaggtacgaggggctatgcgtttgcatagccttttataagttgccatggtctcggtgtattgcttctgataatgatcgcgatgtctggcatcttttaagacatggatgtcatcaaagatcacatcaaaatagaagttgtaggctctgatataggcttccggaaaatccttttccagaaaatccaggatcttgtcgtatgctttgtatgccagtggctgtcggtcgatgatgtccgtgtccttgtgggtcagactgccaggcaaaaacatataatgatacaggatatgaggcatgataagggcagaggaaatccgtgcaccggcttccagtacccagagtttgtcctcgtagatggtaagtgactcatcataaagaggcaaggaaccgtccgcatcccgcagggcagaggtacgccagatcttattccaaggatagccgccgccataatggatattgtcagaggcgatttcggtcagaagtgtttcacggtcacagacaagaggctgattgctttctttcgagcgagggagtgatacacgcttttgaccggaagcaagtgtttcttctattggcgttatgtgtctcatggcttctaaatgtttggcaatagtggacatagaatagtcttgcgtaatgcagtggtcgaccagagtgccatcggcaagatgatcctgccagccgaagcagaccagatcggagtcgtggctttgcatggattctatacagagcgaccaggcgtgagagtctaaatagtcatcagaatccatgaaagtcaaaaattctcctgttactttgctaagtcccaaatttcgggcagaacttacgcctccgttttccttatgaaataagtggatgcggttatcacgagtagcaatttgttccagaacagcgcagcaatctctgctagacccgtcatccaccaaaatgatctcggtatttgtatagtcctgctgcagcaggctgtcaatgcagcggttcaggtgtaaggtcggtgtgttatagaccggcacaatgacactgatttttgcgttttttacgtttgtttccataaaacccctcattttcctgcagaaatctgccatatttcccatatatacttaggataatcatacccaatgttgaattttacatcaagataaaatataatttaataatatgctaggtgcattgtgtccgggcatacaaggataggtgaaatgagaacaaagaatacttttttaaatgccctggcaaattcgggctcttatattgtgaatttgatactttcttttgtggcacgtacgatctttatccgcgtcctgtcacaggagtatttgggcgtgcagggattgtttggcaatatcctttccgtgctttctctggcagaactcggtatcggaacagccatgatctaccatatgtatggcccgatcgcgcgcgaagatgaaaaagagatcacggaactgatgaacctctaccgcaaactctactcttatgtagcaggctttatcacggtagcaggactttgcctggttcctttcttaaaatattttattgcggacgatcccgggatcagcgggctgacagggatttatctgctctatctgttgaatacggtcgtgtcctatttatggggctataagagagcgctgatcgacggacatcaaaaaggctatatcagtacgctttatgtgacagcctttatgaccatccagttcattgcgcagatcattgttcttttggtatttgaaaatttcatcatatatcttttgatgcagatcatatgcaatatcctgaccaatctttcaatcgcctggaaatgcgaccggatgtatccgtatctgaaaaaggatcgcaagtctctgccatccaaggaaacacagaagagcatctttaagaatgtcagtgccatgttcatgcacaagttgggtgatgtcatggtcaacaatacggacagtctgatcatttctgcctttgtcggtctggtgaccgtgggtatttttgacaattaccgtatgcttctgggaagtgtcaatacagccatcaatggcattttgggttcctttgtcgcaagtatcggaaaccttagcgtcacggatgacaaagaacgcgtttttcatatctataagaccttgaattttatcggcttttggatccattcctatgcggcagtgacctttcttgtcatgttcaatccgtttatcgaggtctgggcgggcaaagattatcttttcccgatgagtgttgtgtttttgattgtactgaacttttatatgagcggtatgcgcaaggtgacattgaatttccgtgatgcgatgggactgtattggtacgatcgttacaagccgatctttgaagtgatcgtaaaccttgtggtttctattgttctggtcatcaagtatggtctggtcggtgttttgatcggtacttttgtatcgacggctggtgtctgcttctgggtggaggcactggtcacctacaagcacggttttgaaaagagcgtcagccattacttcaagatgttttctatctatacggcatctgcggtggcagtcggtggatttacttattttgtctgtagttttattgtcatgggcggattgctggagatcttcttaaaacttgtcgtttgtacggctatgtataatatcctgctgatgctgctttatggcagaacggtagagtataaggagttcatggaaaaactgatcggtctgatcgagggcaggatgggacgcgaactgacagggctgcgcaaggtattgatgcggtagaggttatggaaaaagttatgcaacaaaagacgagtcgaattgtatatttggatgtgttaaaaggtgtcagtatgctcctggtgatctattgtcatggcgttttgctgccctatcattctgtggtaggaaatttgatgatgaccttagcctggggagccgttccctgtttcgttatggcatcgggggcagtactgcatcagagccgacattttacatggcaaaaacacgggaaacgccttggatctatgtatatgactttggtctgctggcgtttgctgtatttggtggtttataggattgcaggaaagatcaccgggatttccctttggacatgcatcaagtatctgttctttttacaggattacgagggcgtggatacaggtcttatgtggtatatgatcgcctatttggggcttatgatcgtatatcctattacctatttcctgtttaccggcggtacactgggaaggcagattacattctttatcatgatcctatccggtctgacaggtatcctttttccatctgtgaattggctggttggacagatcatacatggaagggaactgccattgcaggcatggaatagcatattgacttttggcaacaataataatttgctgttttatttcctgttgggagcatttttactggaatatcagcaaggcgttgatcgaaaagaatgtgggcggatctatagatggcgattgcctttatcggggatatgtctggtaatcggacttatggggcttatgtttatcaaataccgtgagaccggcttactgatatggggagacacttatctgagttttggctatgtcagattatctaccgccctgattgcaatagggctgtatggggtatgtgagagcctattttccgaccgcgagaatctggcaagcaaaatcataggagaatacataggacaaaatacactgggaatttattatctgcattacatattactggcggtattttcatggacaacttgtttttcatggttgcaattccattattttatagggatgaatttgataaaaacgttcgcagtagcgtttgtatgttacgttgtggttggtctggtgagcagggtaccgctgattcggaaaatggcttcataaatgtggctaatatggatgaaagataaaatgaaacagagaagagttatatttattgattatattcgtgctttggcaatcctgatggttatcatgtgccatgtgattgatgtcaactgcctgttctggctgggatatcaggacatgtccggggcaagacagatcatcctatatactttgctgatctttggcagatgcggcgtgccgctctttcttatgatcacaggatatctgctcttagaccgtgattatagccaaggtaaatggaaaagtttctatttacataaatggctgcatcttttcctgctgacagagatctggtttatcatttatgagggcttttcggttttcgtgcagggaaatccatttgtgggaaaaaatcttgtcttgcgcctgttgttcgttaaggaaccagctttgtcacatgcctggtatctgccggttatattggggttatatttgctcttgcctgtttttgcactggtttggaaaaaactttccaatcggggatgcctcattaccgtccttttgctatgggcacttgtattgttgctgcagaattttgcccaagagagtatggcgcaacatataacctatgccctgtatatgctgattggcggagcatacaagaggtggcatacagcgttggtagaacacaaaaaagatgcttacaccatatacagtctggcaggcattttcgctttggctggatgtgagggctatttatggctccagcacagaaggggagaaaacgtgagtctttggtatgaccacgcggggattgttttgctcagtctggccctgtttggttttgcgatgtttcttgtgcaaaagaattgttccttcgtggagcgtctgtcacaggattcttttggcatttacctcatacataatatgatcgcacttatgatgatgccgtggcttagtcagtggaacagcaatctatatttgaaaatgatccttacctatctgttggtttggggaattgcctgggggctggtccgtctgatcggaaaaataccatacgtcggagactggattctttataagaggagattgaaatagatgaagataaaagataataaatttacatgggcaatgatcctctttacctttgtactattctggaataattttgcgggaacgacaagcaatatcaatacgactatgcttgcttttcattatgggtatggctttatttcccgtgggctactggggacgatttatggtgttttaaaccggatcctgccttgggatttatatactttcggctgggcaatgctcttttttgaaggatgttttctggtctttgttgtattacttttcctcttttgtatgaagtgtctgagaatgagcgacgaaaaggtaaaacagagtgcccggtattttatcatcttatattttattgcagcgatccctatgttttccagtgagtataatctgggaagattggacatgtattgtctcatgtgcagtatgctgtctgtgcttcttatggtctatggaaaggcagaatggctggcggtgccgctctctgccattggcgtgatgttccatcagggacatgttttcatgtatatgggaatggtgctggcgatgcaattatataaagcactggatgcggtcaagggacaggaagacttgagggttatcttttcaaataagaccagccggaaatatctgggcatgtttttggcgaccatgcttacggtgtctgctttatttatctggtttgagggtttttcacatattgatggagaaaaattcgcggatcagttgattgatacagcatgcagtatggggccggatgctgactatcatattgaagttgtggaacatgagattttaggggtggatttatcggctaaggaatgggaatatcgcaaacaaaatcttgtggaatttccattatattgtctgtttatgctaccatatattttaattgctatacggtttgcgcgagacctgctgcgactggcgaaagcaaagattgataagtggaaatatatcattgtgcttgcgggaactttgacaatcttgccagatatgatactaaaagtagattatggccgctggatcttttccatcatcagttattatgccgtcgtattattggcactgcttgcaatgcgcgatacggcagtgacagaggtgagccggcagacagtagacaggctaagaagcaaatatccatatgcggtcttattgttgatatacccgcttttgttccagccgctcatgcatattagcatctgtccgctgacagagaggatcgttaatatcctgaatgtgcatctgcatatatggattccgtggcaatagaaataggaaacgcaggagaaaagaggaaaatgaaagagaaacttgtaaaggcaaattacaatatcagacagtttatcatgatgctggcttttgtggatttggcaacctttgttacaaattacagaggctgggtcagatcctacaatacgaccatgcttgcgctgtcctatgaatatggatttacatcaagatccctgcttggaaccatctaccatattctggatgcggtgataccggtagatatgatgcaatatcagaatgccttggtatttgccaatgtggtaacggtcctgtttatcgtattccttttatttttttcctatcatgttttaaagaagagtgatatggaaaatggcatggtgacaaaggcagagcaatacatcttgctgacctttcatattgccatggtagcaacctttacctatgcatacaatttcttgcgtgtagatttttgcatggtatggatgatgttattgggctttatggcattgatgaatgaaaagacagaatggttgtccctgccatttgcggcattgggtatcatgttccatcagggcttcgtcctcatgtattttaatgtgatcctggtgatccagttttattatatgatgacacgaaagaataagaaaaataccattttgtttttcctgacctttctgataggatccggtatgtttttgtggtttgagttgttcagccgcaccaatggcaatgacatttttgagactgttttgcgggatgcgaccaatgtctcctatcagggaatctatcatacaaccctcttgtaccatgaggtcttaggcattgatgtttccggtgcggagacggattttgtatatatgaaccatgtgcaattagtcctttatctgctgatacttttgccggcaatcgttgttctggcaagggcttttgtaaggatcatcaagaaagcggacgacctgtttgccaagttaaaatatcttgcggtagcggtcggttccctgactattttaccggatatgctcttgaaggtagattatggtcgctggattctggcagtggttacttactatctgcttattattctggcaatgttgatcttgcgggatccactggttacggaagaaacaaaagttgtcgtagatagagtaaaaaaacatcctgcatggttggtatattttactctggtagtattgactgtcccttatatggatgtggatattgacatgttagtcaagggcttacagcgctttatgcaaagtaagggcatattgttctactagaggatgaggtgatttggatgaaagataaattacaaaaaaaagatatgacctttctgcttgctttggcaggttttggttttctgtgtgtcttgcgttattacaatgaaaatatgatgcagcacctgtgggcactatccattctggggaaccgacgtatcatacaggggatgacggcagtatttttccttattttgatcggagtggctgggcaggcgctgcgcaaggtcagtaaagaaaatagaagcgggatctattatatggcaacgctgcttgccgtatgcctgatgccgatgtttatctgcgacagttatatgggatcaccggatctgtacgcgtgggtcatcatactcttatgcattgtggcacttttgaacggaagatgtgatggtattgtcctgccgggcatcctgcttgccgcatatatctgtccgatgatcgtattttccggtggagcattattgttcgcggcagtattggcaaagggcatgtgtgaggataacaagagaaatatggtgcaggcggcagggatggtcgttatggctttcgtggcatttgttctggcaaaggaaacttatggatttgcagcagatgtgcaggggcgtatttcagggaaacgcttcctggtcattgttcttttgtttctgccatatacttatgccatctttcaattttttgcctctctgataaaagaacagacagatggacggcacagactggcttatcttttgtgtggtcttggctccgttccgggctttttgctgtgggcttatctgggcgattattgccgggcggtcatatatgcttttgtatattacctgttactgctgttgatcctgtattgtcaggagctggcatttcagacatcatggaatacatttcgactgtggatcaaagaaaaagtggttttagagccggttgttgtgatctatccattgatcattctgacattctggatggtatccaatgacttcatcgatgcagagtcgatcatagaatttacgaggtaaagaaattgaaagagtggatcaaagattatgtcaaatcaatagggcttgtgatagggtgtgccatcgcagcaatactcttgctgacgcttgcgtatatgataccgcgcgatctttttgtaaaacatatagaggagtcagaaaatcttttatatgccctgtgcgatgacaataatatcaacgcgaatatagacgggtatgtatatgataccaagaccaatatcattaccttagaagaggtgatcgcgccgagagaacacacggctttccaggatgccttgctggcaccgagttccaattatatccgggatttctttggagactgggtcaatactctgcaaaatgatgcacatgcgaaagcctatagtgaggataataaattgacctatccgcgttattggcacggttttgtactgttcttgaaacccatgtttgttttctttaacctgaatgagatttatcagatcaataccttgatcttatgtggcttgtgttttgccactctgcttttgatctataaaaaagaaaaagcatacgttggaccgtttcttgtcctgcttgcactttttaatccgccttatattgcgaggtcatttcaactttcgagtgtcttctatgcgatgatccttacatgtataatggtactttgctgggatgacaaggaaaaaagggaacatcttttcctgtatgcctttgtgatcgatggtattattctggcatttttggatttccttacttatccgccggtggcattcgtggttcctctttgttttgtgctggtattctcagaacaagacctgttacataatctgcttgcgagtatccgttatggtatagcctttttattaggctacgccggaatgtgggtaagcaagtggatcctggcatctttgtttacggatgagaacgtgatcgccgagggcattgaaagtgtcctgcaccgaacaggaaaaggcgcgatgtcggatgtggatagcgcttttaacgtggagatcagtccggcagccgccatgcgtgaaaatttacatgcctttggcacaagaccggtcaggatcatggttttcctgctcctatgtgctgcggttgttctggtcatttatatgatccggcataaggctggttttacgaagcgagcagcgggaatgtttgtgatctttgcattactgacaatcattccgattgtgtggatcgtggcattgaataaccattgctccctgcatccacatctggaatggagagaatggctggtggcagtttttgcaccattaatgtggctggcatggttctggacagatagaagaaagaaagcagtggagtgcagataagatgaaagtgaagcaaaacatccaagtattgattaaaatgatagggattgtagtcattagcagtatagtattggtggggcttttatgccttgtctataaattgccaagaaatcgcatggtagagcatgttatcgaatcagacaatacgatccgtttgcaaaatgatgattacaatatgagtatttccaatttttatgatacctacgatacagacaccaacattatcatgttattagaagccatcgcaccggatttcaacggttcattgcaggatgccctgctgtgtccgtccggggcatatctggaaaatcagtggggagattgggcggataccttgatgaactatgcaaatgatgcgcaaggcgatctgtcttatgtcaactatgccagatattggcatggctatctggtatttttgaaaccgcttctgatgtttatgaatgtgcaggacatctattatctgcatgccatgcttatggtctttttgacaggatggatcttctgcctgctctataagagattgggaaaatattgtattgcgtatgcggtaaccatcattgccatgaatccggttgcgattgcgcagtcctttcagttgtctaccatctattatgccatgcagttgaccctgctcttacttttgtattgcaaaaaggaaaaacagatcccttacatattcctgatcgatggtatgctggtggcattctttgactttttgacctatccgctggttgcctttgccattccggttctgacttactatctattatatcgtgaggacggatttttacagaatgtaaagaagatcgtgggcaagggagtttcctttttgatcggctatgccggattgtggtttatgaagtggatctgggcaactgcctttacccatgaagatattttaagagacggctggatcaatgtactgcgaagaacaggaaccggtgacaactttggagacaatcagtatgggatggcgattggccctatggcggcactccgcattaattttcatgcttttgtcggatggacgacagtcctgcttggagtgatcttcctggtcggtgtgatcgcctatatgttgtataaaaagcaaaaaccgatctttcaaaagataacagtccttatttcatttctcgtagcatgttcgccgatcctctggtatgtggttgtcaataatcatgcatctttgcatccacatctggagtggagagaatgggtagtcagtgtgtttgccgcatgtgttttggtcttgagtttactaagggagaaaacagatgaaagaatatcggtttgaagaaataagtctgggtctgagtgaatcttttcaagttgagatcacccgggaaatgatggataagttccgggatatatccggtgatgtcaatcctttacataacgatacagaatttgccaaagccagaggatatgaagatcgtgtggtttatggcatgttgatcgcatcgcagatatctacgctgggaggtgtctacctgccgggggaatactgcctgatccatggcgtggagattgatttcgcacgcccggtctacataggagataagctgactattagtggcacagtgaaggaaatacatgaatctgtcagacgtctgacaatcaagtttgtgatcaggaaccagacaggtaagacagtttcgaaaggtattttgaaagcggggtgcatgctataatgagcagagagaaaaaagtcttatttgtcacgggggcatcatcagatgtcgggcaggcattgatcctgcaaatagcagatcagtatgacacgatcgtagcacattattgtcatagtcatgagagtatcgacgctcttgcgcaaaagttcccgggcaagatccaaaaggtcaaagcagatctggcagattccaaagaagtacgggcgatgatcgatgggatgataaaagaacagtggctgccggaccatatcgtgcatctggcagcgccaaagactacgaatgagcggtttcacaagatggatccggtcagattagatcaggcatttgaagtttcggtcagatctatttttcatatactacagagttttatgccacatatgagtaaacaaaagtatggcagggttgtattcatgctgacatcctattgtctgggactgccacctaagtatcagagtgcttatgtgacatccaagtatgccctgttgggtctgatgaaagctctggcaacagaatatgatagcaaggggatcacagtcaatggcatttccccggagatgatcgacaccaaattcctcagtgatctgccggatttgatcgtggaagaaaatgcagccaaaagtcccttgaaacgcaatctgcaagtggatgatgtggtgccgatgctggcatatctcttgtctgatgcagcagaggcgattaccggacaaaatattgccattaccggtggcacgagataaagaaaaggagaacaaacagatgagtagagaagaagtatttgaaagattacatgagattttttgggatgtttttgatgatgaagatatccgattgaccgatgcgaccacatcggatgatattgaagattgggattccctggagcatatcaatctggtagttgagattgaaaatcagtttggcatgaagtttaccatgggtgaagtacatgaaatgaaaaatgtaggtgagatggtagatattatcatcgagagagcgactaagtaggcggggaaggacatggcaatcacgtcacttaaattttttgcctttttggcagtcatatatttactgtactgtctggtgccgcggcaaaaacgctggtttgtcttgcttggggcgagtctgttcttttatgtggtctgtggatcactccgtttgtttgtcgtcacactcttacagatcctagtggcatatggcgcggcaatccggacggacaagcagcagagggagggtgtttctacaaagataaataccgcagggatccttacctgtctggcagtgctttttcagataggcgctttgctttattacaaagagatgaacttctttgtgaccaatggcaatatcctgcttcatctgctgggaaaggaaagtaccttgtccctttggcagatagtagcaccgctggggatttcttattatacattaagttatatcgcatacattttggatgtctattggggcgttgtcagcccgcagaggaattttttgaagttttgcctttttggcatttactttccgatcatgatctctggtccgatcatgcggtatcaggagatcgaacaggatttgtatgcgggaaacagagctgactatcagggcttttgttttggattgcagcgcattctgtggggacttttcaagaaactggtgatcgcggatcgtatggcgccgatcgtacaggagatctggtcgggagacttttatggatggtgtgtgttgatcggggtactcggttacgcatggcagttatacatggatttctccggatgtatggatgttgttgttaggggcatcggaattgtttggcatacgacttccggagaactttaatacaccattatatgcgacttcactatccgaatattggagaagatggcatattaccttgggagcctgggtaaaagattatgtcatgtatccaatcctgaaaacaaaaggcttgcagacgcgggctaaaaagtggaaaaagaaatacggcaagaaaatgggaaagaagatgacgacatggatcggtctgttttttacttggctggttgtaggtctgtggcacggcggagcatggacctttgttttcggatccggtctgtttttctttcttatgatcgttggtgggcagattttagagccgattggtaaatggtgtatagagaagatgcatatcccgacgcagagttttggatggaaactctggcagcggatccgtacctttgtattattttctgccagcatatcgtttagttggtctgccagcatgaaagatggttttcgtatgtgggcaagatgttttaaaccgacaaatctttcatcccttttgccactggcatcgcgtgcagactggttccttcttgttatcggagctgtcattgtatggctgatttcctatggtaagcaaaaagaggatgtgcggatgtatgtggcaaagaaggcattgccggtccgctggatcctttatcttgtattgttatttgcagtcttgatctgcggtgtttacggtccgggttacgatgcatcatcctttatatatggacagttctaggagtacatattgaaaacgaaacaaagacacataacaaaaatcattgcatttcttctggtggtggcgcttctctttgggggagcggcgcaggtgcttaggatatctgacgatacacattccagagcagaatttgataccttttacaggctggataaaaatagtctggatgccgtatggattggtgccagtgcggtacagtcgtcctttataccgtcagaagcctacgcgcataatggcgtgcagatgtatgggcttggaacggcaagccaaccagttgcactgacgaaatatctcttgcaggaggtgcaaaagacacaggatcccaaggtctatctgatcgatatccggatgttggcatatgattatgatgtgatgggaaatgagatcttctgtgataactatattcggcgtgtaacggattctatgcggttttcgcataatcggacacaagccataaaggatatggtggaacgtttggagaaaaaaacgggcagccgtgtcaatgcgtttgattactactttagtttcacgctctatcataatcgctggagtcagttgacggcggcagattttggacaggatgcggatagttttatgggctactatatctatgatgatacagaaagttttgataaacaggaaacactggaaagaagaagcgcaaagccactggaagtttcaagtgacaaccagcagtatttagaggaactgctggattatctggatactttcgatggaaacattctctttacaaataccccgaataatctggaagaggacaaatttgccaactgcaattatatcaagaagaagattgaggaccgaggctatgaagtgttggatctgaacgatcgtgtagatgagatcggcttggactatgaaacggatttcaacgagaatatgcatgtgaattatcgtggtgcatttaagatcacagactatatggcagactatctgaaagaaaagtacgaactgccggaacatgaaaaagaaacagacagcatttatgaaaaaacgcaggaaagattattgtctcgtaccgaagaaatggaaaaacgcaatgaataatgtaatgacggatgaaaatggaaaattgcaaagggattactggaatattttaaagggaatcggcgctttttgcgttgtgctcggacattgtgccatgccggtgcagaactttgtctatctgtttcatgtgccgcttttcttttttatctcaggttatatgtataatgagcaaaaatacggggatgccccatatgataatctcaaagggcgtatgaagtcctgggtaaaatatgttgctttatatatcgtttatattttacttcataatgtcttggggtattatgatatgctgcgcatagatgagccgctttatacaaaagcacagatggtggaacaaatggcgtacgctgtcatcggagacggaaatgaacttctggcaggtccgctgtggtttgttccggtgcttgtgatcggctctgccttcatgggctttgttatctattacagccgtatgctggaagatcggtttaaaagtaaaaagatcaaattcctctttcagggaattgtcataggatgtagcagtatcgtgggctatcttatgatcgcctatggctgggatctgcctgcacatatgcagatcgcctttgcggtacaaccatatttctgggctggctatcttttacgcaattatatgtccgatctggaaaagtacataaaatactgggtgggtatcatcctgtttctgcttcttgcgatctatagtagagatcatttgtatagcctggtggatggatacgtcagtccgatcatgtatctgactgcatttatgggattttacgtctgtatgtgtctggcaaagggaatctgtgttttgcaaaaaagcaattatctgcgcagtttattcgtcaaaatgggacaggcatccttccttttgatgggaacacattttatgattatccgcggcattgatcgtatctatgcaggatatcatcaggatatttctatgatgtatgaacattatttaggaaatcacaatatgctgatccctttgtatttagtattgggtattggcttgccattactgttacaggcattttggaatagactgtcgaaaggagttgccaaatgatagagcagaatccgatcatgccggatcgacgatattggaatgtgttaaaagggataggaatcctttgtgttgttttgggacatgcatgtagttgggcacatgattttgtctatgaatttcatattcccttattcttttttatctccgggtttatgtatagcgaaaaaaaatatggggatgatccgtacttaaatgtgatcaaccgcttcaagtcttcctggatcaaatacgttattgtttattggatcattatgttattacataattccctgatccgctggggctttatgccgatcggaacagaatattttagtttgcggaccttagcggaagcctgtgcttttgtgcttttgggtacagccaatgaattgatgggaggaaccttgtggtttgttccggcactttgtatggcatctgtattcctgagttttctggttacgatcagcagaaaaatagaaaagaaaacaggaaattcctatctgaaatttgcatttcagtttgtagtcatcctggtatgttccatcgtcggctgtatcgttatatctattttaatgcctgccaatatccaggtatcgcttacggtcatgccatttttgtggataggatacctgctcagaaattacggaaaaggactggagcaatatctgtctgtatgtgcagcagccatcctggcactagccgtttattttatcagttttcatcatagtctggatctgatcatcggtattttatatccgggaatgtatctggtggcattttccggtatttatgtatgtatggctctggcaaaatatatcagccggttgaacaggctcggttctttgatagcatcctgcggaaaggcttctttctggattatggcggtgcattttccgctcataaagatcattgatcgaatctgggcggcgcacataggagatccggaccgggtattgtatctgacgctgccacattctttcgactatatgtggccggtctatttactgctgggcattggcgtgccgttattgggatatcagttggtgcaaaagataaaaaatagagggaaatgatcatgaaaaaagaattactgtatccgtttgatgcaaactatattttagcaaaaaagaaaaggatcaaaagagaactgttggcagagggcgaacgttttgtcgataaaaagattgctattttaggaggatctacgacaaatgatattaaactgattctggaattatttttattaaatcaaggaatccgtccaagtttttatgagtccgaatataacaagtattatgaggatgcagtatttgataatgcagaggtagaggcatttgcaccggatctgatctatatccacaccagtaatcgcaatatcacgcgttatccacaaatgagtgattccaaaagtcggattacagacttattggaggcggaatatcagaaatattgcacgatctgggaaagtattgctgaccgatatcattgcccgatcatacagaataattttgaaatgcctatgtatcggcttatgggcaatcgggatgccagtgatagacatggaaaggtcaattttttgaccagactcaatatgatgttctacgattatgcggacaaccatgaggatttttatatctgtgatatcaattatatttccgctgattatgggctggcagaatggtctgatccatttttctaccacatgtataaatatgccttaaatgtcaatgccattccgtatctggcatttaatgtggcgaatatcattaaatccgtatttggcaaaaacaagaagggtcttgtgcttgatctggataataccttatggggcggtgttatcggtgatgatggtgtggaaaacattgcactggggcaggaagtcgcagagggacagatctattccgaatttcaaaattatgtgaaagagcagacgcaattgggtgtaattttaaatattgattctaagaatgattttgaaaatgccaaggcgggtatagaacacccggatagtgctttttgtatgcaggacttcattgaggtaaaagcgaattgggaaccaaaagatcagaatttcagggaaattgcagaagatctaaatttgttaccagaaagcctggtatttgtagatgacaatccggcagagcgcagcattgtgacgcaaaatttagatggggtatgcgcgccggagatcggggatgcaagagattatatccgtattttagaccgcaatggattttttgagacaacgatcttgtccgaagatgatcagaaacgtaatgagatgtatcgtgccaatgcagatcgaaagaaaagcctacatgcctttacagactaccatgcatatctggaatctttgcagatgaaagggacgatcctgccatttgatgagatgtctttgaatcgtgtggcgcagttgtcgaacaagagcaaccagtttaatctgacgacgaagcgctatacgcgtgatgagatggaaatgcgggcgaaagatgagaactatattaccttatacgggaaattagaggacaaatttggcgataacggcattgtatctgtagtcatcggcaagagggttaaagaagaatgtcacattgaattgtggatcatgagttgccgtgttttaaaaagggatatggaatacgctatgctggataccctgatagagacctgtcaaaataagggaatcaaaaagatccgcggcttctattatccgactgcaaaaaatgcgatggtaaaggatttctacggcaagatgggattttcacaggtggcatgtgatgcagccggaaatagcgaatgggaattagagatcacattggtctgggaaaagaaaaacaatgtgatctgtgtcaatggggagtagaaaatcaatgaagagactagagtatatagatatattaaggggtatatccattattggtgttgtgttgatacacgttatcagcattttgggaggtgttgaaacgggagtatggcatattgtttatcttggactaactcgtttttgtgtccctatgttcttcgtttgtatgggagcaattctgttgcagaaagacagagaactgaatatccataaattatatacgaaaaacattccaagatttttaattgctatttttctttatgggctcttacataagat

SEQ ID NO: 12536 - DNA, 45389 bp, Unknown
  gut microbiota DNA sequence
cttgggacagtatgggcaactcagttttggagaactgttgctcgcatatcctaaaaaatttatcacgggagagttggaattttccttttggtttatgtatgcgctgatccctatttatttcatgctacctattttaaaagcgattgtggtgcaggatcattccctaaaagttgtaaaaatatttttgggactatggatgatggcgagtctgatcaatggactttcttatttagaaccgttttcctttttaaacacatggacaaatggaaatcaaaatctttgcacagtatatggatatcctgggtatgtggtgctgggagcctatttgggagaaaagaaatttaccaaaggccagagatatgtgctatatagcatagggggattcgcatgtattgtatctattgtcgagcagacgatacgagtggatagaggctacggactggaatatacattgtttgattattactctccgacaactatatggctgactattgcagtattcgtttttataaaatatatatggagagaacgtcaaatcagaaaatggtatagcagagttctactctttgcaggatgctattctatgggaatctactttctacatacgattgcgcttctgttattgcagcattggttgacaatccggtatgttagttggagaccgattaggagtttggtggatgtgatcttagtttttgctgttactcttttggtcgtgtggagcatgtcgaaaaataaatacagcagaaagtggatatagttaggaaatggtattgtggcgcaaaatttagatggggtatgcgcgccggagatcggggatgcaagagattatatccgtattttagaccgcaatggattttttgagacaacgattttgtccgaagatgatcagaaacgtaatgacatgtaccgtgctaatgcgaatcgaaagaaaagtcagcatgcttttacagattatcatgcatatctgtagtcatcggcaagagggttaaagaagaatgtcacattgaattgtggatcatgagttgccgtgttttaaaaagggatatggaatacgctatgctggataccctgatagagacctgtcaaaataagggaatcaaaaagatccgcggcttctattatccaactgcgaaaaatgcgatggtaaaggatttttacggtaagatgggattttcacaggtggcatgtgatgcagccggaaacagcgaatgggaattagagatttcatcatcctggaaaagaatgaacgatgtaattagtataaatagaaagtagaaataaggtagagaggagaacatatagatgttagtgaaggagagaaaagaataatgttaagaaatataaaaaacatagggcgacgaaatatcgaatgtcaactaatatacctattattctctttttcagtaggtattgcaggtatgtgtacttatcaattgaatccggtagcagtagataaaggaggatttttgaggtatgacattgacttagttaatgaaagaggacttttagtgtgtgccatactttccattatggcgtatctgttgattaccgttgttgataaaggagcgcatcaaactaatgtcgccacaatgaaaccatataatgaaaacagagtattttggagtacatttattatatactcgtttttattaggaatattgttggcattatattttcctggaacagggatgaacgatacaatcaactgtttgatgggattttggcagaatacgcttcaaccagcgatgtttcagatgattatatatggtatttttcagggcatcttttttatgtgtaaaaatgcaaccatagcatatgctatcattgtcattttgcaaatttttgcagcatcctatattgttgccaactatttgcggtggattgcgaggaaaggcatagccaagtggttgcttatcttgaatatgatatatattatggctatgccattgatagggaattatacgattgctttattgaaggatacatggtttacatatgcgttttttctgttgttaccgaacatttacgatttgatacacggagaaaaagcatgctggtggcagattgttgtggcagttttcgttgtttggttttctcgttctaatggtaaattggtattagtgccgattatgatattgttgtttattttttgtaaaagccaaagaaaacatttggcgatacttctaatcacattagtagtattgaatagtggcttggattatgcaaagaatgttcgatttggaggatatgatgagtcgtttagagagtctatgagtgtaccattagtccaaatggctgcaactgttgtgtggaatggaaacatatcagaagatgaggaagaagtgctgtatgcggtattgccagaagaaaagtggagacaaaattatgcttttgcgtttgtggatccaataaagtttgacgagcattttgataacctttatctagccgcgcacaaaaaagaatttttgcaaacatgggcaagtatgttaaaaaagaatcttacaatctatgtgaaggcatatctgtatcacacgtatggaaattggagtttggctgcatacaatacgaacgcggttgataagacgcaatcaatttttctaaaacttaataataatacaggggatactagtatatggggcgaatacttagcaagtatatccttgaaaaatgattctttattgccgaatggtttgactaaattgcttcaaggatttcatgaagatgcctgcgaatggaacctgtggcttacgccaggaattatgtttttacttttaaatttgtgtacatgtattgcctggaaaaataaacgatataaattaatgttaacgtttctgccactgtatttatgttggggatgtatgatggttgcaagtcctgcgtctatgatctaccgctatagtttttacatattactttcgttgccatttgttttaactatgacatggagagatataggatacaaatagaagagttcataagagagaaattgctcccctaaattagtttttagagctagaaggaaaagctagcatttatgcgaatcactatgctgatgagaaaggggctcttgataaagttgcaggtgatttgggttacacaggagaggaatatgttgcgggagtttcgattgtcgattggaaagcatataaactaataaaataagaaagatgcaattgagaaaacttatagcaaaatcaattgtgtaaatttacatatgataacgtagaggcactgatgcgggtgcgattaaatggcatattagaaccatgaggtgatggtaataagaagaataaacttataaatccgtatagaccgggagcgggaacgaagcctctggttctcgctggacgtgatcaggatctggaagaagtagcacagatatttgaaactttgcggcttaacataccgacacaatctattatttatagtgggcttcggggggggagacggtcttgttaaatgcgctggaggaaattgcagaggacaaggagattttcagcagacacgtagaggtggagacaagaaatgattttatctctcaaatatctgcatgtgcacaagcatacattcgtaagtacagtgccaaagacaagttgtattttccttgtctgtaaaagaaagggaattatatatccggttcgataccgagaattggactttacggttcctgaatttgatggttttatcaagagattggaagagtaccagacatgggacgaaaagaagaaaaaaaacgcaacttaacactggattttgccagaggatttgccattcttctaatgatttatgatcatattatagggcatggaaaggtcattacctcttttcacatgcccttgttttttatcattagcggatatcttctgaaagatcaaccatttagacagactttgaaaaagaaagcgaaaggactgcttttgccatatctggagtttgccggactggcaatacttgtaggttttttcaaggccatatttattctgcacgctaactggcaggcaacaggcaactatctgtttcataagatggttgatacactttgtgcaagggatatctggcttttgtggtttttgctggcattgtttgaggctcttatgatttatgttggcatcaaatgcctgacgaaaaatcggtatatgcagatcatactggttttgcttgtttttgtactgggctactgtttatcacaaaagtatggaagtgccaatttttattatttggatcaggggatgatggcggtgctttttgtggcggttggcgacgcagcgaaaaaactatcctgggagaaattatatagattctcatggatgcgtatgggaattctagcaatgatgcttgtcatatggatgttggggatctgtttcggcctgcttgtcatggctaatcgtgtttacgaaggtttccctctatgtattttttctgctatcgcaggaacctatctcgttgtattctgcagtcattttatgaaaagaatacctttgctgggatcaatgattgtctggtgtgggcaaaataccttagaaatactgtgtctagccaatatctttcggcagtttagtgattggaaggctttgtgtcagggcttgggaatacatagtatattcgttatgtccctacttcagaccggactgattgtagggatagttctggtctggaaaattataataaaacacacaagaaaacttgacgaacgtcaataaatggaagccgaaatgatacaactaaatgaaaaatctaaaaatagaatacagattattcgggcgatagccattatatctgtgctagtgattcataccgtagggcagagtccatatgaactatacatccgtccgttagtgaattttggtgttggagtatttctttttttatcaggttttctgacaccccgtatagaggatgtgaaggtattttacacaaaaagaatacttagggtattcataccctacctagtctggtcacttttgctttgcgtggtttatggagattatcaggatctggcatggaacctgctgacatttcaggagagtagcatttactactatatttttgtttatctgcagatcacattgcttgtgccaattttatggaaactattagatgcaagatattattggctgggacttgctattacgccggtggcaattctggtcgaggtaatctgggcattgacgggacactatctgatttatccatggaatatcaataactgcctggtttggatatcttttgtttatctgggaatgctttttagaagaggaataattcggatacacggcagatatcaacagtggagtatagttatggggctggcaatgtttttagaagtgttggaaggaaaattctggctatcttttggcagagaagattttgctacaacacaggtcaaactttcgtctatgtttgtgacaggatgtgtgtgtgtgctggtgtttttttatattacaggtcttcataaagatgaaatatatacggagaaaggtagtaaaaaagaaatttttaggcgaatcgtgatttctattggtgatgcttcctttggtatttatctggtgcatcccctagtgatatatttttcgaggcataatacaggatttttatttcctcttaacacgatactgaccttgatactcacttatctgtgtgtatggattgggcagcgtatatgtggaaaaaaacttgggagatatctgggattttattaggttgaatcatcgataaaaccatgctattatagataatatattatacataaataagcaaaaatgcataaattgaacaatatattatccaaaaggagcactgaaatggaagccttggtttgggaaacggcagaagaattagataagaaagtagcagagcatttgcgaaatatccgcaaacgacgtcagatatctcaacggagtttagcagatcttagcggtgttagttatggctctgtcaaacgatttgaaacaacaggacagatttccttattatcgttgactaagttggctatggcattgggactggcggatgaactgagagatttgttttcacaagtgccatatcaggatattcaggaggtaatcaatgaaaacagagaaaggactggaggtttatctcggcagtgacaaggtaggaatacttgcggaaacatccaatcataaggtggcattttcgtacagtgatgtgtggctggaaaagggtttttccatcagtcccttttcattacccttgaaaagaggtgtctttgttccttcaaagttatattttaatggattatttggtgtatttgccgatagtctttcagatgcatggggcagttacttttagagcggattataaaagagcatggcgagaatattagttcttacaatgtcttggatcgccttgcgattgtaggaacctctggcaagggaacgttaacatatcagccagcatattctatcagattggcagaaagtcaggctgatttagatgaattggctagacaatgccaaaaaattcttttaacagaatattcggacaaattagatgaactgtaccaactgggaggaaccagtggtggagcaagaccaaagattatgacgcagatcaatgacaaatattggattataaagtttccggcacatgttgataagcagaatagtggaaagatggagtatgattattccctttgtgctagaaaatgtgggattgagatgacagagacaagactttttccgtcacagaccagttctggttattttggaacaaagcgttttgatagagttgtagaagaaggatgtgttttaatgtgtatgcgcataaccgtgacgatcacgccaaaaatttttcatttatctatgatgaagaaagaaaaaaatggcatatgagtcctgcttatgatttgacttacagtaacacgtactatggtgaacacacaacaacagtagacggcaacggcaggaatccgggcatgaaagatcttgttgcagtggggaaaaaagtcggaatggataagactcgctgtgagagaatagcgagggagattgaggaatgcgtgtggtacgatttgaaggagtatcttagatagattttaatgataggagtagatcagtgaaagcaatcatattagcggggggcgcaggtgaccggttgtggccgctttccagaaaaaatgcacccaaacaattcttgaatctgaaccaggataattctttgttccaggagaccattatccgtagtattcctttttgtgatgagtttgtcatcgttaccaatcaggaataccaggagattgttgaagggcagatgaaccagtttcaggggatctcctaccagatcattgtggagacggaggcacttggtacggcaccggcggtactcaaggcgagttctgttctttccaaagaagaaatggtactgatcatgccggcagatctggttttgatcggtgagggatattcggatgccctttatcaggcaaagacgctggcagagcagggacagtatgttctgtttggtgttcgggcggatgcaccgaaaacaggttatggctatatccggcatcagggaaatcatgtcagccgttttattgaaaagccatccaaggcgcttgcccaacaattattctatcaggatgatattttgtggaatagtggcatgatcctttgtaataatggcatgttgcaggaagaattggaagatactttgcggatccggcaggaaaagtatgaaaaagagcatgaaagtccatccggcgtatataagaccggacgtattcacatagagaaagcacttcttgagacatcagatcatctatctgtggtaccgctttttatgcagtggcaggatgtcagtaatttccactcttatgagagtgtgtccgtcggaaaagaacacaaaaataccattttgcgtgattgcaagaatacgacggtcatcaatcagaccgatcggcagttgatcgtgggcaatgatctggatgatctgtttgtggtcaatacagaggatgccatttatattaccagaaaggaatctgagcaggatatcaagagcattatcgcagaggcgccggatacttatgaggcatattttaactatagtcccatggtatatcgtaactggggcatgcgggagatcatcgcacaggcaccgggctatcgtgtgcggcgtattctgatgtatccgggagcgaccttatcggcacattctcacgagaaaagaaatgagaactatgccgtgatacaaggtcaacttgcaatagaattggatggcagagtaatacatatccgggagcatgaaagtatcaatattctgcccaatcagatgcatcgactgtttaatgatggagaccagaatgtagtcgtgatcgaggtcgacacagggcaggagattgatgaacgagacatgatccatctggacgaggtgccgatggcaggacagaaattaccggaactgtatctcttatctccggcatacaaggactatctgtggggaggggatcgtctggtaagacagttcggcaaacagagtccctatgatatcactgcggaatcatgggaattatcggcgcataaagatggacagagccatattgtcggggggacttttgatgatcagccgtttggcgattttatccgccaatatggatcgaaagtctgcggctggaaaagccgtacctttgaccgtttcccgatcctgatcaagtttatcgatgcggcaaaaccgctttccgtgcagatccatcccggggatgactatgcttttgttcatgaaaaagagtttggcaaaaatgaaatgtggtatgtgatggatgccgtagaaggcgcttatctgtattgcggcttttcgcgcagggtatctgaggaggaagtgcgaaaacgtctggcggacaattccatcacggaagtgttgaataaggtttatgtcaaaaagggggacgtgatctttatcccggcggggacgatccatgccattggtgcaggtatcctgatctgcgagatccagcagaattccaattccacctatcgtgtatatgactacgatcgtgtggataaggaggggaagaagcgtccgctccatgtggataaggcactggatgtcatgaattttgaaccttatgagcagggagcatttggtttgctggagccacaggaaaaagatggaaatgtggtgcagcagttgagcctatgcaagtattttcagtgtgaaaagtaccggattcgggaaaaacagacactttatgtggatgaagcatcttttgtttctcttgtgattttggctggaaatggcataatatcatgtggagaggaaagcatttcctttggagcaggagacagtatttttgtttccgcagggcgcaaggttcttcatatcgaggggacttgcgaactgatcacaacgagaatttaggacatattgcagaataaaaagagaggtagagtagaatgaagacatatggcgtgatcatggctggtggcggcggtacgagattttggccgctctccagagcagaggaaccaaagcagttattgaatttgagtggaaaagacctgatggtcaatgaaacgatcgaccggattgctacttttacagacaagcaggatattttcattgtgacaaatgagacccaggtgccgaaaatgcgtacggcaacagaaagccgtatcgcggcagaccatatcttagcggagccggcagcaagaaatacttccgcctgcattggatatgcagcattagagatcgtaaaaaaatatggtgacggcatcatgtgtatctttccgtcggatcatttcatcaagaaccagccggaatttacgcgcgttttaaaagaagccattcagatcgccgagcaggaggataagttgatcacgctggggatcacaccgactttcccatcgaccggctacggatatatcaagtttgatgctacagatgctgcttatgcaaaaaaagtcgtagaattcaaggaaaaaccggatgaagagacagcaaaagcctatgtcgccagtggagagtacgcttggaacagcggcatgttcatctggcgggcatctaccatcctgcgtgcttttgaccagttactcccggatgtggcagcctgcctgcatgagattggtgacgccatgggaacagatgtagaaaaagagacgatcgcccgtgtttatccaaacattccaagcatttccattgactatggtatcatggaaaagagttctgatgtgcttgtgatctctgcggaatttggatggaatgatgtgggaagttgggataatctgggtgttctttatgatgcggatgcatccggcaatgtgatcgcagccaaccatatcggcattgatacgacaaatagcattgtctatggaaagaaacgcctgatcaccacgatcggcatcgacaatcttatcgtcgtcgagaccgacgatgcgatccttgtgtgcgacaagaaccgtgcccaggatgttaaaaagattgtggacgagttgaagaagcgtggagagacagagtttttataataagatatatttgagcgaaatatcccacataattcgattgcagacctttggagtccacgccggcacttaatgagtgctttgcacgaatttagtaccgctgcgtggagccaagagtgcgaacgtgtctgcaatgaattggtgggatatgagcggaactaggtatatataattaggaggcaagaatgaactacaaagatacatacaacgattggttacagaatccatattttgatgcagcaacaaaggaagaactgcgcgccatcgcagatgatgaaaaggagatcgaagaccgcttctatcgccaactggaatttggtaccggtggtctgcgcggcgtgatcggtgcaggaaccaaccgcatgaacatctacaccgtccgtcaggcaacccagggattggcaaactacattctggcacaaaaaggacaggataagggcgtggcgattgcttatgattcccgtatcatgtcaccggaatttgccaaggaggcagccctttgcctcaatgccaacggcatcaagacctatcgctttaccagcctgcgtccgacaccggaactttcttttgcggttagaaatttgggttgtattgcaggtattgtcattaccgctagccacaatccgagagaatacaacggttataaggtttactgggaagatggcgcccagattacaccgccgcatgataaaaatatcttagccgaggtggcaaaagtgacttcctttgatctggtcaagactatggacgaggtcaaggcaaaagaagccggactttatcaggagatcgatcaggagatcgatgatgcctacatggcagaactgaagaagcagtccatccacccggaggttatttctgagatggcgaaagactttaccatcgtttatacccctttgcatggaaccggaaatatcccggttcgccgtgtattaaaggaactgggctttgaaaaggtctatgttgtgccggaacaggaaaggccggacggcaatttcccgaccgttgcctatccaaacccggaatcgccaaaggcatttgaacttgcccttgcacttgcaaagaaagtggatgcggatatcgtgcttgccacagacccggatgccgaccgtcttggtgtctattgtaaggataccaaaagcggtcagtatgtttcttttaccggaaatatgtcaggtatgctgattgcagagtatatcttaaaggagcggaccgccacaggaaccatgccgcaagatccggctctggtcgagaccattgttactacggatatggcaaaagtcattgccgaggcttacggtgtgaaactgatcgaggtcctgaccggatttaaatacattggtgagcagatccgtctgtttgaggaaaatcacacatatcattatgtctttggtctggaagaaagttacggctgtcttgctgggacctatgccagagataaggatgcctgtgttgccgttatgatgctttgcgaagttgcatcctggtataaaaagcagggcaagaccctgtgggatgccatgttggatatgtacgaaacatatggctatttcaaagagggattagagaccatcaccttaaagggcatggatggcgcagaacagatccagcagatgatggcagatgcgagagaaaatctgccgcaggcgatcggtgattataaggtgctggcagtccgtgattataagacagatctgcgtatcgatatggcagacggcagcaagagtcctaccggacttccgacttccaatgtgctttactatgagttggaggatcatgcatggtgctgtgtacgtccttccggtacagaaccaaagatcaaattctactttggcgtaaagggggcttcccttgcagatgcagaggataagttggaggaccttaccaagggcatgatggctctgtttgaccgtaagtagagcagattatattgattttgacagagagaaagagtatgagtgaaaagaagttgaccatggtggttccggcatacaatgaggaggagacactgcctatcttttatgcggaggcattgcgggtagaaaaggaattacctggagtggagatcgagtatctctttattgatgacggatcttcggatggaacacttgaagttctacgggatttacataaaaaggatgcgcgtgtgcgctatgtttccttttccagaaattttggaaaggaagcagccatctatgcagggttgcagaatgcggcgggtgactatgtggcaattttggatgcagatctacaggacccgccggcattgttgccggaaatgctgcaggcgatcgaggaggaaggctatgattgtgtaggctcgcgccgtgttacccgaaagggagagccgccgatccggtccttttttgccagaatgttctaccatattatgaagaagatttcaaatgcagatattgtggatggagccagagactttcagttgatgaaccgcaaggtcgtgaaggcgatcttaagcatgggggagtacaatcgcttttccaagggtatctttggctgggtcggtttccggaagaagtggctggaatatgaaaatattgaacggtctgccggagaaacaaaatggtctttctggaagttgttcctgtatgctttggacggcatcgttgccttttcaacggcaccgcttgtgatcgcatcggtgatggggatggtattttgcctggtggcatttgttgcgatcatttttatcatagtaagaacgctgatctttggtgatccgacttccggttggccttccatggtctgcatcattatctttattgcgggtatacaacttctgtgtatgggtattttggggcaatacatggcaaagacttatctggagaccaagaagcgtccgctttatctggtggaggaaacagaggaagattagatatgttgaaggtatttttagtcgaagatgaattcgttatgcgggaaggcatcaagaataatattgactgggcttcccatggttatgaattttgcggggaagcaggcgatggggaagttgcctatcctatgatccaaaaatgtaaaccggatatcgtcattacggatatccgtatgccttttatggatggtctggaattgagcaaactgatcaagaaggagatgccatggatcgagatcatcatcctgacaggatttgaggagttcgcctacgccaaagaagccatcaaacttggtgtggcacagtatctttccaaaccgatcagtggggatgaactcttgcaggagttggatcagttagcggaaaagatccgggagaaaaagaaagaacaggaagtccgcgagcagtatcagcgggaaatggaagaaaatgtccagaagaaccgtaaagatttctttaagtatctggtgaccggaagcaagacgccggtcgaattgctggaaatggcagaccatctggaactggatatttctgccatctggtacaatatcgtcctggtacagatcaaatcgaccagacatgccagagatgagttctccagcagtattgtagaggcagaagaaaccttaaaggcctatgaatccgagagcgatgtactggcattcgagcgcagtctggaaggaaaggcgcttttgtttaagggagacagcagggaagagattgaggaaaaggaaaaacttttcttagaggtcttgcagaaaacgatcggcacctatcatcatctggtctactatgttggcatgggagagccggtcaaccgtctgcgggagttgccggagtcctttgaacaggcgagacgtgcttttgcacatcgttatctgcaaaaggagaatatggtcattcgcagtcaggacagtgaaaaggcggaggctgaggaggcattttctatcgagagtgtcaataccaaggaagtcaaccgcggtaagatcacggaattcttaaaggtgggcggttcggatgaagtggtatattttgtggaagaatttttccgcggagtcggtacaaatgccttaaaatccggtattttccgccagtatatcgtcatggatgcctacttctgcgtcagtgatttcctggagagtattcatgtaggaaaagagcaggtggctgcaccggacttaaattccggtattgtgggcgatgaaaaagaagccatggactatgtgcagggcattttacaaaaggcggtcaacctacgggaacagcgggcaactgaccgttaccgtgatgtggtagagcaggtcatgcattatataggcgagaactatgcagaggaagatctgtctttaaatacggttgcttcctatgtcaatttctcacccaaccatctgagtaccattttcagccagcagaccggtcagacctttatcaaatacctgacagattaccgcatgggaaaagcaaaggaacttttgcgctgcaccggcgaaaagagcagtgccatcagtcttttggtgggatataaggatgcacattatttttcctatctctttaaaaagactcagggaatgacaccgacccagtatcgaaatggagccaagacggtatgagaaaacgatggatagaattttacaatcgatccacattagcgaccaagatccgattttcgtatcttgtccttttggtgccaattttttccatcctcttttttagtatttacaatctttggtccggcaatcagcgttatgaggacatgatcaactcgacgctggtggcgagtgagttcagtctggattttaagaaagattttgactatgagatctatctggtgattgttggtaataagacactcaaggagtcggatgtagaccccatgctgcgtcatgccaaaaatgtcgtcaagggcttggaaaatatcacagaatcgcaggataatcgagatcgtttgcaggatatccgtaaatacttggatagtttgcaggtctatgtggcgcgtattgatgaaaacatggcagagggcaatctgtatgaggagaacatggaaatctgggaaaatgatgtccagatcgttacgaccctggtgcgggacgagatctcgcaatacacctactatgagatccaggggatccagaagtcaaaggatgactaccagaaattctacacctggatgctccgtttttgcctgatcgctctggtgggcgttgtggtcgcagtcggtatcatgtcttatctgattccgctgagcatcacgcggccttttaaggaattgagccaggtgacggatgagattgccaagggaaatctgtctgtccgtgccaacgtcaatactggtgtggaagcgacggcactcagcaattccatgaataccatgatcgataagatcaacgaacttttggaacaggtcacgacagagcagatccgtctgcgcaaggcggaatttgaacttttgcaggcacagatcaatccgcatttcctctataatacgctggatgccatcatctggctggcagaagcaggcgaacagaagcgggtcgtcggtatggtgcgaaatctttcggatttcttccgtacttccttaaatcaggggaaggacatcaattccattaaggaagaaatgctccatgtaaagagttatctggagatccagcatgtccggtatcaggatatcttaagttatgatattgaggtgccggaagccctttatatttacagtatccccaagatcacgatccagccgctggtagaaaatgccctctatcacggcatcaagaataaacgcggcatggggcatatcagtattcgtggggaggcgggggaaaaggattttaccatcaccgtgacagacgacggtatcggtattgatgagacgcgccttaggcaggtgcagtccggcatacaaaataaggtcctgaccggcaaggacttttacgggctttacaatgtctgcgaaaggatccgtctgaatttcggtgaagaatatggcatttttattgaaagtgtctacggagagggcacaagtgtacgtgtgattctcccttacgttgaagcaaaataaaaaaatcaacttcaaacataaaaaaatcaaataaaatatggaaggcagaagaatttcaacttttctgagatttttctgcatggataaataaaggatcatctcatagaatgtaatacatcaagggatggtccttaaaatttataatttgggaggtacaattatatgaagaggaaagttcttgcagccatcttggcactcacaatggtatttggtttagccgcttgtggatctaagggcgcatcatcagatggggggtcatctgattcaggatcaggagatctgatcaaagtaggtatcatcaacaatgatcctaatgagtctggttatcgtacagcaaacgataaggacatgaaagaaatgttcacaaaggagaatggatatgacgcttcctttgcttacagtttgaagaacgatgagcagatcacagcagcacagaagttcattcaggacggtgttgattatcttcttctttctgctgctgatacagcaggatgggattccgtattaaaggatgcacaggatgcaggcatcagagttatcttattcgaccgtacaatcgacgctgatgacagtttatatgaagcatctatcgtatctgatatggacaaagaaggcgagacagcagttaattggttagcagatcagggcttagatgaatacaatatcatccacattcagggtgttatgggttctgcagcacagcagggacgtaccggcgctttggataagaaggctaagtcagatgacaactggaacatcgttacacagcagacagcagagtggaacgcagagaaagcacagcagatcgttcagtcagagatcgacaagggaacaaagttcaatgttatctatgctgagaacgacgacatggctaagggtgctgtagcagctcttgacaaggcaaacatctctcacggcgttggcaaagatgttattgttatgggatttgactgcaactcatgggcattggaagaactcttgaaccagaactggaactatgatggacagtgcaacccttatcaggcatctaccattgatggcatcatcaagaagttagaggctggcgagaaattagaagacaaggtagtcatcatggaagaaaagggatttgatgctacaacgatcacacaggaagacattgataagtacggaatctaatctttcctgacaatttaaaaattttgaaaatgcgtggtgcggcgtacgaagattctacgcatggcatcacgcattttttaaagaaaaggagtgaaacgcaggtgagtaataaaaccattttggaaatgaaacatatcaataaatcatttcctggagttcgcgctttacaggatgtagattttacattatgtggcggtgaaattcatgctctgatgggcgaaaacggagctggaaaatcgacactgatcaaggttttgacaggcgtttatgaaaaggacgatggtcagattttcgtagagggaaatgacaaagaagtatccatccgatcaccacaggatgcacagagactgggaattagtacggtgtaccaggagatcacactttgtcctaatttgtcagtagctgaaaacatgtacataggtagaacagaaaatatctatcaggactggaagaaaatgaatgcggatgctgacaaattattgcggtctctcgacattccggcaaaggcaacgcagcagcttgcttcttgttccatcgccgtccagcagatggttgccattgctcgtgcggtagatatggactgcaaggttctgatcttagatgagccgacatcttctttggatgagcaggaagtagaaaaactctttaccctgatgcgggatctgagatccagaggcgtaggcattatctttgtaacccacttcttggatcaggtatatgaggtctgtgacaagatcacggtactgcgtgacggcaaactggtaggtcagtatgagatcaaagatctgccgcgtgtgaaattggttgccaagatgcttggtaaagaattggatgatatgtccgatatccgcggcgagcaggagccatacagtggcaaggatgcagaccagattgtatttgaggcagaaggactttacagtaatgcgggtatcaagccatttgatttcaacattaaaaagggtgaagtcaatggatttaccggacttctgggttccggtcgaagtgaatgtgtcagagctatttttggcgccgatcatgtgcttggcggaaaggtaaagaagaacggtaaggagattaagattacaaaaccgatcgatgccatgaaaaacggtattgcatacttaccggaggatcgtaagaatgacggtattatcggagatctctccgttcgggaaaatattatttttgcaatgcaggtaatgcgtggcttcttccgtccgctctcaaaggcagaggcaaacaaatatgcggaagaatacatcaaacttctggatatcaagacagcatccgctgacacaccgatcaaatcactctccggtggtaatcagcagaaatgtatcttagcacgctggcttctgacccatccggattatctgatcttggatgagccgacacgtggtatcgatatcggaaccaaggtcgacatccagaaattggtattgaaactggcttccgaaggtatgagcgtgacctttatttcttctgagacagatgaaatgctccgtacctgctcccgcctgatcgttatgcgtgatcgcaaggtggttggcgaactttccggagaagatctgacacagaacaagattatgagtacaatcgctggaggtgaaaattaatcatgggaaatacagcagtgaaaaaaacgaaaggatctggatttttcagtaatctggtaagacagcagatgtttatcccggtggcagcgcttgtgatcctggctgtgttcaatctgatcgcagatccgtctttctttaagatcacacttggatacagtagttccggggcaccggtcttatccggttatctgatcaccatcttagactatggttcagaacttgccatcttagcgatcggcatgacactggtaacggctgcttccggcggacaggatatcagtgtgggcgctaccgttgccattgcgggcagtgtgatcctgcgtgtactttgtggttccaattccagaccggagacacttcgtacctcggttttggtggcattcttggtagcatgtcttgtatctatgttatttggagcattcaacggtgtcctggtagcccactttaagatacagccgatggtcgcaaccctgatcctatatactgcaggtcgttccattgcagcctggatcaacaacaatgaattgccattgatcagtgatccgtcttttggctactatggtggatttttaccgggaattccgatcccaacgccgttctttatcgcggctgcctgcgttatcattatcgcgctggtattgaaatttacaaatttgggactttacacacaggctgttggtatcaatgaaaagtcatcccgcttaaacggtatcaacccgacctttatcaagttcttgagttttgttatcttaggactttgcgttgctgttgttggtctgatcaaggtcagccgactttcaacgatcaactattccgttatcgcaaaggatattgaaatggatgccattcttgccgtagcacttggcggtaactccttaagtggtggtaagtttaatatggcggcatctattctgggcgcttatgttatccagttcttgacaacgaccctttacaaattcgatgtgcaatccgatgcacttccggcatacaaagcggttgtcgttatcttactggttgtcctgagtgcaccggttgtccgtgaaaaactggcaggtcttggcaaaaaattccgtgcaaaggaggtagcataatatggctaataagacttctacagcacaaaaaggtattggatacaaaatcaaaaatatgacggatacgaatatgcttctgaccatcacgatcgttatctttttcctgatgtatattggagcgatcgtattccagggagagggctttttgaggccgcagaccttccttagtatgttaaatgcaaacggagcactgatcattacctcctgcggcatgagtttggtcatgatcacaggcgggatcgatatttccgttggtggtgtggtagcactggtcagcatgtgcagtgccgtatatctggattatcataacggttccatcttaggggctgtgctgatctcccttggtatcggtcttgcctttggtattgttcagggctatctggtagcctacttagatatccagccatttattgtatctttggcaggtatgttctttgccagaggtatgacgacgatcgtcaacaccaatcctttcaatgtgcaaaacgaagcattcgttgcattaaaggataccagagtgatcgttccgggactgggttctgtcaacaaattaggcagatatgtggatgcatatgtagagatcggtgtggttgtagcacttctggtcgtcatcctcatgtttatcatgctccgctggaccaagttgggacgtagtttctatgctgttggtggcaaccagcagagtgcactcatgcttggtatcaatgtcagaagaacaaagtttttgtcacatctgatttgtagtttgttagcaggtattggcggatttgtatatttcctccatgttggatccggttctgcttcccatgccatgggtatggaaatgaacgccatcgcatcttctatcatcggtggtaccatgctgaccggtggtgtgggaaatatcatcggcacactctttggtgtactttctttgagcaccattcagaatatcgtttcttctgcaggtctggatcaggcttggtggacaggaattacgatcgccgcaatgctctgtctcttcttagtgatccagagtgtagttatggcacgtaagaaaaaagcacaaagtttaaataaataacctccttcttttttagaaacgacatgagaaaagtagagatgaacgcatatccggcgtcatctctatttttcgttttcttttggtatgggtgttgcgaaattgtcgcaattcggagataataagaagtggtattagaaggggtgtttttacaatgaaaggaatcaaaaagaccagacgcagtatggcaagccggctggttgctgtatttagcgtcttattgtcagcctttacgctgacaacaggctgtggagatacgacgacggcagcgacatcacaggatacagaaagtcaggacagcaagcagatcgtgatcggtttttcccaactgggagcagagtcggattggagatcggccaacaccgaatccatgaagtcgacctttaccgcagatcagggttacaagttactgatcgaggatgggcagcagcaacaggcaaatcagatcatggcaatccgcaagttcatccagcaggatgttgattatatcgtgcttgccccggtgacggaaacaggttgggagaccgttttagaggaggcgcgcagtgccaatatcccggttattgtcattgaccgccaggtggcagtgtcggatccgacactctttaactcctgggtgggatctgattttgaattagaggcaaaaaaggcaaccgcatggctgcatcaatatgcggtcgccaagggcatagcagaggacagtctacatattgtcaatattcagggaacgatcggtgcatccgcgcagatcggcaggaccaagggcttgcaggatgcggtagtcacctatggctggaatcttctggcggaggtgccgggagaatttactcaggcaaagggcaaggaagccatgagcacgctgctcaagcagtatgatgacatcaatgttgtctattgtgagaatgacaatgaagcattcggagccattgaggcgatcgaggatgccggctatcatgtggggtcggatatcgcggcaggtgatatcatggtcatgtcttttgacggcgtgaataaagaagttttatcctatcttttacaagataagatctcctatgtgggagaatgtaatcccaatcagggaccaaaggtacaaaatctgatacagaccctagaagcaggcaagacaccggataagtattcctatatggaagagcatgcatttgcgcatgatgctactgtaccgtctgtagaggtagatgggcagatgtatccggtcactgtgatgaccaaggacaaactaaaagagtataagtaaggaagtgtgtttctatgaagatttttgaaaatctggatgagatcaaacaaaaggcaaagggattagaagaaaaggtggggcagaccatcggggatatcgaggaaaagatcggacagagcgtcgaggtggtggaaaccaaggtcgatctgcctgagatcaattttaaccactcggatgtcagtcgaaataaattcatgctgcatggaaaactggcagaacagggctatgactggtggtggcattcctttacagcccaccatagcaagaccggagaggagagagccttttttgtagagttctttacgatcaacccggcacttggcggggaagaagccattttagggcagaccgaggaaaatcaaaaaaagcaggtcaagccttcttatatgatggtcaaggtcggtagctggggagaacatccaatacagctgcaccgcttcttcgcatgggatgaggtgacggtcaaggaggacgccccttacctgatcagtgcagacaactgcttctgctctgagacaagaacgcttggtatggtggacgtgaccgaagaagaatgtcaggcgcatccggaatatatgtcaaatgctggcaagatgtattgggatctgaccatggacaaaaaactgacgtttaatgtaggttatggcgccagcgaaccacttcgcgatgcagaggcctttgagatgttctggcattgtgagggcatgaagactgccttcgagggaaaagtcgtattaaatggcgaagagtatatcgtttccaaggaagattcctatggatatgcagataaaaactggggcagggatttcacaagcccttgggtatggttggcgagcagtgatctgaccagcaagacgaccggagaaaaattaaaggactccgcatttgtgatcggtggtggcagaccaaaggtaggaccggtcgctatggagaataaattacttggagccatgtggtatgagggcgagccgtttgaatttaatttttctaaggtatggacgctgaccaagacgaagtttaaatgtaaagagacaaagcatcatgtcgtatggcgtgttgtgcaggaaacaccgatgtcaaaaatgtgtacggagatcgcctgcaaaaaggatcagatgctttttatcaattatgaagcaccggatggcagcaagcgccatgaccatctgtggaatggcggcaatggcagtggtacgatcaagttatatcgcaagcatctgcgcctgaacaaggatggggcaaagccaaagtgggagtgggaactggtcgatgagattgcagttgcccatgcaggctgtgaatatggtgagtacaacaagtaaataatacagacagatcaaaaagaaaggatggggtacgaatgaaaattggaatgttgacgagcggtggcgactgccaggcactcaatgccgcaatgcgaggtgtggtcaagggactcagtgagaacgacaaagacttggaagtatatggcttctatgatggctacaagggcttgatctatggaaattaccgcctgctgtcaagcaaggatttttcaggtatccttacggtgggaggaacgatcttaggatcatccagacagcctttcaaacagatgcggattccggatgagaatggtctggataaggtcgaggcaatgaaagagacttactataaactcaatctggattgtctggtcattctggggggtaatggtacacaaaagacagccaatcttttgcgtgaggaagggctgaatgtgatccatcttccaaagaccattgacaatgacatctatggaacggatgtgacctttggatttcagagtgccatcaatgtcgcctgcaatgcgatcgactgtattcataccaccgcggcttcccacaaccgtgtctttatcgtggaggttatgggacataaggtcggctggctgaccctttatgccggtgtggcatccggggcagatattattttgttaccggagatcccatatgatattgataaggtgatcgaggcgatcgataaacgccatcaggcaggcaagggctttacgatcttagcggtagcggaaggcgcgatctccaaggaggatgcagcactttccaaaaaggaatggaagaaaaagagagaaaattcaccatatccgtccgtttcttatgagatcgccaaactgatcggagaccgtaccggttcagaggcaagggtgacagtgccgggacatacacagcggggcggcagtccttgtccgtatgaccgggtgctttgtacgagactgggatctgcggcagctcaggcgatcctggaaaaagattatggctatatgatcgctatgatcgatgggcagacaaagcgtgttccgctggaagatgtggcgggcaaacttaagatggtagatcctgactgccagatgattcaggaagcaaagcggatcggcatcagttttggtgattaggaagtaagaggtgtagaggatgtcttatacggcattatatcgtaaattcagaccacaggattttgaggatgtaaaggggcaggatcatattgtgacagccttaaaaaatcaggtcaaagccaatcggctggggcatgcctatctctttaccgggacgagaggaaccggtaaaacgacggtggcaaagatcctggcaaaggcagtcaactgtgagcatccggtggatggcagtccctgcaatgaatgtgagacctgtaaacgtatcgcggaaggcagcagcatgaacgtatttgagatcgatgcggcttccaacaacagtgtgtcaaatatccgagatatcgtagaagaagtggcatattcaccgacagagggcaagtacaaagtctatatcatcgatgaggtacatatgctttctgcaagtgcttttgcggctcttttaaagactttggaggagccaccggcatatgtgatctttattctggcaacaacagaagtgcatatgattccgatcacgatcttatcccgctgtcagcgttatgatttccggcggatctccattgatactattgcaggacgtttgcaggagttgatggtcaaggagaatatctctgtagaggataaggcattgcgctatgtggcaaaggcggcagacggttctatgcgtgatgccctaagtcttttagaccagtgtatcgctttttatctgggcgaaaacctgacctatgataaggtattgcaggtgctgggggctgtggataatgagatctttagccaactgctccgccatgtcttacagcatgatgtcacaggtgcgatcggtgtcttggaagagatggtcgtacagggcagggatctaaaccagttcgttatcgaatttacctggtatatgcgcaatcttatgttggtaaaaagcgatacaaatatggaagatgtgcttgaagtttccagtgaacatatggcattattaaaggaagaggcagctatggtaggggatgagacgctgatgcgttatgtccgtattttctcggaactgtccaaccagatacgccagtcatcacagaaacgtgtgttgatcgagatcgcactgatcaaattgtgccgaccgcagatggaacaggattacgaggcgatcgtagatcgtttggatgtggtagagcacaagatcgaggagggcgttccagtcatggtgcagcaggcaagcgcaggaaccgttaatccggggctatctggggcaggagcatctgccgtgcagaaaaaagatctgccggatgctatgccggaagaagtgcagaaattgtgccgtgagtggaaacagatcgtttccggttccagcggacttttgcggcaggcacttttaagtgcttatccgacggtcaatgagcaaaatcaacttatgctcgtctatgacgagccaccaggagccaagagtatcaatagttcgatcttagccagcgaagatacgatggcagatctagaggctatggtggaagaagcgatcggtaaacatgtgccgatcgttgtgaaagtcaatacatcaggtgcggcaagcagccagttatataccaatgcggtagattattttgcaaaggtcgcaaatattgaaattgaagaggaggacttttaaatggcaagaagaggtggaggattcccaggcggtggtggcatgggtaatatgaacaaccttatgaaacaggcgcagaagatgcagcgtcagatggaagaagcatctaaggcattagaggaagaagaactgacagcaaccgcaggtggcggtgtcgtagaagtgacagtttccggcaagaaggagatcacaaagatcaagttatccgaggaagtcgtagatccggatgatatcgagaccctggaagatctgatcatggcagcgaccaatgaggcacttcgtcagatggacgaaaaggcacagacacagatgtcgaaaataaccggaggcatgggtggcggattaccattctaagcagagtacatggattattatagcaagcagatcacaaaactgatcgcagagttatctacattgccgggcattggtgcaaagtcggcgcagcgtctggcctttcatattcttgatatgcctacagaagaagtagaagatctggcaaatgccatggtcagtgcccgaaagggtgtccactactgtaagcagtgctatacgctgacagatgatgagatctgtccgatctgtagcaatcctgccagagatcaaaaggtgatcatggtcgtagaggataccaaggatctggcggcatatgaaaagaccggtaaatacgagggcgtttatcatgtcctgcatggtgccatatcacctatgcaggggatcggaccggcagacatcaagttaaaagaattgatgcagcgtctgcagggagatgtagatgaagttatcatagcaaccaattccagtctggagggcgagacgacagcaatgtatatcagcaaactgatcaagccgacaggcatcaaggtatcgcgtatcgcgagcggtgttcctgtagggggcgatctggagtacattgatgaagtgaccctgctacgtgcgctggagggcagaacagagttataagatcatcgggagaaatcccgatgatttttttgtgtgatttctacatttttcttcgcgggggtgtggtagcgtgaagaaaaaaggagaccgttatgatagaaatagtaaaagaacccacacccgtagaaaaagtagttgaggaaccaagaaatgtaagacagatcggaactttgcccaaagatgcccgcgtgtacgtggaagattatgtgtatcgttttttacatggaagcagtcgccagaagaaacggtatgcttttattttgctaggagagatccgtcagggagggcagcagcccaatttatacataaaaggcgctatggaactggaacagatcagtttcggaggcggtatgccggtcttttccgaggatatctgggatcagatataccggcaggtcagaaattatttcccccagtggagtatcttaggttgggcaatgcagtgcctgggcgagccgacccggatggaggacatccaaaagatctgtagccgtcattttccgggggatcatggcaatgtcctattgtatgatgcctatggagaatgggaaaaactttacatggatcgctatggtatcatggaggaggtaagcggattttttgtctactatgaaaagaataccctgatgagtacctatctcagtgagtatcatggaaaaaaagagcagatggcaaagcgggcagatctggatgaaatggatcgtttccttttgcatgacgagaagcgatatgacgaggaaatccggcaggatcgagaggcactggcgaggtatcggtcttatatgaatgaccgcaggggaagcggaaaaagccagatgtctaaagtggcggtatcggttgccctggtcgttatgatcctgctgtccggcgtactctttcaaaattataccaagttaaacgagatgcaaaagacggtcgcgtcactgggtggcagtagtgatgatgccagcagccagatgatagaggagaccatcagcaagggagcagaggaactggcaaaagcggatggatcgcaggaggcacaggacgatagcggggggagtcaaacgaccgaaaacgcgacggcaagtgcttctgccgaggcaaataacagcacaacgacgaacgtttatctgcagcagggctattatattgtagaacagggagataagttgacggatatcagcagaaaagtctacggaacagaagatatggtcagccagatctgtcaaaaaaataatatcgaaaacggagatcatatttgtgccggagataaattgctcctgccttaaaaggtcaagttttacccacagacgaccgaaatataatacagcagataaaggaggcagtgcatgcaactggagcagattggaagaaaagacatcatagagcaggtaggaaaggttgacggaaaagcgactaccacagatgccgcgcaaagtgagcaaaagatcgctaagggaaaattgcgcagtatctcggtcaataaccctttttacaataaaaatgatctgaaagaaaagactatggcagagaaaatggaagaacagttggcacagggaacggatgccagtcttttacataaccagatggcagtctatgcccagacgacttcgggcaaggactacgaaaaaatgcaggaggagggattttctcctatgcatatggaagcacacaccattgtgaccgtgacagatcgtattaaggttgctatggcaaaaggcggtgcggatatttcccggatgggcggtatttcggatgccaagttggaggctatgagtgacagtgcgggacaaaaagtccagttggaatatgcgctggaaaatgccgatcttccggtggaggaggatacgcttgcggcaggacagatcgcaatgaccaagacgcaggagatggatggccagctgtccttgggggctgcctgctatatgttaaaaaatgacctgtctccgactattgatcatgtctatcaggcgtatttttccggtggaacggaaagtgggatggcagacgatatggaggctttgccaaaagatctgcaagcccagttggagaccatgcttacggatgcaggcatggaggcttccgatgaaaacctgacttattgcaattatctgatcaaaaatcagatcccggtcactacagaaaatctgacctatatggcaaagttgttagaactgcctttggatcaggagagcggcgctacagcagaacagatcgcagatgccgtagcagaaggcaaggagccgggggatgccatgcttttatcggactacagtctgatggggcaggcaaaagatctgtatgcgaaacagatgaaagaactggacgcgatcacaagcacgagacagatgcaggaagcaaggcttctgatgagtgtggaggcgaattacagtcttttgaaaaagggcattgcgatggatatcatgtcgatcgaggagacggtagatgccctcaagtctttggaagaagaatatgtaaagcagatgctttccgtggatgatccggagcagacagcggagaatgttgccgtttatcaggattacagagaggcacaggagacgctcggcagtgcaccggcagcattcttagcgcagataccggcagtggaggaaatgaccctgcgccaggtgagcgcagaggcgggaaaggtatctgccgcatttgaaagtgctgagagccgctacgagacggtctggacagaaccgagaaaagatctgggagactccatacaaaaggcatttgccaatgtggatgacattttgcaggatcagggcatggaactgaccgaggaaaaccgccgtgccgtgcgtattctggcatataatgagatgaatctgaccgaagaaaatatccaaaaggtgcgccagtccgatatggcagtgcagaaaatgttccgggcgatgaagccggccagtgtcatggaaatgatccgacaggggcataacccgctggatctgacggtaaaagatctgaccgatctggcggaagatctttccggtcaaggggaatccaagaccggacaggacagcgatgagtatgcaaagtttttgtggaaattagagcagaccggtgacatcagtcaggaggagcgcgacagttacattggcatttaccgtatgatctatcaggtggaagcgggcgatggtgccgcgatcggagccttgatgatgcagggaaaagatgtgaccctgcgcaatctcatgacggcagtgcggtcaaccaaacatagcggacaggaatatgcggtcgatgattcctttgggcaggtggactcttttgaccgggcatccctttccatcactgagcaggcagagatggcatttcaggcaaattgcctgtatgaggcaaaagataccatgacaccggtcaagatgaagcagtttgaaagtcaggacgcttacatggatctaacaccggagcagttcaaatcccaactggatattattgaggcaatgcgcctggcaccgcaggagacattaagcgggcaggatgcggcttatgttaaggaagaagaagcggtcgaggagatggcgcgggagcagaccagacaagaggtggcagaggcattaaagagcgaggaagccgtttatcagatgcttgataaatatgacctgccacagacaccggcttttctgagcggtatttcggaaatgcttaaggaccgcaatagcgtctatcgcaatttacagagatttgcttccggtgacagtcaggatatatccgcaaagcagatttcggatctgatcgaagatttgatcgaggaatacggcgaagcctgcaagacaccaaaggaaatggcagatgcccagcacaaattagaggaaaccgcagagaaggtcatgaaaaatatgctggtggaaaaagatgtgacctcgatcgatgtgcgtggcatgaaacttgtcatgactcagatccaggcattgggacagatgggagagcagagcgagacctataatattccgatccttgtggaagacaaactgggcaatctttccctcaagatcgtgcgtggaagcgaggagaaaggtctggtcgatgtggcactggatatggacgaaagcggtgctgtctctgcaagtttccgctatgaaaatggtcagatctcgggcgatgtggcttttgaaaaggaggatatcgccggactgttttcagatcatatgccatatttagccaatgctatgcgtgaggaaaccggtctgccggtatcttttgcttacgctgcggatgccgggaccaatgtagatgatttctatgaaaaggaagacgcagattttgctgtgacaaaagagcaggacgcggtttcgaccaaggtcttatacgggatcgcgcggagttttgtagcagaggtggcagaacttttgtcttaaggatggacctgcaaaaatcagcaaggatcggttaagttgcagggcagataaccgatataaaaagtgtgacaaaggattgtccgctttaaaccccgcatggatgcgacagatgaaaacgaactggcaaaggataaagcgaggtatcagatatgaagatcaataataatatttcagcagtgatcacaaataagcagttactcggaacggagaacaatctgagttcatctatggagaaactttcttccggcttaaagttgaatcatgcatcagataatccgtccgggatggcaatctccaataagatgaaagcccagatccgtggattggatcaggcatcacaaaacgcttctgacggtacgtccgtcattcagatcgtggatggcgcacttggcgaagtgaccgatatgttacagcgtatgcgtgaattggcggtacaggctgccaacggaaccaactcacagaaagaaaaggaagcctgtcagttggaaatcgcatctttgcgtgatgaggtcgaccgaatctccgagacgacagaatttaacaccaagagccttttggatggctctttggatgcgcgagtgtatgcggacaaagaaaaccgtgataatgtttcaagaatttatgtctctgacagtgtggcagagggcacctatagcctgaccgtagataaggcagcgaccaatgcgacctatgacacagggatccaggtagatgatctggttggcaagaacggacaactttctatcaatggctataccgtcaagatcacagatcagatgacaaaagaagaaatctacacagccctgcgtgatggggcagagatcggagagtgcacgatcagccggatcgataagccattgtcctttacttcgacagcctatggatcacatgcatcggtttctttgatacagcagtcaaaagatggagatatctttggcgcaggcatcccaaatacgcaaacgaatccggatgcaaaagccgttgtgaccaccggcgataatgcagaagtgactttggattcagcaaacagtgcttttgatccgagagcgaccgtttcctatgatggcaataagatcacgatcaccaacacagatggatttaatatgagtttccttttggaagcaggctttgaggcaggcgcgacaacagcagccggaacgaccactacgggtgtcatcaatctggaagtgacagatatcggcatcatggatctgcagatcggtgccaatgaaggtcagaccatgcaggtgcgcattccgtccactaatgtggacagcctctatattgacgatattgatgtgacgacggtaaatggaccgtcaaaagccatggatcgtctggatagtgccatttcaacgatcagccagatccgttcccagatcggtgcttatgagaaccgcctggactatacggttggcagtttggatgagacgcaggaaaatatggaatctgccctgtcccgtatcgaagatgtagatatggcagaggaaatgacagagtacaccaagtacaatgtcttgcagcaggcaggcaccagcgttttggcacaggcaaatgaactgccaacacaggcacttcagttattgcagtaaggatataaggtatgacagcagaaacaatcgcgacatttaccagaaaaatcgtggcgagcaatcgttcagaattgatatgtgtattatatgagatctatttttcctatgaacaagaggcaattgaggctctgacaggggaaggaaaagaggcaggagatacttataccaaggctttgcgccaatgcggacaggtggtcagacacttaaaggatgccttagatttttcttataagatttcctattccctgtatgcactttatgatttcgtggagagacagttggcgaaagccatgtatgagcagaaggtcgaaaggatccaaagtgcagggaagatcatgcgagatctggaagaatcctttgtccaggtggcaaaacaggatgccagcagacctatgatgggaaatgcccagcaggtgacggtaggacttacctatggtaagggacagttgaatgagtccatgggggctatggaaagcaaccgcggttttttcgcataaaagataggaaaagagcctaagtgatcgttgggtcacctaggctctttttgggtgtgctatgcaaagatttagagatttaactgttttaccttagtcaagagaaatttatgccgcatctgtacggcttttacctgataaatatagtaatcgatcagatcgggatctgtcatgtactctaaattggagtatgcattggcaaggtcgtgctgtgtctgagtcagatcatcgagaagaaggcggacctgcgggtctgtcttttttgtatgggtaagtaatcgcataaaataacctcactttctatccctttactctttattacaaagtatgagtcagaatgttaaatttatacatacatgagaaaattcgttatttttgggatttgcccaaaatgcaaaaagtaagggtatctgcctatgcaaaatcagatgcgtggctaaactatacaaaaaatgcccgccacacatgtagaaaaacaggggctttttggagcatatgcttaaagacaggtgaaaaagtttgtaagaattcgacaaatatcaaacaaatcgcagagatcatggacagaaggggatttatcgtgtaataattgtgggcaaggaaggggaggtgagccaaaattattgcatggggagtagccatagtattttcatgcgcggcggtctgcacagatcttaagaccacgcgtgtacccaatgggttgatcgtacttggtattttagcgggcgttatgctttcgcttatggggataagatctgggggagtagttctatttctgatacgcttgatctggccggtggcacttttgtatccgatctatctgatccggggactgggtgccggggatatcaaatgctttgcggcattatcggttatactcggaagtcgtcttgcgctatcagtcatcatctattctttgatcatcggtgccgtcatagggctttgccgatggattctgagaggacaactgaaaggccgtatgtatggaatgtacgccggcttatgccaagtcctgctctacaagcaaaattccgcttatttcacagaaagaggagaaaaactgcattttaccatctgcatttttttcgcattggtaggatgtctattgagggaggggttaaagtgacaaaacaaagtatcgttgtatgtgacagcgatgaagcatatgtgcgtgcctttgcggcatacctgatggaatgtctttcggatgtgacgatcgtctcgtttacatcggaggaagcgttcctggcaagcgaggcagtgtattcgataggcattttgagcaaggatttcctaagtgtcttagagttttccggcaaagaaatggtgcacgaaaagttttatctgtgtgacgagatcattgcaagcgaatatgagcatctgcctatggtctataaatatcaatctatggagatcgtggaagaaatgttaaagcgcctgcaacagaaagagacaagcagttggtggcaccgcgccggaaaggaaaagacacagtttatcgggatctattcaccaatctcacacgaactgcaattaccgtttgctttgtccttagcacaggtctatcgggagagtggcaaggtcttatttttagacatggaggaacttagcattttacagatgctgacaaagcaacagggaaaccggagttttgtcgatctgctttatctgatgacccgacaggaggcgggcggcgaggacattagagcctataccaactgttttatgggggtggattatgtcagtccgtttgcaggaccggaggaaatggcggatgtggaaaaggaaacctgggtggcgttttttcagcagttgatggcaagtgattatgatacggtggtgctgttgtttggcaggactatccgaggctttcaggaaatcatatcgggctgtcaggaactgatcgttctgggaaaacccggagactactaccggatgagtcagggaaaatttgtagaatacgccgagaaccattacacgggagtgcaggtacatgaggtcctgcttcctatgtccgcaggtaatctggtagatggtacctatgcggtggaagaactcatccagggcaatcttggcatgtttgtacgtcggatgattcgccagggtgtcatggcacagggactggcttatggcatcggttgaaaaacgcatacaggaggagatcttacgggatctggatatgacgcgggagatttcagatgaggaactcttaggcatcattcggcagaaaatctgtgatgttggaaagggggaatatctatccatagcctatcgcatggaattggaacaccggatcttttacggtctgcgtcgtctggatgttctggaagacctgttggcagatgatacgatcacggagatcatggtaaacgggccggatcagatctttattgaaagaaatggctgcctggaggagaccaagtatcatttttcttccaacgagaagttggatgatgtgatccagcggatcgcgtctgccaacaataaaatggcgaatacatcacatccgattgtagataccagactggcagacggatcgcgcgtgaatatggtcctggcaccgatcgcggtcgaccatagtgtcctttccatccgaaaattcccaaaagagcagatcacgatggaaaagttgatcgcctggcaggctttatcacaggaagcagcagactttatctgtcaactggtgcagagcggatacaacatttttgtatcgggaggaacaggctcaggcaagacaacctttttaaatgccatgtccgaatttatcccaaaggatcagcgcgttatcaccatagaggattcggcagaattgcaaatgtcgtcggttcccaatctggttcgtctggaggcgagggatgccaccatggaaggaaaactacaggtctctattcgcgacctggtcaggacttcgcttcgtatgcgcccggatcgcattgttgtgggggagtgccgcggtgtggaagccatcgaaatgttgcaggcctttaataccgggcatgacggaagtttttcgaccgggcatgcaaattcggcaaaggatatgttgagccgattggaaactatggcactgggggcaggcgagataccgctggtggcattgcgttcgcagatcgcttcgggggtggatctgatcattcatttggagcgtatgcgtgatggcagccgcaaggtgcgggagatcgtcgaggtgctgggagtcgagcagggggaaatacagttacagccgattttctcttttgaggaaaaggggagtggagagaaggtgaagggcgcatggatactcaaaaacaaaatgcaaagagatcaaaagtacagacgatctgtaggacaggtgaaagaaaaaagcccttggtggaagtgagtatcgctgttcttctgaccctgcttgtggcgtggatcttctacaatgcatggtacggcttactctggtttccggtggtatatcttttgtccagccgtatttatcgggaggaaaaacaggcgaaagaagggcaaaggaagaacagagtttttaaggagttactggaattgctttccggttttttacaggcaggcatgtcactggaaaacagttttttgcaggcagaagggcaacttgccatgttgggagaggaaggaaaagacatgatctatgccctgcatcagatgaatcagaaagtaaaggtcaatattgcagtagagcaggcatacatggagctggcagaacagatggacctggaggaggcttgtgcctttggcgagatcctcttatttgccaagagattgggaggaaactatgggaaaaatattcagaggaccgccacaaagttaggggagaagatgagtttacaggaggagataacgacgatgatggcgcagaagaagttggagatgaaggtcatgcttgtgatcccacttgctatcattgcctatgtacgcctgacatctgcagacctgcttgccgttttgtatggcaatctggcaggaggcctgatcatgagtgcctgtctggtggtctatgtcctgatggcattgtggagtcggcgtattatggatattgtgatctgaaatgatggggagtatgtggttatggtgcagacagtgatcgtaagtctgatctgtcttttgacgtttctcttatggaaaagaaaaaagagaaaggagaggtatgaaaaatataagcgtgcagtgcttcttttagggatcatggaactgatgggactcatgctcagtctgcagcagtggtatgaggcaggatggggatttagcggaaggctcaagcgagaggatatgggacaaggatcttatagagaagaactggaactttcatcttctgtttacagcggtagtcttgaggttgaggtagaagataaatggccggatcaaaaagaagcagaaaagaagatcaaggatgccatagcagagatcgatgcgacttttttggcagaaaacgaatcgctggatcagatctatagggatgtgcagatatcggaggtttatcaggatggtcaggtcgaggcggattggagttttgatgactacacctatgtgtcggcggatggcaaattaaagaccgaggagttggaggaagatactttggtgggggcaagtgttcttttgtcctgtggtccttatcaggagatctatgatttttccttttgcctgtgtccgagtcctgcggacagcaaagaggggcttttgcgccagatccaaaagagcatccgagaccagtcccgagagagcggggacatagtcctgccggaggaggtggcaggtattgccctgcactggaaaaaggcaggaaatggggatggagccctattgtccgtattaggattgcttgtatgttttcttttgccctatggagacaggaaagaaagggaaaggcagagggcaaagatacggcgggagcgaaagaaagattatcccttggtcgtggatgaactggcattatttttatctgtcggtatcaccttgccggaagccgcccgtaagatgacggaggcttatgaaaaaagaaagaagcggacagggaaagtccaggcaggatttgagttatggaaatttttttcttatgaaatgcgtgagggcgtgcaggaaggagaggcgatcgcgcatatggggatgcggagtgagttgaaagagtacaagaaactggcacttttgctggaacagaacaggcggcagggcagtgaaaaacttgtgcagcagttggaagaagaaaatctgctggcatatgagatgcgcaagaatcaggcaagaaaggcgggagaagaagcatccgtcaagttgctttttcctatgctggggatgctggggatcgtcattgcgatccttctattgccagccatgatgacaatgggaagtttgtagaaagaggagaaaagtatatgaggataaaagattttttgatggaagaagatggcgtgggtgtggtagaagtgatcctgatcctggtcgttctgatcgggctggtgctgatctttaagaaacagatcacggaactggtaaacagtatctttaagaccatcaacaaggaagcaggaaaagtataaatgagacaggggagtcttaccatatttttcagtatgatccttttgagtttatttagcctgtttttttctatggtcgagaccttgcgtatctatgaaatgcgtctggaaagcaggagtgtgacaaaaatcgccatagcaaatgctttttcggaatatcagccctatctatggaaaacatacgggatcctggcattggacgtcggctatggaacagaggattttgatctggcacatatcgaaaagcgtttgtcggattttgcatgggaaaattgcttgggatcagaaaaggaacatggactggaactgttttcgatcgagccggagcaggcagaggtcacagcctatggactgctgacagatgatgagggagcagccctgatctgtcagggggcagaagtagcgcgacaacagatcctacagggcatttgggagacatgggattccaagtatgggcaagtggcggatgacagagaagtcccggatgttgggcagattgttgcgcaggcgaaaaaggggatagaggtagccaaagagcaaaagacagaagaaggctctgctgggaatgaacaggtggcagaagatcaaatgagttccaccccggtagaaaaagtccgggaaaatccgctggaattgttttcacagatcaaagagcagggattgttgagcttggtgcttaaggagcaggcggtttcggagaagacgctagcgacagcgatagggctggaagaacgcttgctgtgtcagggaagcggggaaaagaggagagaagtctccgggtacgaccggatatgctttgactggtatgtcttgcaggagttttcacactttgaccgggaggtgtctgcggatcgtgcgctttcttatgaagtggagtatttgatcgcaggaaaggcaagtgatcgagaaaatttagaagcagtcgtattacgcttgcttgccatgcgggaagtacaaaatgctgaggtcatactgacggatcctactatgatgggacaggcatatgagattgcacttgcattggcaggggctagcgtcaatcctgcgctggtgcaggtagtgcaggttgctgttgtggcagtgtgggcattggttgagagtatattggacttgcgtgccctgctggatggaaagaagatcccgatgcataagaccagagcacagtggaaaagccagttgggggttttgcagacggcattggatggaggggaagatacgtcggtgcaaaaggggattggttatcaggagtatttatttgccctgcttgcccttttgccgcagaagaaattggcgtatggctgtatggatctgatggaagcctccatgcagcagcaggaggattatgcctatgtcaaaatggatcatatggtctataccatggatatttcctgctcttttacaggtcagggtctctttgatgccttcctgcccatgcagcccctctgggtagatctatacagatccgaatgtcaggaaactttatattactaaacaggaaaggaggtgtaaaagggtgtctctttctcaaatgtgtttccgtgttgcggcggaagcaatccagagtaacgaaccttttattcaaaatcaatctagtatgaaatctcttcaaaatagcagaaaaaagttattcttttcttcagaccttaatccaaataaagagacacccttttgcatctcctatcaaggaagttacacgatcgaggcggcgctgatcctgccacttatgatcagtgcatgtattttcattctgttttttcttcgcattgccatggtacagatcggtgtgaaccgcagtatggaagaagtcgccgggaagacagcaatctgcggagagcaggatgcggtcgggctgtcgggactggtgctggcgtgcaatgccagaatgaaaatgatcggtacaccgacatcttatatccgagggggaattttagggatctcttatgataagtcgtccgtagaagataactatatcacactggtggcagagtatgggatcacctttcctatacggatctttgggacttaccactggaacatggagtctaagacaagttggcgaaagtggatcggttgggacccggaggaagatggggatggtcatggctatgtctatgtaacaaaagaaggcagtgtttatcacgagcggtatgactgcacctacctgcatccatcgattcatgcggtggctgtcaaagaactggatgcatacagaaatacaagtggtaatcgttataagatatgtcgcagttgcaagagtggaaaaaagaaagagggaactgtgtatattaccgactatggggacagttatcacagcaaattgtcttgtggtggattgaaacggacaatttatcgtaagcgtaaggaagatgttctcatgctggcaggatgtagtaaatgcagtatgggaaagtagcaaagggggagaagtatgaaagttatgggattggtagggatgcttagtatctgtagtgtggaggatctgtggaaacggcagatccatctggttgtgatcagtgcatttgggatcttaggtgttttgctgcatttttatgatggcaagcagaccgcgctggatatgtgcggcggtatgctggttggcattgtgctgtatctgctcagtattttttcacacggaaaagtagggaaaggggatgcctttctggtgacatccatgggcgtctatctgggattttgggacaatatgacggtgctttggatggcatctatcatggcggcgatctttggcgtcgtggtctgtatcttttttggaaagaagaaggatgagagcctgccttttgtgccatttttactggtcgcatatctcttgtttttgattctgggcgcgacagcggcaaatatttgaaagcagggagcaaggaatggtaagtgaaagggtgaaacgccccagaatgtggctggcggcatcttatacggtggaagcctcctgggtaatggcaatctgtctgggcatcgtctgtatgctgatccttttgggatacgaggtttatcatgaggcactggtatttgccagagatacagtgtgtgaaatggatgtggtcacatcttttcggaaagcaaaattgctgatgcagagcgttggcaggtaggggaggatgagaaatggagattagttataaaagaacacataaagaaagttatatgatcatttcaacagaggagtatgtatcggattatgaagaacagatgttgaaggaaaatgagatccggtcgctcttgtctttttataccatggaaatgaacggcagaatacaattctggtatgacatttccggaaaacaatcgctaaaagactatctgcagcaaaaagaagtgacttatgagagcatggaggaggtctttttatatctggcgatggcgtatgaggagatccataaatatcttttgcacgaggacaaggtgtatctgtgcccggagactgtctatgtggcaagacagggacagtttcgggtttttctctgttattgtccttttgaaaactttgatgaaaatccgtttgctgccttgatggaatatgtcctgacgatcgtggatcatgggaaagatgatctgatgcgcacctgttatgaaatttatgatatgactttacaggatggaacgaccttatatgaccttttgcattatctgcaagaacaaatggagggcatgcgctatatagaggaaaaatcaacgattgcttacgaggagtcggaaattcccccgtacaatgaagatgtgccccctatggtagaagaaaaggagagtatggtgccggaggaatctgtctattacgaaagcagttacgagaaaattctggagactatccgggcaaaggggcaacacatcaaggaattgatcctgtcctggtttgcacagaatcgggaagtacacggtggaaagaaggatgttctcatagaaccggagccgatcccggtggaacgaacggttcttctgcatgaaaaagcggcatcctgtcagggacaattattgtatcagggaaatggcggagaagaagattttttcatcagggaaaagacctttcgcattggtacggatgcatccggcaatgaggcgcagttgcactcatcggcggtcagccatcagcatgcccggatcatacgccaggagagagagttttacattgaggatctgaattcgaccaatggcacatttgtcaatggtgtcatgctggcttatacccaaaagaaaaaactggagcctatggatcgtgttaccttcgcggatgtggagtatttgtttgtttaaagattgcgtttgactaagaaaaagaggttatttataataaaaaagtaattgatgagcgataagtaagagcagaggtttttatgaaggtcaatatttattatggtggacgaggcgtattggatgatccgacgctttacgttattcaaaaaatggaaagcgtactgatagaacttcgggtagaggtacatcggtataacatatatgagcagaaaaacgccatttccatgttgccacagaccttaaaggatgtggatggcattattctggcgacgaccgtggagtggctggggatcggcggatatatgaaccaatttctggatgcctgctggctctatggcgataaggagagtatttcttctatttacatgcagccggttgtgatgtctacgacctatggagagcgtgaaggtgctttgaccttggaaaatgcatgggagatcctgggtggtctgccttgtgccggattgtgtggttatgtcgaggatatcgtgagttttcaggtcaatcaggaatatgcccacatcattgagaagaaggcagaaaacctttaccgcacgatctcgcagaagtccaaagggcttccgaccagtaatcaggcagtcacaagaagtattcttcgtacccagcaattagaattgactccgcaggagagcgagcagttatcacaatatgtgtcagatgacaattatgtcaagaagcagaagcaggatattgaggagttatccagcatgttccgtggtatgatgggcaaggaggcgcaggagtcagcaaccgagtatatcatggaatttcagtcacattttgcaccgcagccggatttctcggcacgctacctctttatgatcggcggtaagaaaaagcctttgtttgttggtgtggatggcgatgagatcgtctgccattatggacaggaagaggagattgatgtgtacttaaaagtgccgcaggagatcatggatcaactggtgcgtgggcagatgacattccagagagcctttagtgtgggagatctgacgaccaagggtaacttcaagacacttcgtatgttagatgatatttttacttttacacaggacaagtaagtagtagataaaggagatgcgaaaatgagagacgacaactgtattttttgtaagattttaaatggagacattccatccagagtagtttttgaggatgcggattttcaggttatcatggatgcggagcctgcaaccaagggacattgcctgatcctgccaaaagatcattatgccaatgtatttgaaatgccggatgaggtggcggctaaggtgcttccgaccgcaaaaaaagtggcagcgcatttaaaaaagactctgcattgcgatggcattaatcttgtgcagaacaatggggaagttgcaggacagacagtgcatcactttcatatgcatgtgattccgcgctacgaaggcggcaatgcaaaggatgtcacatggagccacagtgagtttagcgctgaggagttggataagattcgcgaccagatccggatgtaaggtagtaggaaagtaggagaagactttg

SEQ ID NO: 12537 - DNA, 2200 bp, Unknown
  gut microbiota DNA sequence
cttatctttaacaacattgttacttttgcaatcttacctagatatgacaatcagtacaatgcaccaatgcttaaggaagcatgttactggtatgtaatcacagccggtatcttcatgttacttgcatgctttgctgtacgcaagtctgataatgctaagacatttgaagttatcggaaaagatggtcagaagaaccagaccgttaagtttaaggatatggttgctatcttaaaggataacaagccttgccagatgtatatgcttaccggtatttctgataagttagcacagcaggtcggatcccagtctattattacaaccatggcgtccggtattttgatcggctcttatgcagcagcaacaatgatcggtaactttaccatgatcgtaggtattgtatttgcctttggtggtggtgtattcgttgctaagatgggtgcaaagaaggcaacaaccgtttggtcatggctttctattgcagtagcagtgattacagttgtattctgtgcgatcttaggaccaaccggtatgaagtccatcggtgtcttcggtgtaccaatgatcatttatgcattattgcagttggctacaaccggtacaaagatggttcttactacaaccggtacagctatgagggctgatatcgttgattacgaatatgcaagaacaggtaattatttaccagccattatttccggtgtatacaacttcatcgataagttaattacatcacttgcatctaccatcgcagcattctgtattacattgatcggatataaggataccgttcctcagatgggcgatcctgcaacaaagggtgtattctggatgacaatgttcttgatgttcggtcttccaattcttggatggttgtgcaacatcgttgctatgaagttctataaactgaacaaagaagaaatggttgaagttcagaagaaagtagcagagatgaaggcaaaagcagaaactaacgaaaatgcagaagcataaaatacataagtcataaaataacaggagtcgggacgaaagtctcggctccttttcctatgactgtttttattcctttgtctggttctgttttcggtattgcataggtgtcattttatatttttctttaaagactttataaaaatgtgtttggttggtaaaacccaagtctctggaaatatcagcaatagtctggtcagtatccagaagacgtatgctggcttccttcatacaaaaatgcatgccataatcaaaaagggaaagtcccgagtattttttacagatggcattgagataggtgccggaataactgagtgcatcagacaatttttttctggagatatgtccgtggtttgcctctaaaagtttggtgatctgctggaaaaggcggttttccgtgtctgttccgatgcggataggaactgagttgtaataatccgggcgggagagattatagagcaggtctaaaaagagaccttgtacccgaatattggcatccggcgtaggatcgaccgtgatatgtacgatctgatctaagatgctgtgcacatgctttaccaaaaatgtatgctcttttttgggaatcagatccagataattcttatttgccgcttgtcgttcgttgatattgttatccagaaactgtaagaatttggagtcctttgtcttatgtctgccaaagatatgcagggtcatgcattcatataggtgtttcaggaaattcgatgagatctggacaaatgcaacgcgatagtaatcgcgatattcctcagtatgccgcacatttttattgaggatacagcagcttcctttggtatagagatgtctttcgttttcgatattctgatatacctccccatccaatacgatcatgatctcataaaagtcatgtttatgaagatttcttccatctggtacctgcttaagttccttcatggatagttcaaagaagaaagtctctttaggcgagattatggtcaatttctgataatgctccgggttgtccggctgaatggagatcaacatgagacggtaaggatggtttaaaacaaatcgtcctgtatttgatgaatcatgctgaataataaaatcactttgtgcttcactgatatcactttgtggatgacctgtcataaaaaacataaatattacctcgaatatgtaaaaaaaataataaaatcacagttaaaactgatatgtttctatcacatat

SEQ ID NO: 12538 - DNA, 6919 bp, Unknown
  gut microbiota DNA sequence
ctccagattatcgataaaatagtatgtgattccctgatactcatactgcatgacgcctacatagcgctcgccgatataagatcccatccccatctggaaatgacacacatactgaaaggaatcacggtattgtggcgggatacaggtatagtccggcaggaccacacggatatcccattctgatctgtcaaattcttttggcaaggctcctaccacgtcagccaatcccccggtcttgacaaatggcacacactcgcttgccgcaaaaagtactttcttcatagtaacccctcctaatgaatcaaaatactactcgtcccagttatgatatacttcttgaacgtcatcatcttcatccagcaaagataagatcttgttgatgttgtaaagatcctgctcatctgtaagttctacataggtctgcgggatcatggtcacctgtgcatctgccatagcgatcttctcctgctccaatgcttcacggacagcagaaaaatcatccggatctgtcagcacgatgaaggaatcttcttcctctgtgaaatcctctgcacctgcatccagtgccatcatcatcagatcatctgcatccagatcacactcttccttgtcaatgatgatctgtccctttttatcaaacatgtaagatacacagccctgggttccaagactgcccttgcccttggtgaaagcgctgcgcacattggcagcggtacggttcttgttatcggtcaaagcatcaacgatgatggctgtaccgtttggtccatagccttcatatgtaaccgattcataattgactgcatttgcatcaccggcagctttcttgatacctctttcaatggtatcgtttggcatattgttggcctttgccttggcaataacatcacgaagtctgctgttattgtcaggatccggtccgccttccttgaccgctactgcgatctcacgtccgataatggtaaataccttaccctttgcagcatcatttttctctttcttatgcttaatgttagcaaattttgaatgtcctgacataaaattatatcctcttttctaaagtattcttatccagtgtatcattttttgttttatatggcaaacacctgtacctgctggatcatttttccttctacatccagcactttgaagcggtagcccttgtattgcacttcaaaagtctcatgttcctccgggatcttgtcaatatgggagatcaagaaaccatttaaggtctcgtagtcctccgggaaggtaatccccagaacctctgccgcttcttctagggaagtgccgccatccatgcggtaaaaattcggtgcgacctgttcgatggacgcttcctccttgtcgtgttcgtcctggatattgcccacgatctcctctaagatatcctccatagaaataataccgctggtctgcccatactcatccaccacgatcatcatgtgctttttcttggactgcatcttggcaaataaggtatttaaactgtgggtctccggcacaaattccggtgagtgcagtagtttgtcaaaatcccgcagtttctgcccgtaagtcttatggtctttggcaaagactagtgcatctttaatatgtaaaagaccgatgatattatccagatcgttcaaataaaccggataacgggaaaaaggtgcatcctgcataaaggtaagcgcctcgccaaaggtcatttcgccatccagagcaatgatctgcctgcggtggaccatgatatccttggcgtccttgtcgccaaattcaaagatgttatgtatcatggcggcttcactggctaacagcaccccatgctcatgtccctcattgacaatggaaatgatctcatcttccgtgacatcatccacttcctccttgggatctaccccaaaaagaccgctgatcttcttgctgagaagatcatacaaaaggatcagaggtcgaaaaacttttcgcaaggtctcataggctcccagatagcgcagtgcgatcttacaatgctttttggaactgatacgataaagagttccaaaaaagaaaaccgcatataatacgacaaagaccacatacacaagaattgcaaataagaccctttcccatgtattttctgcaatgtccgacagtccattgtaaagcaggtaaaaagaacttgctacaatgccgatcccggaaaaaatccgcaaaaaggaactgctgatgaccagcaaatgatcatcactgtgataacgctctaagcaccctgccttggcaggatcccctttttgtaactcctccagatcactgtcgttgatatgatcgatcgcgatcttaaaactactaatgatgatctgcatgatagcacataggcaaaatacgatcatgcagatcatacacctgactccttcatccatggtattctattccctcatttcctttcttatgtgaaaatctttgaaactgctatgtaagcaattccagactgatctctaatgctttatcaatctcaaataaaacctgattatccagatgacatatcttatccttaagtctggtcttatcgatggtgcgaagctgctccaacagtacgaccgaatccttgaccagatcatatttaccactatccaatgaaacgtgtgtcggcaattttgccttgtgcaactgtgatgtgatcgctgcacagatcacggtcggagaatggatatttccgacatcattttgaataatcagtaccggtcggatcccgccttgttccgagccgacgaccggtcgcaagtctgcataataaatatcgcctcttttaattgtcatactacactctccaaaattgaatttataaatagtatttccacaatttcaaaagctattcatattagattatgcaaaataattcatttcgtcaacgcatgcgccgtccttctgataaaaacgtggaatgcggtctcccagattacatgccagttcatagttaaaacgcccggacatttctcccagtgtctccatagaaatgactgcgttcccatcctgaccgatcaaggtcacgcggtccagatattctgcatccgggatatccgttacatccaccatcatctgatccatgcagaccctgcccacgatcggtgcaggcttgccgcgcacaagcacatagcccttgctggataaagaacgaggatagccgtcgccatatcctaccgggatcgtcgcgatccggctttctctttcagtgacataggtgccgccataactgatcgcacttcccgccggaagggtcttgatgtgtacgatatgactgtaaagagataaaatcggatgcaaaggaaaggcatgatccatctcctctgacggccacagaccgtataaagtaatgcctgcacgcaccatattttcatgatagcccggcagttctaagatagcggcactgttgcagcaatggcatatcggaaacgtaatgtcctctttttgcagcgctcctatcatatccttgaataagctatatgccttttttgcataagatttatccgcttcatccgctctggcaaaatgggtaaagataccttccaggcaaagatgtttgagccctgcaatctctttgatctcttctaccgattcctgacagaccggatagccgatcctgtgcataccggtatcgatcttgatgtggatcagtgcctttttatgacatttttccgctgccgcatccaaggcttgcgccacatccttgcggtaaattccaaaacggatatcctgcagaatcagatcttcataatctttttcaaagacatagcctaagatcagaatcatcttcccaatgcctgcttttcgcagttccaaggcttcttctgccgttgcaaccgcataaccgctgatgcggtcattgtcctctaaatgcttagcaattgccttagcaccatgcccgtaggcattggtcttgataacagccatcatgccgacgtcctgcggcagtttttcttccattgcctgcacattttgatctaaggcatcaaaatctacgatggcgtaaacacgccttttttctatttccactgtcatcttccttctttctgatagatcgtttttattccttttatgatgtcacctgcctgcatgcaaagattagcctctgtccttgcggcttcctcacccgcaagtccatgcaggtaaacgcccagtgatgccgcatcttccggtcttaagccctgcgcgatcaatcctgcgatcacaccggtcaagacatcaccactgccggctgtcgccataccgctgcagccgctcgcattgatataagtcgtggcataaggcacggatacgatcgtagccgcatccttaagtgcacaaatgacctgataatctcttgcaaaatcctgtgctatggataatttatggtcagtcacatacataagcggactgcccatcaggcgtgccatttcacccagatgcggagtgatgacggtctctgtatgcggctttttcagccactgtaaatgttctgccagaatccccaacgcatccgcatccaccaccatcggcactgcagcattttctaaagtcgtgcggaccaggttctccgccagattagactttccaagccccggtcctatggctatggcatccgcccaagcaagttcttccaacaactgcttttcattccatttatcataggtaacaagaatggcttccgggaatcgtgtcaaaatgatgtcacgattgcatcttggtgtatagaccttgaccatgccggcaccactcgtcagagcacttttcgatgcaagataagccgcgcctgccatatcctcactgcctgcgatcacaagcacctttccccggcttcccttgtgatcatccgggcttgcctgcggtagttgttttagatcttctttttccagactcttacaaggaagaacctgatctgccagactgcatgattcgattccgattgcagatacgatcaattcaccaccgtattttttccccggataaagcatctgtccgaccttggcaaaagcaaaggttatggtcgcatccgccaaaaatgcctgccccatgatctgtccgtcatccgcagatacaccggatggtatatccaccgccagccggtaggcatccatggcattgacctcttgcaaaagtgcaggatagtcaccgcccaattctctggaaagcccgataccaaacagggcatccacgatcacctgggcgtctgcaagtgtatccgtagaactagacaattccatgccatactgccgacagatcttttgctgcgccatgttttccggcgaagccttggaaaaatcgcccaccaggcataccgacacctgacccccctctaagtataaaagccttgcaatggcgagtccatccccaccattgttgccacttccacatagtatgacgatcttcttttgccacaaatctctttcatgcaaaaatgaaacaaccgataacgcggctctctccatcagcaccatggaaggcagaccataatgctcgatcgtgcggctatcgcattgtttcatttcgcgactgtttaaaatatatttcatacgtctcctttttgtacatcttttgataactgtttgtcctgggtcgtatcaccggacgggcgatcctctcctgtgatcagatccacatcatcattttgcacatcaaaaagattgatgatatcttttccaaatatatcatgcatatatgcatagatttctttattgttgatctcccgattctgtttgcggatgatgttcttttttaattctacccggacctttttgatccattccgcaatctcctcggcttctttgcaattggtgcgcagacgatcataacaaaaggtcatggtctccatcatcagcgcgtcattgcaggtctgtatctcctttgggatctccaaaagggcatcctcgttggctgcgatcttttccttgacttcctcgatcagccgtttgttctcgtccatctgccggctgtgcgtctccttgtcctcctctgcgtccatatgctctacgatattctgcataagggatgacttgaccttctttaaatcctttaactcctgcgtcaggcgtccctgccgctccaagatctccttcaactggctttccagttcctgcacctctttgggcttgccatctaaggcaaaaagccggtgccatttctggtccaagaccagaatgggtatttttgttttcgccagtgcttctgtaaacgcctgtcgttccatacgctcaccttcttttgaaaactattttttgtggttggcaatattgtaagaaagctgcatcagactatcggacagatgcacattctctacgaccatatcctccacatcatccagatcgacatgggcaaaattccagatggcatgtacgcccagggaagataactgtgccgcggtcgcttctgcattctgctttggcagggtcagtgccgcaatatccacacgtgttgtctttacaaattctggtaattcctccaacatacggattgggatatctcttacctctttccccttcaatgccggattgacatcaaacagaccgacaatcttgaaacctaatttttcaaacttaacataattggcgattgcctgccccaagttaccgataccgatcacgatcacattgtgtgtctcattcaatcctaagatcttgccgatttcatcatataagtactgaacattatagccatagccctgctgaccgaaaccaccaaaattgttgagatcctgccggatctgggatgccgtcacatgcatacaactgctgagttcgttggacgaaatgcgctccactcctgcatcaagcaattctcctaaatatctgtaatatcttggcatacgacgaatgactgcctgggatatttccttttccacgttaaattccccctacttccactgtcaatgatgacatgtatatcatatttatataaaaattataaatattttaaatat

SEQ ID NO: 12539 - DNA, 20631 bp, Unknown
  gut microbiota DNA sequence
atctggaagaatatcttaccaaccgcgatttgtcggtaaatgctctgtttgagtccaagaataaaggcagcgcccttagtgccgccggtatccgtagcatgatccacgatgtaggtgtccggtccgggatcaccagattgcatccgcatcggttccgcgtcagccggatcacacatcttgtcgatcggggcatgccattacaggacgtgcaagaattagccgggcatacctccatcaataccacacgaagttattatcgaaacactctggagaatgtaaagcactcctacctcaaggcggcacagtagtcgtggggcaaaaatggggcaaaatggggcaaaaacaggggcgttttccaatacagtttgagacaccaaaaagccccgaaaccctttattttcaaggtttcgaggcttttttcatacatacgtctcatatgttgttagtgccggcggtgggacttgaacccacacgaagttgcccccgcaagattttgagtcttgtgcgtctgccaattccgccacaccggctcgttgatactatggctatgcgccatcaacgaataatagtttatatcaacatgataagattgtcaatctcttttttcatctttttcagtctttttaaacaagtcccttgatgatatcgaaacagtcaaaagttgcgaaataatccttcggggtctctgcacgacgaatcaactgataagaaccatcctccttcaaaagcacctcagcagactttaacttaccattgtaattatatcccatcgcgaagccatgtgctcccgtgtcatggatatagagataatcccccatctccacctgtggcagcatacgatcaatggcaaacttgtcgttgttctcgcaaagagaacctgtcacatcatacttgtggtcacatggtgcatcttccttgcccagaactgtgatgtggtgatatgcgccatacattgccggacgcatcagattgaccgcacaggcatccacgccgatgtactccttataggtatgcttctcatgaattgcctttgttaccagcgctccatacggtcccatcatgaaacgtcccatctctgtgtagatggcaacatctgtaagaccagccggtactaagacttcatcatagacacgatgtacgccctcaccgatcacacggatatcattcggtatctgatccggtctataggcaatccccacgccaccggaaagattgataaaggaaatctcaataccggtcttttctttcaactcgactacaagttcaaacaaagtctttgccaaagccgggtaataatcattcgtcacggtattgcttaccaaaaaggcatgcaggccaaaacgctttgcacctttatcgcgcaggatctggtatccctcgaaaagctgctctttagtcatgccatacttggcatcccccggattatccatgatcccattagaaatctcatagacaccgcccggattgtaacgcaaactgatcgtctccggaatgtgtccgatcgtatcctctaaatactgaatatgggtaaaatcatccagattgatggtcgcaccaatctcattggcatagacaaactcctctgccggtgtatcattggaagaaaacataatctcctccccggaaaatcccaattctttgctgagcatgagctctgtcagggaagaacagtctgtcccacatccatactcctgcaagatcttgatcagaaaaggattcggattggctttcactgcaaaatattcacgaaatcccggattccatgcaaaagcctcttttactgcctgcgcattggcacgaattcccttttcatcatacaaatgaaacggggtcggaatacttttcacgatctcttctactttttcttttgttacaaaaggtgttttagccatgtcgatctccttcatctattctgtataaatatgcattttttgtctgagaaaataatagcatgaattccgggcagtgtcaaaattatttacaaatctgatgccagattttagtacacttttgccaatgcaccaatggtcgcaaagagcgtactgaccacaacaaggatctgaaatggtaaagtgccccaaacaccgcagatcggcgcattcttttcccttcttctggaacggttgtaggagatgatgatacccacgcctgtcaatacctgtaccacacttgccaaacgggtaaagcctacaaaactggatacgcccaccagtgcgatcaaaagacacggcacactggataccagccatgagaccttgacattccacttggtctgctcatgcacgatgtcacgcagatttaaggtatttgcccagaaagacgtagacaaagccaaaagggagaagatataaccgatgatgctgacccagccgcccagatgtgcggacagatccaccaatgctccgttttccgaaatatccgatccagcccccagcaatgtcataaaggtgatcaaaaggatcaagcccgtattgatccctgttcctgccgcgatggctccacggatccgtttgatatcgccctgcaatccctttaccacctgtggcaccgacatcacggctgacagggagaaggagatcatactgtaaagtgcgaccagattggtcgtcgcaataaacttggtcggcagtgggctgatctcggaaaccagcgttgccacgaacaaaatgccgataaccgccaccatggaaccgacggagatcttttcacagataccgaccagtttcatgccaaagtagatcacactggcagccagtatgtaataaaggatcatgcctgcccagttaggcagaccgaaccatgcatgaaatacggctgctgctcctgcaataaaaccactgacattgaggacaacggacaatcccaaaagtccgaatgccacccatgtagcaaatttcttgaaacgtccaacaaacagttcgttttcaaaacatttgataaactgcgcgcccccattattataggaaagttctgcgatcatataatgcatgatcagattgatcagatatgccactgcaacaatccagagcatatccttccagtcatttctggacgccaaaaaaggaaccgacaaaatgccggatcccacgccatgtccgacgataatactggtcgcctcaaaaaaggtcagtctcgcctctgtcttaatttcttttgtcataataccccacctctcattttgtacctttctttgtacattatagtaaaaagaataccatccggcaggggtatttacaaccttaaagttcgaccgtaaatgtgctcccttttcccggctcactctccactgaaatcttggcatccaaaagttccacaacacgttttaccatggcaagtcccagtccatttcccttggaagtatgcgaagtatctccctgataaaacttatcaaaaatacggcggacaacctcctcgctcatgccacaaccattatccttcacagaaatcagggcaccattttctccatattttttcattgaaatatcgatcgtgccgccttcttgtgtatatttgatggcattgcttaacaggttgttccacacgatagataagaggctctcatcgcttacaatataaactccctcgtccagatcaatattgacctctaattctttctcatcaaaaggttcatcgaaagcgataatgcactctgccagttgttcatccagacagaaacgttccttctcaacgatggcctgactctccatcttattcaagcgcaaaatattctggacaagaccggacagacgctccgatgactccacgatcgtatgaatgtactcctttttttcttgctccgtcaaatgttgactctctaacatctgggcataattctgtatgatggcgatcggtgtcttgatctcatgcgatacattcgcgataaaatcactctttaaggtctcattggcggcaagttctgtcaccatggtattaaaatcttcgatcaggacttccatctcatcccgtttgccatctccacgctgtggcagaatacgaaccgtaaaatctccgccagccacacgcctggctgcaccgcgcaactcctgtataggctttgaaaaggtcatacgatagttgatcttggtgaaaagcatggaaactgcggccaagaatatggtatttaagatcaatgccacataaatgccccaatttcccagcgtggaaagggcatggttctgatacagaccaatgccggcgaaaacacatactgtctgcaccacaaagaccatgaaaaactctctccagatcggacgcttggcatcaatgcgcagatctttcggttcctcgtaactaatcttcactatgtatcaccgccttatagcctagtccgcgcaccgtcaggatctccacttccttaacagcagagatcttgtcacggagttttgtaatggaaacgtctaccgttctcggattactctcactgtcaaagccccagaactcatccatcaactgcatacgggtaaaggtctttttgggataggaaagcattttaaagagaatctggaattcctttaccgtaagcggaagttcctctccctcgtaataagccatagtctcttcttcctttagaaccagattgcccgcctgcaactgcttttcggtcgcaatatccgctctgcgaagcaaggcttccacgcgcatcacaagttccaccagatcgatcggttttaccatataatcatcaataccgatatcatatccttttttcttggaggcaatatcatcttttgctgtcatgaaaaggatgggcatcttgtcatcaaaagaccgctcttctctggcaaactcataaccatccatctgcggcatcataatgtcagaaacaatcatatcaactttggtcttctccatgatatcaaaggcctgaattggattttccgcacgctttacctcaaatccttcctcacctaattttttgctcacgataaaatttaattttgtatcatcttctacaacaagtatggtaatcatgtatcttatcctccttcgtttccgagaatccggtcagccttttcacaggcttcatatattttgtcatacaaagcgttttcctctgccgcataatcgtctttgtgccgatccgattcccagttgtaaacaaccatcgccatggcacagacaataaaccccatgatttcaaaaatggtaaacagtatcatgtgtcggtaggatatcgcgatgaccgatgcgatcagccagccggcaccaatcaatccagtcataattgcgaacatcgtcggtgtcagactctttttctgctcatattcctcgatcgccataagcgcatcctccatcttgcgttgctctgccatcagccggttacgctcacgcacattgcgcgatctgcgcatatggatgcactcatcttttcctcttgtatttcccattacttcccaaccaaaggcttcgtaggactccctgcatagacccgcaaggctttttaagatggtcacattgacatattcatattttgtaaaatccttttccatgcgtttccctcttctctccccatatctgccatactagtatagttttgttaataatacattaaagactaggctatgccaagcaatttcttggcgcgttctagctgctcctttgtcggtggttcggcatcttccagaccgtaaggcagtcccagttccttccatttgaatacgccaagtgtatgatatggcaatatttccacgcggtctaccgtttttaaggaagccacaaaatcccgtaatgccaaaagatcctcttcctgatccgtcacacccggcacaaggacatgacggatccacattaccttcccatggtcagataaatatcttgccatctctaaaatattagcattatcctgtccggtcaattctctgtgtctttttgcatccatctccttgatgtccagcatgacaaggtcggtcacttccatcaatttctcaaactttgaaaagaagggttcttctgtcgtaaaaggattcccggatgtatcaaggcaggtgtggataccctcttttttggccagtgtaaataattccagtagaaaatcaatctgtaaaagggcttccccaccactaaccgtaatgccaccattctttttccagtatgctttgtagcgttttgccttttcgagcacatctttcgcccgcttccagttttccccctctttgggcgcatccatactgccacaggcttttgcccaggtatccggattgtggcaatatttgcaccgcatctgacagcctttcaaaaagacgatatagcgcacgcccggaccgtctgccgagccaaaactttccacggaatgaatgtttcccaaaatttctttttccatattttcacctttttctaagaaagccgcgagatatgagatcccgcggcctgcttctacctagactttacttttatccttttcaaaggatgaatgttacatatgatcgtggcaagttcttgcgatcacatccatctgctgttccttggtcaggtcgataaacttgactgcataaccggatacacggatggtaaagtttgcgtactcttccttttccggatgttccatcgcatcgatcagtttttccttgccaaagacattgacattcagatgatgtgctccctgatcgaagtagccgtccataacctgtaccagattatccacacgctcctcctcggcattgccaagtgctcccggattgatggtctgggtattggaaataccgtccagcgcccactcatatgggagtttggtcagagagttcaaagacgccagcagaccgttctgctctgctccgtaacttggatttgctcccggagaaagcggctcgcccgccttacgtccatccggcatagatccggttgccttaccatagaccacattggatgtgatggtaagaatggatgtggtcgggatacttctgcggtaggtatgatgtctcttgatcttatccataaaagtctttaagagccatacgccgatctcatcggctctgtcatcatcattaccgtatcttgggaaatcgccctcgatctcgtaatcttttgcaagaccattttcatcacgaatgaccttgaccttagcatacttgatcgcggacaaagaatcaatcacatgtgaaaatcctgcaataccggttgcaaaagtacgttccaaattggtatccatgagtgccagttcggctgactcatagtaatatttatcatgcatgtactggatcaggttcagtgtattgacatagagatctgccagccattccatcatgtcgtcatagcgttccatgacctcatcataatccagatactctgatgtgatcggacgatactttggtccgacctgatcgccggtcttttcatccacaccgccattgatggcataaagcagacattttgcaaggttggctctggctccaaagaactgcatttccttaccggtacgtgttgcagaaacacagcagcagatggcataatcatcgccccattccggcttcatggcatcgtcattttcatactggacagaacttgtcgcaatggagatcttggatgcgtatttcttgaagttctccggcagtctggaagaatacaatactgtcaggtttggctccggtgccggtcccatgttctctaaggtatgcaggaaacgatagtctgtctttgtcaccatagatctgccgtctacacccgttcctgccacgtccagtgttgcccataccggatccccggagaacaactggttgtaagatgggattctggcaaacttgaccatacgcagtttcatggtaaagtgatcgaccagttcctgtacttcttcttctgtgatgatgcccttatccagatctctctggaaataaatatcaaggaaggtagagacacgtcctacagacatggctgcaccattctgggtcttgatggctgccagataaccaaagtaaagccactggatcgcctcttttgcatcctttgccggtctggaaatgtcatagccgtaaatggctgccatctctttcatgccttccagtgcacggatctgctccgcgatctcctcgcgcagacggatgacttcgcccttcatgctgccactgccgcattttgccttgtcttcctttttctcctcgatcaaaaagtcgataccgtaaagcgccactctacgataatcgccgacgatacgtccgcgtccataagtatccggcagaccggtcatgatcttattgtggcgggcctttaacatttccggtgtatatgcgtcaaacacagcagtattatgtgtcttgtgatacttggtaaagatttcctttaacaaaggatctacttcataaccataagtctcgcatgcctgcaccgccatcttgataccgccatatggcataaaagcacgtttgagtggtttatctgtctgaagaccaacgaccttttccagatccttgaggtcttcatcaatgtatcccggaccataagcggtcagacctgaaaccaccttggtctccatatcaagcacgccgcccttggcacgttcctctttttgcaatttctgaagtgcatcccataaacggttggtcgactctgtcggacctgtcaaaaagtcctcattaccttcgtacggtgtgtagttatcctggatgaactggcggacattgatctcttccttccaaagtcgtccatcaaatccgtcccattccttcatttctaccattgtgtttgcctcctattctagtaaacaattcgttccttataacttgagttaggcttttctaactctcgttaattttataacaagattttgaaaaaagtgcaagtttttatttagatacaatctttgcacatgtttttcatcttggcgcgtttttcattatacaggaagtgcagcacaatatctagtggtttttataaatttataactacaatttatggtattttttcaatcacataccaagtgtcgtcataaaccagtagatcaaaccaaggatccaggacgaaaaaatcccatacaggatcaccggtccggcgatctgaaagatcctggcaccgacaccaaagacatgtccttcaaccttaaaaccatgggcggtagccgctacactgttggcaaagcccgtgatgggaaccaatgctcccgcaccgccaaaactggcaatgaccgggtagatccccgtgcctgtcaaaagggcacttaggaatacaagagtcagactgcaataacttgccgccgtctgatcgtccaagccatatttttttcctatgttgatgatgcactgccccaaaaggcagatcagtccgccgaccaaaaaagcttttgccatgcgcagccaaagatttgcctttggcgtcacactctccacatagtcattataagtctcattgatctgctctttttcttcctgtttcattctcttatcacctcatttttatgaacttgcatatgaaaaaataaaataccagaggctgcctgccagctttcccagagcaatggcaaggatggcaaaagacagccccatttgcagttttaccctgcgaaagagtatgggaaacatatttaagatctctgccagcgccattgcctgacagcccacataaataccagcacagattccgatcaaaaccaatgccagcagtcccaacccttttgcaaaaactctcccggctatcccctggcaaaaggagaaaagcacagggctcggttcaaaaaccgataaaaggcaaccactcaggcttcctaagataatgacattctcccaatgcatggtatctttcgccagttgcagccttgcgatcatgcgcgagacaaaccccaaggtcgtgagcagggcaatcacaccggctgccgttgcgcctccaaagatcagccctgcgacaatgatgaccgtccttttaagaaacatccagattttctcctctccttgccccattttctatgatcgcagtatctacatccttctcatacttgcgcatttccacctggatcggtgtcggatcatgggtcaatttcttcttgccaaaatggttataaaagaataagattcccaccgcaagtccgatcgaatatgcaatctccagcggactgaccgcaggctttttgcttcccatgacctgcaaataaaaacggtcaaagagttccgtgatactgatatcgttgtgaaatgccatgatggcaaaggctgctccgacaaagagcagtacgcaaaggaatcccgtctttgccacttgcataaagggctccggctccttgctccgatactccatgatgacatcggtttcgcccagactcaccacagtcagtttaggataaaggctgtggatctcctcgaccaccttggtaatggatacaggcatattgcccggatgtttgaaatggtaaacggcatgtgcctttaccctcgctaatatatcactgttactgcactctatcccgcccagatccttgatgtaaaaatccgcttcatagcgcagggcagaccggtctaatttgatatagagggtctcgttgtttccatcatatcccatcttgccatcattcctttccttttctaactattgtttccagtttttccggctctatgcattttttacaaaagaaaaagacctgtcagactgacaggtctaaagccatttgggacactccttgtggcaaaagaaacgtctcttacttattccttacttattccttacttattctttccataaaaataggttgcaaaatagatcacagatgccacgatcacgatcataggtccggtcgccacattggtaaaataagaaatgaccaatcccacgattccggaaaagagactaaagatcacggcatagaggtgatattcctgcatgttttccgatatattccggctggatgccgctggcaggatcaaaagggcattgatgagcaaaataccgatccacttgatcgacaatgtcacaatgagcgcaatgataatagcaaagatatcctccaccagacgcacggaaatattgcggctcttcgccaaggatgcatggatgctgatagcattcaacttgttgatggcaaagcaccagaataccagagtcaccgcaaagatcaggatcagatagatgatctcccgcgtagaaatgctcaggatatctcccaccaaaatagcggaatacttgctaaaattgccccccttggataggattgccagaccgatcgccgtactgcagctggcaaaaacagaaatgatggtatcggtcgccgccagatttttacgattgatctgattgagcagaaaggcaaatacaatggcaaacagcaccatggacagattggtgtcactgataccgcagaccacgccgatcgcaataccggtcagggcagaatgtcccagtgcatccgaaaaatacgccatctttttatggacgatcatagtgcccaagatacctaaaagcggcgtaatgatcaggatggcaagaaaggcacgacgcataaaatcatattggaataactctgtaaaataacctgtcattatgcttcctccttctttcctttatagccagcctcataaggggcttctttcgcttccaccttgcgcacatgtcctacattgttgccataggcataggtcgcatcaccaaagacgcgatgaaatgcctggctttcatagacttccttgggattgccgtctgccgtgacggtcttatcgatcagtacgaccttatcggcatactttgccacatagtccagatcatgtgagataatgatgatcgccatatcgtaatttttgcgcaggtaatccatcttttcatagaaaagatccataccgtttttgtcaataccggacaccggctcgtccaaaagcaaaagatttggctcgtccatgaccgcaagcgatagtaagacacgctgcaattctccaccggaaagtttgccgatcggctggtcgatcagatggtctgcctcgaactctgccaaggcttccttgatctcctgatataactttttgttcttcaaaaagaccggataatcatagcggaaactcgtgatcagatcatatacattcatgggcgtatttggctctaaattcagtgactgcggcacatacccgatcttcatttttttcatttttccattttcggtatcggaaaaagtaatacttcccgtatggggaatgtcccctaagatcgccttgagcagggtagactttcccgcaccatttcgtccgatgagcgccgtcaggctgccacagtggatatgcaaattgatgtgttccaacacgacctgatcgccaaaggacacgccgatatctttcatcttgatacagtgaaaaccacatggttttttgatcttatgcataaatactatctcctatctcgcagcaaaagccatctgtatggcatccaaattttcctgcatgtgctctatataactgtccttgtcatagtctcccctgaccagggtctctacatagacggtattggctgcggtctctgcctccaccatatcgcccatctccttgccatagacatcatccgcaaaaacgacccggatacggtctcctgcaatggcagacatgacatccgatacctcgcccgcactgacctgacgttcctcgtccagatccaggacataggatacttccagccccagatcccttgccagatattcataggcttcctgaaaaaggaccacagaccgtcccttggtatattgggtcatttcttcttcctgcttttccagcgcctgtaattttttctggtatgccttggcattttttgcatatgccttgctatggtctgcgtccgctgccgccagcccctctgcaatattgtctacctgcttttcatgcagggcaacgctcatccatgcgtgggcattgtcctcgatcagatccagtccctgactcgcattgatgatggtcagattcggacatgcctttgccacatcggtaagaaagttttcgataccgccaccattaacgataaaaacatccgccgtctgcaaaagtttcatgtcttccggtgtcagttggtaatcatgcaggcagccggtctgcggctcgctcagattttccaaatgtatgccttccacgccatcacagacatttaaggctgcgatatacatagggtaaaaggatgtgaccacggtcagatcctctgccttagcatttttttcctgtttctgataaataaaaaaagtacagccaaatgccaccacaaaaatggcggcaagcagcgtactcacaaataatcctttatgcctcttcttcattctcaatcacctgatccataaaatcccagattatatctcttccctgttttgtctccgcagaaaatggaacgataatggtctctttatccgcgcccaatccctgacggatgatcttgatctgtttatcaatctggcttcgtttgatcttgtccaacttggttgcaatgacgatcggatcatatcctacatatgccatccactcaaacatctgcttgtcattggcagacggtgcatgccggatatcgaccagaagaaagaccgcacgcagtttttctgaagtgttcagatagcgctcgatcatctgcccccatgcctcccgttctttttcggaagccttggcatagccataacccggcagatctaccagatagatttctttattgatattgtaaaaattgatcgtctgtgtcttgcccggctgtgccgatgtccgcgccaatgacttacgcatcatcagcgcattgatcagtgacgatttgccgacattggatttgcccgcaaatgccacttccggcagtttattgtccggaagcatactcgtcacgccacagaccgtctccagttccacattcttaatgaccattatgcactcttctcctgctcttctccgatggctgtaatgcttccgcttttgtcctccaagaggagattttcatccaccatctctttggtaacatgcacgcttgtgatcgtcttatcggatggtacttcgtacatggaatccatcatgacgttctccaagatcgcacgcaatcctctcgcacctgtcttacgctcgatggactttctggcaacctcaaccagagcatcatgatcgaaagccaagtccacatcatccatcttaaaaagtgcctgatactgcttgaccagactgttcttcggctcggtcaggacacgcaccatatcttcctctgtcagttcctgtaaggaaacattgatcggcacacgtccgataaactcagggatcaaaccaaacttgatgaaatcctgcggcaatacctgctttaagagcgtagaaaggtcatcctgattgcgctccttggtctctgactggaaaccaatgacattgctgtccaatcgctcagaaatgatcttgtccagaccttcaaaagccccaccacagataaagaggatattcttggtgtcgatggagatcaactcctgctgcggatgcttgcgtccaccctttggcggcacgctggcaaccgtaccctcgatcaacttgaggagtgcctgctgcacaccttcaccggagacatctctggtaatggaaacattttcggatttcttggtgatcttatcgatctcatcaatatagacaatgcccatctcggctgcctggatatcaaaatctgctgcctggatcaacttgagcaggatgttctctacatcttcacctacataacctgcctctgtcagtgtcgtagcatctgcgatggcaaacggtacgccaaggacacgggcaagtgtctgtgccaacaatgtctttccgctaccggtcggtcccaacatgaggacattgctcttttgcaattccacatcaatgtcctgtccggatgtgatacgtttgtagtgattatacacagcgacagacaataccttttttgcctcatcctgaccgatgacataatcatccagaaaggctttgagttcctgtggagtcaaaagattgatctcaaattcctcatttgcctttcttttagcgtctgaatgttttccttcctgctccggctcatcatactccggcatcagtcccttttccattaaatcttcttctatgatctctgtacagatgtctacacattcatcgcagataaacgccccattgggtcctgcgatcaacttgtgtacctgattttgtgttttgccacaaaaggaacatctgaccatcttatcgtcattcattcttcctgccattttacttctctcatttccttatgatatgcacattgagggtatcccatatggggtaccctcttatgcattactctttctttgtgatgattccatcgatcaagccataatctagggcttcatctgcgctcatccaatgatctctttctgtgtctgctgccacaacttcgtatggctttcctgtgttgtctgctaacatctgattcaactttttctttgtctttaagatgttctctgcagcgatctggatctctgttgcctgacccttggcaccaccggatggctggtgaatcatgacttccgcatttggaagtgcaaaacgtttgcccttggcaccaccggctaagaggaatgctcccatacttgccgccataccaatacaaatcgttgatacatcacacttgatatactgcatggtgtcatagatggccatgcccgcagtcaccattccgcccggggaattgatgtaaagatggatgtccttgctcgggtcttctgactccaagaacaataactgtgcaactacaagacttgcagttgtctcgtttacttcctccccaagaaagataattctatctttcagcaatctggaatagatatcgtaggaacgttctcccctactattctgctcaatgacataaggtattgttgccatattatgaacctctctttcctgaccttattacgtctgattactcagcgtcttttgtctcgtcagccttcttagttgtcttcttcgctgttgtcttttttgcggtagtcttctttgccggctctttctcttcgtcagcggctgccttctttgtggttctctttgctctttccttgacattctccatgatgaagtctgctgccttctggatagcgatatccttcttcatagattctctctcagcatcctggatgtattccttaaccttatcaacttccatgccgtatgctgctgccatcttttcgatctcagcatctacatcagcatcggtaacttcaagattttcgtccttagcgatctgctctaatacgagtgaagactggattctcttaacagcatccgggcgaacctgctccttgaacttatccatggtcatgccggtaaactgcatatactgctccatagaaagtccctgctgcatcatgttatttgcaaaatcattgatcatgctgttaacctgattgtcgatcattgcttctgggatgtccatcttagcatcatcgatgatcttttcgattgcttcatcttcctttgtacgatgtgcatctgcttccttgcgctctgtcagtttcttcttgacatcttccttgtactcagcaagagtatcgaactcagatacatcctgtgcgaactcatcatcaagttccggtaattccttagcctttacttcatggatcttaaccttgaatactgctggcttgccggcaagttcctctgcctgatactgctctgggaatgtaacatttacttctacgtcgtctccggcaaccttgcctactaactgatcttcaaaggtatcaatgaaagaatgagatccgatctctaagtcgtagttctcgccctttccgccttcaaatgctacatcatctacaaatccttcaaaatcgatcactgcggtatcgccattctcgatcggacgctctacagaaacagttcttgcgttgttgtttctctgtgtctcgacctctgcgtctacttcttcatcagaaacgcttgtgtcgatcttggtaacggtaacgcccttatacttgccaagtgtaacttccggcttaacagcaacttctgctgtatagataaatggcttgcccttctctaactgtacgacatcgatagatggctgtgaaacgatctcaagaccgctctcgtcatatgcctcaggatatgtctcctgtaaaaggatgttggctgcatcttcgtagaatacttctacgccatacatcttctcaaccatggctctcggaaccttgcccttacggaatcccggcatagagatgctcttcttctgcttgttgtatgcagcgtcaagtgccttctctaaacgctcagcctcaatctcaactgtgagttttgccatattcttctctaatgtttcaacctgtacactcatttaattcatttcctccttaaaattgtaactcatgtactaatcacctataatagaacctctattataaaaaggacattcagcccttgtgcagtcattgggatattatatcacaccatattttaaatagcaataaggaaaaccaatgaaaaataggggcttttcaaggcatccagacctcgaaaaaccccatttatttttcctgtcaaaaattatgcttgtgtttgatttgccgggttgcgggaactgtctttccacagccgttctgcggtcggtgtccagttctttgcgtagtcctcacatttagcacacagatgctctaccgtctccggtgactgcaagtctgtggaacgtgcccctgtggcttctaccatcttttgcagagcctccgggttttccaacatcggacatgggcgcagatggttgtcgttgaacggctgaccatcatgatatgccataaagatcggtgactgtaatacctcaagcagggtattgtggcggatattggtattggaataatggataaatacacaaggatcacaatctccgttggcattgatatgtagatagcgtctgcctccggcgatacagccgcccacatattctccatcgttctggaagtccatggcaaagagtggttttgtcacacgcacctcccggatcttgtggtacatatattctctctgctccggtgtcggcagaagttccggtgctgcatcatttccgaccggcatatagtggaaataccatgcaaagtaagccccccagtcgatcatctggtcaaaaaaggcatcactggcaatggaatctaagttctggctggtatagcagcaactgataccaaacggaagttttctttctttcaaatatcccatcgcgcggacagccttttcataagtaccgtttccacgtctgccatccgttgcctcctcaaatccctcaacagagatcgcaggcaccagatttttgacatccagcatctgatctgcaaactcttcatcgatcagagtaccgttggtaaaggtcaggaactgacaatcatggtgttttctgcaaagtgcgatcagatctttcttgcgcacaagcggttcgccaccggtatagatataaagatatacgcccagttccttgccctgcatgatgatggaatcgatctcatcaaatgtcaggttcagtttgttgccatactctgccgcccaacaaccggtacattttaagttgcaggcagaagtcggatccaaaaggatcgcccatgggatattgcagttatatttcttgcgcatttcctcctgggtctgccagccgataaagttggcattgaggaagaaattctcaaacatggctttgacgacctcggtatcagtatcctttaatacacgcatcatcaactgattcatgttattgtccggatcgtcgatgacccgacgaaatgcctctctttgctttcccatcatattcggatcatcgcctgcaaactgatcgacgatgtcgagtaatttgacaagattcttttccggatctttttcaatatatccgaatgcttttttcagtccaaattgaactaatttacttgatctgttcatatgaaacaccagccatttccttaaattttttattactataacgctggtcgttccctcataaaacagacaaaatgcccagatgtctaaaattttgacaccaaggcacatttgtagtaattttatacatttttgtcctggaaggtgaccagggtactctgtaaactaccctccataaaatggacataatcactcaggcgcaccgtttcttcatccggcatgccctcatccagccaatccaaaaagaaattgacgatcatgcgcgtatagacatgttcgatgaattcggccttgccctccgccaaagtctctgcctcctcataggtcaggatcagtttgtggatggcgggcagcatctgccggtaaataaactgctcataataaagacggttctgcgaatcgtaggcatgtaagacctgctgtccacgaaaacggaaaaagacgaacaactgctgcagctgctctttccagtctgcatccgtcttgtcataacgctctaagaatttctttaactcattatccagcgtccactccatcagatcataaatatctgcgaaatgatagtaaaatgtctgccggttgataccgcatttttctgccagatccttaaccgtgatatggtcgatcgtgtgctcctgtaacaattccataaaagtatctgcaatggcagcctttgtaaactctttcatgtatgtatccctcacatttttttataaaggaaaagaaaaaagcggccccgggatagtcccgaggctgctctctaaggtctgggcaaacttatttgctcatttcctgctcctgcttcatgatcatcttcttgaccatttcaccaccgatagaacctgcctgctttgatgtcaactcaccgttgtaaccatccttaagtggcacgccaatctcgctggcaacctcctgcttaaaacgattcatggcatcctttgcttcaggaactgccattctgttagaatttgagtttgaagatccgctcatgttcattacctccagatttattttaagacaaatcttctgacaccggatcttgtctgatgtcttctgtagaagatttatctaatgctagtatgaacataatacgggaaaatatagttggaaattattagtatctcttatgcaccataactgtagataaacttttcgccaagagcaactgccgtctcatggtctgaaaaatattctacgatggctagtgcaaattcgatcgctgttcccatgccgcggctggtgatgatattgccatcccgcacaacggcatctgtcttgtaattgcagcccggcatcttttctgcaaagcccggatatgaagttgcatccctgccctccaaaagtccgatctgtcccaagacgctcggtgcagcgcagatcgctgcgatcagttttccttctgcatcaaataatttaagggcatctgtcaccgccggacttgctgccagattcggtgtgcccgggatcccgcccggcaaaacgatcccatcataatctgcccagttcaactctgagatcaacttatctgcacaaaaggcaatattgtgtgatcctgtcacataaggatcaccggaaatggatacggtatcaatatccattcccccacggcgcaatacgtctaccacggtaagtccttcgatctcttcacagccgtctgccatacaaattgctactttactcatatcttttcctcatttctttcttttgttttcttccttctttccatggactcccgcctgcgctataatataagaaaaagcgctaaaggagaatcgcatggaaatcgaacgtaaatttttgatcaaagatctgccaaaggatctgacctcttatccctgcagtcagatcgaac

SEQ ID NO: 12540 - DNA, 2033 bp, Unknown
  gut microbiota DNA sequence
aggcttatttaaatgaaaatcctgtacttcgcatccgcaggaaggatgatgattatatccttacctacaagtccaaagggatgatggcaagggaggaaagtgaattcccgcttaccaaggaagcctatgaacatctgcgcaccaaagccgatggtaagattatcagcaagacccggtattttatcccgcttgcgcctcacaccatcgaacttgatgtctttcagggcgatatggaaccgctcatcatggcggaggtggaatttgcctccatcgaggaagccaatgtcttcctgccaccggactggttcggtcaggatgtcaccatggatcgccgttatcataatgtaaatatggctctctaccaatagtttatctggcgcggttcaattcataccgcgcctttgttctaaggcaggcttccagttgcaggatacggtcttccagccgcccatcctcaatgatctcatctatggatgccgccatctgattgatcagatgatcgtccagttcctcctccatctcggtcacgatatcatattttctgccataggtatctgcatctaaaaaatccagaaaatgcgggttgacaccctgtaattctgcgtcaacttccggctcttttgccacaggtctttccggctgtcctgccgcttttttcgcaagcactttctgatcctgtgtcatggcttttgtactgtcgcccgcggatgccatatcttccggctggcatatggtctctgccggggatgctatataggcaaaacgatattcctgctctacctccgggtacttttcatggtctaccggactaatgaacatatcgtatggtcggacataagtctggtaatctccatacaaagcctgataaacgacatataattctctggtctccgaatgtcttgccacggcaagaatctgatatgtcttatttttaaaatgccggtagatctctcccggcatgggtctgccctgcggcataaacttcaccctctatcctatcttattttacaaaggtattggtctcataaatgcattttgccaaatcctttgtcgcaaaatctaccactacaataccataagatgtccctgcctgccagtcataggataagagataatcgttgatggtcgtggcatatttctttggatgtcctaccttaccgctgccactggtcgaggtaaagttaatggaaaaggtatcatccgccgcctgacaattttccaggtcatccacaatggcatccagtttgtcggacgtgtcataattatagcggtcctgcacccacaaagaggcactgtcactaatggcagagagtgcatacggcacatccacgatctcccggtctccctggtcttcccagtaaaaatgcagtccgctcttttgctgaccaagttccatggcatcctcaaaacgtgttgccaaaacgatcttgccccgtacctgctccagagtcggaatctcgttggcaagataccacatttgtgggttctgatcgatctgttcatacaaaagtttttgtacctgtgccacatcatccttgctgttttccgccttcatacaaagaatgaccgtctcggacggatgttcctgcaaaaaggcatagacatccgataagacattggacagtttgagtgcttttgcaaaaagtccgccgccctctttgcactttgcaaaattgtgcttcaagatcagtgtctgctcatcttccttgccgtctaagaccagacgcatgtcaaaatagcggtagccatcgaccaactgctgtgcgatgctggtgtcctgacattgaaagatatagcgcatgcctacatactgtgtcgcgctgtcatgcgtgcccggaatggagatcgaactcagcatcgtttccccatcaatgtctgccatccaatcctctgcatgatcttctgccgcctgcacgcttgatccatccataccggcaaataccgatagcgacaagaccagtgccagagccactgctccccattttctgaaaaatcccctcatattaaaaacctcctgttataagcacttcccc

SEQ ID NO: 12541 - DNA, 27248 bp, Unknown
  gut microbiota DNA sequence
agagcggttgatcccggcttcctcaataatctgagccacagtgattttttcaaaacggttcttttccagcagaagtaagagagcattggtaatatcccggtcggtgcgctcaaattgtttgattcttttcatatgattctcctatcttatatctataaaaaccatacatcctgattggtggttgaaatagcagttgcaccggcatcgataagtgcgtagacgtcttccttttcactgatcagaccgctggagatcagcggctggtggttcattttatggatgcggcggacgacacttggcattggcccgggcaagacctctataacgtcaggctttgtgttttttaattgtttctcaatgctgtcatatgccatggaatcaataaaaaagaaacgcataatggtacacaagcccaaatccttggctctggaaatcaggggggctttcgtggaaatgatgccgtcagctttggtaaatttggagatatagtcaacggctgcttctttggaactcagcccctgaatcagatccatgtgtacaaatgccagtttgccactgccttttaccttttctacgatggaagggatggtaatgatatcgccgtaaagaatgaagatgatctggctgtcacagtccagacagcgggtaagtcctgcatcatctttgatggctgcaatgatgggagagtcctccaatgcctctttaaattcctttttcatgtgaatactccttgtaaaatcaacctactattgtcataattgtagcacaaaacaagtagaaaagcattataacctgtctggacaaagacaaataagtgcatcctccatatcctgtggcagagctgcggtaaaggtcataggttcctttgtgatcggatgaataaaggacatgcgataggaatggagtgcctgccgcctcatatagcgcatatcgggattgtagagataatcgccgatcagaggatacccgatgtatttcatatgtacgcggatctggtgtgtgcgaccggtttccagttgcagggagactagggcgtgatcgtttagtgccttttcgactttataatgggtgatggcacgatcgccacacgaaaaatcgacctttcttgcaaggatggttccgtctacccgggcaaggggagcatcaatggtgccggtggtgggatccgggatgccactgcaaatggcaagatattcccgtcgcacctccttttttgccacagcatcggacaggatactggatgctactaaatgctttgcaacgatggtaagaccggatgtgtcgcgatccagacggttggtgcatcggaaaataaaaggcttgccctgtttctcatagtaatatgccaaagcgtttgcaagtgaattctcgtaatttgccatggaaggatgaatgggcatgccggctgccttgttgagaacaatgatatcctcatcctcatagataatatccagtggcaggtctacgggagggatcttttcagaagaagcctcctcattgatctggacgcgcaagtggtcgccggcatggaccttgtccttcatatagacaaattgaccgttgagcaggatgttttgaggcatgcgcttgatgagtgtcagattctgaccggagaagccctgccgccttaaaaattgctcgatgcgtataccttcatctgctcttgtgatctgatagtcaatcgttcgtttcatgtatctatgcctgccctaaatttttcaatgcctttttgaattggacggtaaagaggatgatcgtaaaggtgacggctaagatgtcagcaatcggttccgcagtgtaaacagccctggtcttgtcggcaagaaaatgtggcagaatgtaaatgagcgggatcaggagcacaaatttacgcatgatagcaacaatgatggagcagactgcattgccggtggaaacaaaggtcatctggcaggcgatctggatacccatcataaagagtgcaccacagtaaatgcgcagagccttagcggagaaggctaaaaggctggcatcgtttgtaaacataccggcaaaaatctgcggaaatgcctgcacgcagatccagaggatgacagagtaggtcaggctggtgatcagcaggagttggaaactctttttgacacgggcactgttcttggcaccgaaattgtaactggtgatcggctgggcaccctgtgcgacaccctgcaatggcagcatggcaaactgcatgacactggtcaggatggtcatggcaccgactgcaacgtcaccgccgtatttgagcagagaagagttaaagcacatggatatgatactctctgtagactgcatgataaaggcagaaagccctaaggcaacacaagccggcatgaggggaagtccgctgcgcaagtttgccttgcggatacgcagtaaggtctttttaccgagcagaaaataaatgcaccagatacaggagcatgcctgggaaagaatggtagcaagggcagcaccgcgaacacccatatgcagggcaaaaataaagatcggatccaatatgatattgatgacggcaccgatcaggacagtcatcatgccgtctttggcaaagccctgtgctgtgataaaggcatttaagcccagagtcatctggacaaagatagtgccgagcgcataaaggctcatataagaagtcgcataagaaatcgtgttctcgctggctccaaagagtaggagaagatcacggttccagatgaggatgacgatggtaagtgccagtgagatcatgatctgtagtgtaacacaaccgccgaggatcttttctgcagattcgtgatcgccctttcccatagcgatggatgcacgcggtgcagcaccggcagagacaaggcatgcaaaggcagatacgatcatgatgataggcatgcagacacctacgccggtcagggcaaggctaccttcacccgggatgtgaccgatataaatgcggtcaacgatgttgtagagcatatttaccaactgggcaatgacggttgggatagccagtttaaataacaatttaccgataggctcggttcctaaaaattctttatcctgattcatagtgtttatcctttcctgtataaatccataaacgcataaatcttattatagcatagatacacaggacgacacctacattttttaccggatttggacagtatttagataaaaaaaggagaagccgtcccccaacggcttctcttttatctcccttattaaaaccccttacattttactccgtatcttctcaaaaaagacttcttactttacgtctacattctttgtcgctacgacatcaacacctgtgtcacagacattggcaagaacaacatcaccaatggcaaccggtgcaggaacaacaacattttccagagccttgcagatatcaaagatcatgccttttggaatatcttctttggtcttgcaggaaaccatgttgatcttaccacctttgacgcggacagaagatgttacgattctggtaggattcgtacattcttttctggcatatttatcgccgtttggacaagtgtttccggtcacttctgtaacttgaccattttctaatgtaaccttaaggctgcatcccataggacagccgatacaaatcaattctcttgtttccatccttatgcctcctcaatcttgattgtaatgttctcaatgtcagggtactctgccaactgtgatttcttcagaacaacctgctccatttcacccggtgccataaccggacgttttctcttggagatcaaggtatctccaaagtaggtagcgatcgcgcagcccttgaagacctgacctacacggaaacgaaccgttaaagtgtcatccattacttccggacgtacatattttggaacggtatagcggacaccgtcaaccggcaggatctcgatctgctttgcagaagtaacttcgccttccttgatgtattttgcagcattctttccggcattgcttgcttcctgtgaaacaaagtcaaccagatcatgtacatgaagtacgttaccacaggcgaatacgcccgggatgttggtctctaaactgtcatttacaacaggaccggaagtgataggactgaggtctacacctgcggtcttggaaagttcgttttccggtaaaagtccacaagacagaagcagggtatcgcaatcgtagtggatctctgtgccagggatcggcttgcggtccggtccgacctcggcgatggtaatgccttctacacgttctttaccctgaatgtcaacaacggtgtgagataagtaaagcggaatatcgaagtcatttaagcactgtacgatatttctcttcagaccaccggaataaggcatcagttcggcaacagcgagaacctttgctccctctaaagtcatacgacgtgccatgatcagaccgatatcaccggagcctaagatgacaacgcggcggccaggcatatagccttcgatattaacaagacgctgggcggtacctgctgagaaaatacctgccggacgatagcccgggatattgagcgcaccacgggaacgctcgcggcatcccatagcaagtacaacagcctttgcctctacggtaaacataccatcggtagaattcatggcggtaacaaccttgtcatttgagatatccatgaccatggtgttcaacttgtactcgatgccacgttcctctacctgggcaatgaaacgtgatgcgtactccggaccggtcaactcttctttaaaagtgtgaagaccgaaaccattatggatacactggtttaagataccacctaattcacgatctctttcaataattaaaatactgtcaattccattatcttttgcagcgatagcagcagcaagacctgcaggaccaccaccaacaatgactaaatcatatttcattttcgtgctcctccttatatcttcttgttgtaaccaaatacgatcttggcatctttaccattcttagttacatcaaacatgctcattggaacttcgcgctccaaaatctccattgttttcggtgagcagaagcctgcctgacaacgtcccatgccggctcttgttctacgctttacagcgtctaaggatctggcacctaaggttctgtggatcgcatctaagatctcaccttctgtgatcatttcgcagcggcagatgatgtttccgtatgccggctgctttttgatgagttcatttctttcttcgatagaaagggttgccggattgaggatgcccttgcggtgtccgttgaaagaaggattcttttctaatcccaacttttctgcaacctgtgtggctaccatttcgccgatggctggtgcggaagaaagaccaggagactcaataccggctgcgttgaagaagccttctgcatcttctgcttcgccaataacgaaatcaccgccaatttcatgagcacgaagtccggcaaaggatgtgatgacctgacggagagggacgttcttgacagactgtgcactggttgctcccaaagaaccaagtccttctgctgtcgtgttgataccttctttattgtctacatcttctgcggtaggtccgactaaaaggttgccgtgtacggtaggtgtaaccaggacacccttgcccatcttgctaggcaactggaagatggtgtggctgacatggttgcctgcgctcttgtcaagcagcatgtactgaccgcggcgggcgatgatctgtaacttgtgttcgcttaccatattgttgaatttgtcagcgtaaacaccggctgcgttgacaacgaccttagcctcgatcgtgtctttgtcggtcttgatcaggtaatgatcatcagactttgtgatgtctgttacttctgtatttaggaaaaattctacgccgttgtcggctgcattttctgcaaatgccatggtcagatggaacggacaaacaatggcaccggtaggagcgaaaagtgctttgacaacatcatcagcaagatttggctccatctggatgagttcgtcacggtctaagatgcgaagatccggaacaccgtttttctttcctttttctaataattcgtcaagaagagctggatcctgatccttggtacaaacaacgagagaaccgtttctcttaaatgggaaatccagatccttggacaactgatccatcatctcgtttcctctgacattgagttttgcctttaaggttcccggggtagcatcaaaacctgcgtgaacgatagcactattggcttttgatgttccgttgcaaacgtcttcgtctctttcaatgacacatgcgtttactttgtacttggataattctcttgcgatggcactgccgactacgccagcaccaacaattgctacatcatacatatgtaacgactcctttctttgcataaaaaaagcaagataaataaagcgaattctattcgcctatctaccttgctctcatctctggtaatttatttattttgtgatatgattatagcacgtaaaaatggcggctacaatacccaaatggaaaaaaatgggtcatatctaaaagttatttttttaacgaggtgtcagatggcaaatgtaggaaatcagaagcaaaaacttctttatataatggagatttttctgcgggagacggatgaggaacatccgatcacggcggcgcagatcattgagaaattagaggcaagggagatcgtggcagagcggaaaagtatttatcgcgatatccgtgccttacaggattatgggatggatattgaaaaagccccggagcagaatggcttttatctggcggagcggacctttgaactggcagaattaaaactgctggtagatgcggtggcggcgtcaaagttcatcacagagaaaaagtcgcgcgaactggtgcaaaagatcgaacatctgggaagcgcctatcagggcagacaccttcaccgtcaggtcgttgtgtcggatcgtgtcaaaatggcaaacgagcgtatctactacacgatcgacgagatctatcagtgtattgataacaaccataaaatgacctttcagtatctggaatggaatgataaaaaagaacagactctgcgccatggaggaaaatggtatgaggtcagcccggcttttttgctgtgggacaatgaatattattatcttgtggcatgggatgaggaggcatctgcggtacgtcattaccgtgcagacaagatcctgggcgcaaaagagatggaagataaacgcagcaaagaagtcctggcgatcgaagaccagaaagcagactatgccaagaagcgttttagtatgtttgccggagcagcggagatcgtgaccctgcgtgcgccaaaatacatggcaggcgttatgatcgaccgctttggcacagaggtaaggatgcgcagagaggacgaggatatcctggtgcgtaccgaggtggaggtcagtccgcagtttttcggctggatcacaggtctgggaccgggggttcagattctgggaccggagacagtgcgcaggtcttatcaggagcatctggaacaaattctttctgcttataaataagttatcctttacatcaatacttgcttatgatactcttttaacatattagcacgctaaagtatataggctgctaggaataagtataggaagaaagaggacgcaggtatgaagatgaaaaaggttatggcaggacttttggcaggtttgatggcattttctatggtggcatgtggcaataagtctgcaagtgcagaaaaaacagatgcaaaggacaccaacaatgatggaaagtttgttgtcggttttgatcaggatttcccgccttttggatatgtaggcgatgacggcgaatatacaggttttgatctggaactggcagcggagtgcgcaaagcgtatgggacaggagatcgtttaccagccgatcgattgggacgccaaggatatggaactggagtcgggaacgatcgactgcatctggaatggctttaccatggatggacgtgaggacaaatacacatggacagatccttatatggataattcacaggttgtcgttgtccgcaaggactccggtatttccggtctggatgatctggcaggcaagatcgtggaagtgcaaaaagagtccagcgcacagtcagccctggaagaaaatacagacttgtccggttcctttgcacaacttttgacagtgggcgagtataatacagccattatggatctggaaagtggggcagtggatgcgatcgccatggatatttttgttgccaaggatcagttggcagacaaaggagacgaacttgtgatcctggatgagcagatctcatctgaaaaatatgcggttggatttttgaagggcaatacagagttgcgcgaccaggtgcaaaagactctggaagaaatggtcgcagacggcacttttgccgagatctccaagaaatggtttgactccgatgtttgtattttgaaataatcaggtgatgaaatgagtttacagttgatactattgcagttgtcagagggcatgttatcgaccatctggatcttcgtgctgacactgcttttttcccttcctttggggcttgtgatcgcgtttggacggatgtcacgcaatgtcatcctgcgcaatattacaaggatctacatatcgatcatgcgagggacaccgctgatgctgcaacttctggtggtctattttggaccctactatatctttggcatcagtatctcgtcctcctaccgggcgtatgcggtcatcattgcatttgccctaaattatgcagcctattttgcggagatctaccgcagtggcattgcctctatgccaaaaggtcagtacgaggctgccaaggtgctgggctatagcaggacgcagaccttttttaccatcatcctgccacaggtgatcaagcgcatcctgccatctgtgaccaatgaagtgatcaccttggtaaaggatacgtcactggcattttccattgcctatgcggaaatgtttacgcaggcaaaggcactggcggcatcgcaaaagagcatggtgccgtttgtggctgcagccgttttttattacattttcaattttgttgtggcggcgatcatggaattcttcgagaagaagatggcatattaccaataggataggaaggatatctggatgaatatattagaattaaaacacgcaaaaaagtcttttgacggcgtggaagttttaaaagacattgatctgtcggtatccgagggacaggtggtttctatcataggaccttccggttccggcaaatccaccctgcttcgctgtgcgacttttctggagacgctggacgacggtagtctgtcttatcaggggcaggaagtcgtgcactcagaaaatggcagggcggtctatgggaacaaggcacagatcaaacaggcaatgggaagttttgggttggttttccagaatttcaacctttttccgcatttttcggtcttaaaaaatatcacggatgcaccgatccgtgtgcaaaagcgtccaaaagagcaggtggaggcagaggcacggaaactgctgaaaaagatggggcttgcggatcgtgcagatgcatatccctgccagttgtccggcgggcagcaacagcgcgtttccattgcgcgtgcgctggcactcaaaccggcgatcctcttttttgatgaaccgaccagtgcactggatccggaactgacgctggagatcttaaaagtcatcaaggaattggcggcggagaagatgactatggtcattgtgacacatgagatgaatttcgccaaagatgtctctgaccggatgatctttatggataagggacttatcgttgaggaaacgacaccggaattactctttaaatcggaaaatcaaaggacgagggaatttttgggaaaatatcacgatctatcataatagggcaaaacaaacaggctgcatcacaaccggatgcagcctgaattacttgttccaaccttatatatgcgcctctggatcaaactacttgggctgcttttggtagtgatgcaggatcagtttgatctcatcctttagaatgtcctgtccctccggtgaaagattgccgcaagcctgcaagatggcaacggcatcatcagacaggtccggcatagaattttgtggtggtgtgtaaccgagcagatagtcgcaggtcgtgttgaaataggctgccatacgcataagaatatcataacttggctgacgtttgcccgaaagatatccgctgaaagttgacggatggatatgtagcgattcacaaacctgttttttactggtattttgcagttccatgagattggtgatacgttcccctaaaagcattgatgacataagtgcctctcctatcatttatcattagtaactaaataaatgatagaacaggagaatttgaatttgcccggatttcacataacgcataaggggaacgcaaaacgccacgagcgatttagatatatcctccatccatggaaatgacctgcccggtcagataggtcggcatctttatcacttgcagtacagcctcggcgacttcttccggctgggcaaagcggccggctggaatttctgcctccagggcggtacgttcttctacgcttaggaagccgttcatgtcggtatcgatgacaccgcaggcaatggcattgacggcgatccgggatggcgccagttcttttgccagagcctttgtaaaagcatggataccacccttggaagcggagtaagcgatttcacaggaagccccgacattgccccacatggaagaaatatttatgatccgaccgctctgtttctgcaccatggcgggtacaaatgccttggcagtgtagaagcaggaggacagattgacggacaggatctgatcccattcctcgaccgacatatcggtcaggagtccgatatgggagatacctgcattattgacaagtacatcgatctgcgaaaaatgagcaagcatttcctcagcaagagcctttacaaaagagggatcaccgacatccccggtaaaggtcaggacttcgatatgatagacgaagcgcagatcctccgccagatcttccagcatcttttgatttttccggcagaccagtcccagatgatagccctctttggcaaggcttgtggctatggcgcgtccgatcccgcgggaggcaccggatacaaatgcaactttatacatgatcgttctccttttgatactatctaaatttattttcactataacaaagagcggaataaagcgcaaatatggggctatgttgtaactaactgtatgaacaatttataaaataaattttatttttctgaaaactacttgtcctaaaaacgtaatatgttataattgaaccatgatattcacacggtatcaaatataatgtgaaaaggggatggacatcatgagaattacaatcacagggaaaaacattgaacttaccgatggactgaaggaggcagtgacagagagactctccaaactggagaaatattttgcaccggagactgaggcgcatgtgacattgagcgtagagaaggaacgccagaagatagaggtgaccataccggtcaagggcagcgttatccgtgcagagcaggttagcaatgatatgtacgtttccattgaggttgttgtggagacgatcgaacgccagttaaagaaataccgtaacaagatcgtgacaaagcagcagagtgctgagaagttctttgcacaggaatatctggaaaaagatacggatgacgatgatgagatccgtatcatcagaaccaaaagatttggtattaagccaatgtatccggaagatgcctgcgtgcagatggaattattgggacatgacttctttgtattcttgaacgcagagacagaggaagtaaatgttgtttataagagaaagggcaatacatatggcttgatcgaaccggaattttaaaatcttgcgaatagtcgtctgcttttgcaaaatgccattaggtctgcagattcccgggatgctataatatccccatcagggggaggatgagcatatgaaagaacagtctatgggacggattctacgcaggatccgcatagaacaggggatgacacaggaagcattggtggagggtatttgtaccgccggttatttatcacgcgtagaaaatggaagccagattccgtccagacagatctatcagttattgatggagcgtctgggggagtctggctattcttatgcctattggcaggaagaggaggaaaaagagcagacctgccgcgaacttttgcacgctttacagacatggcagaaagagcatgtggatgagaaacttctgaaattacaaaaaatgaaaggggcacaggacatccgggagcgccaattctatggcatggcacatgtgatctggctttatatgaatgaagcgatcccacaggaagattacctgggctgctgccgcaccatctgggagagtgatgcgcagggaaaggccagaaggcgacaggggatggataagatagaatttgcggaaatgtcggaagtgcagctctggatcctcaacaatcttgccatcggacatatgtggcgtggggaataccgggaaagtgcatccatcttgctgcgtctttgccgctatgggcagaagtctgcagaggatgtgcgcttgtcctggagtgtgcgggcagcgctctgccataatatggcggtctgtctgctggagatggaaaagcccaaggaggctctgtatttttgcgatcaggcgattgccatcctgcaaaaggaaggcggactttcttccgtattatatgtgctccgcctgcagatggaagcctaccggatgctgcaggatatggatgcttattatcgggcgcagaccttgctgcatcacctgaactgtcatctggtcaaggaaaagggaagccgggcacagatcgaaaaaagactatgggatagaagaaccttgtttgtgattttttgaaatgctataatagggacatcattttaagaaagcaaggagttaagatatgaatatcgtagttttggcaggcggactgagtactgagagagatgtatcctttaaatcaggagatatggtttgcaaggctttgcggagtctgggacacagagttttgctgttggatgtatttctgggttaccatgatacagaggaagatattagtgatatttttgaacatacagaggaagcaagtgtggaggtgtcagatattccggatacggcaccggacatcgcggcggtcaaggcttccagagcagaccagtcagactgcttctttggaccgaatgtgatcgcgatctgccgtaaagcggatgtggtctttatggcattgcacggcgagaacggtgaaaatggtaaggtgcaggcagcctttgacctgtttggcatccgttatacgggaaatggctatttgagcagtgcgatcgctatggataagggaatttccaaagaattttttaagtcttacggtgttccttgtccacagggattttccctgagcgtggaggaggcagacgcaccgagacagccactggcttatccgtgtgtggtaaagccggcttgtggcggatcttccatcggtgtttctatcgtgcacaatgagacggagtacaaaaaggcattagcggatgcttttgtctgggaagatcaggttgtcatagaggattatatccaggggcgcgagttctctgtcggtgttatcgagggtaaggcactcccggtcattgagattgcaccgatccagggattttatgattataagaacaagtatgcagcaggcagtgcggtagagacctgtccggcagatttaccggcggatattacggcacagatgcagcgctatgccgaaatggtcgtggaagcactgggcttggagacctattcccgtatggactttttactcaatgagaaggatcagatcttctgtctggaggcaaatacactgccaggcatgacaccgaccagccttttaccgcaggaggcagccgttataggcgtagacttcccggcactctgtcagcagatcattgatatctcgctcaagagatttgaaaagtagaggtagacatagcatgagaaatatgacattagaaaagattgcacaggcattgggcggcaggctttacggcgcagagggatctgatctatccgatcgagaggtgcaaggcgttgtcattgataaccgtcaggtcgagaaagattatctctttataccgatccgtggggagcgtgtggatggacattcctttattggggatgcctttgccaagggggtgcttggcgtcttatcagaccatgtcttagaagatgcagcaggaccttatattgtagtaaaagataccgagcaggcactgaaagatctggcggcatattaccgggaacagatcgatgcctatgtcattggcattatcggcagtgtgggcaagaccagtaccaaggaaatggttgcttccgtcttaggacagcacttttcggtcttaaagacccagggcaattttaataacgagatcggtctaccgctgaccctcttttgtatccgtccatcccatcaggttgcagtcgttgagatgggaatttccgattttggcgagatggatcgattgggtgccatggcaagaccggatatggtcattatgaccaatatcggacagtgccatctggaaaatctgaaaaccagggatggtatcctcaaggcaaagacagaagtttttgcccatatgccggcaagcgggcgagtcattttaaatggggatgacgacaaattgcagcaggcagataccttgggcatggagaagcatttctttggtttgcaggggcaggagttttttggatctgcgatcgcaggacatgtggatcatgtggatgccttgcttcatacaccgcagtgggaacatgctgtcagcattccaatcccgggagagcacaatgtctataatgcactggcggcgaccgcagcaggcacacttctgggcttgtccgagcaggagatccttgcggggatagagcaggtggagaccatagccggacgcaaccactttatcgaggcacatggcatgactgtgatcgatgactgctacaatgccaacccggtgtccatgcgcgcttccttagaggtgctgggacatgcggcaggacgcaaggtcgctatcttaggcgacatgggagaactcggtgagaaccaagagatgctccattatcaggtagggcaggttgttgtggaaaatggcattgacctgcttttgacagcaggaaaacttgctggacagattgtacgctatgtgcaggaacatggagacaaaacgcaggcgatcgcctatgctgacaaggaagccctcttggcagacctggatcagcacataaaaaaaggagacaccattttgatcaaggcgtctcactttatgaactttacggaaatcgtaaaagtaattacagaataagatctttatcttcagaaagcatatctgcgataacactttgtgtgtaagcgccgatgtgctttttttgatccgcttctaactgatccggatagatcggcttgccatagtgaaagacaacggtcgtctttttgacaaatggcatatggttgcgcaggatctcatcggtgcctgtgatggcaaccgggataatggcacaaccggtcttggtggagatcttgaaagtaccctccttgaaaggtgccatctgaccggttttggtacgcgttccctccgggaatacaaagatggagataccacgcttgatatcatcgatggctgcgaggatcacacgcataccgtctctgggattggtacgatccagaaaaaggcagtgaagcctgcgcatccatacgcgcaggagtgggattttctcaagattatccttggcgataaatccggtcagccccggacagtgtgtataaccgatcacgacatcaaagatgctacggtggttgccaacatagacgacggcttcctcggcagggatattttctgcgcccttgacgatgacatcagtgccgcagatgccgatgatcgtggaaaaggcccactgcacaatgcgcagactgctcaactcggctccttttttattgatcttgccataaagccattcgatgccaagcacaggaatgccaacgactaaaaagagaaaggcaaataataatgccataatggctcgtaacatagtaaccaccctccgtgtcaaaaactttttcttaatcataaatcatatattccaaaattacaatcttcatattcaaaaagtcaccgcatataatttgaaaaaaaccatggggtaatttatgaagcgaagatgcttactcattttttgctgcctttgtctcttgctgatggcaagcggatgcagtttacagaccaaggaaaagaaactgcgagatgtggaatatacggttctgggaaccgaccatatcccacaggaattgcgggaaaagatcgatcaggtcaagacggaggaatttcaactgacctatgatgacggacagtatctgtatctggcgaaggggtatggtacgcgcgagagcagcggttataatatcagcgtaaaagatttatatctgacggaacataccattgtctttgaaacgcagatcagcggcccgacggaaggggaggatgtcagccggagggaaacaacgccgtatatcgtggtaaagacggagatcttagacggtcaggtggtctttccataagagggcaaagttatttgtaaagataaatcgttcgtgataagataagggcaatagagggagacgtacaagggaggataagggatgacaagagaagaaacaaaagcagccgtgaaggcgttactgatctcggatgaggattttgcagcaagactggaagatacgatcaagccatgggtggcagaacatctgcaagaggaatactttaccagttttgatggtacgcgcatacatacgcattatgccatccatccaaaggaaaaggcatccatcgtgatctcacatggattttgtgaattcgcagggaaatttcacgaggtcatgtattatatgtatgaaatgggctattccgtctttttcatcgagcaccggggacatggattttcagaccgtgcggactgcatccatgagtgggatcgcgtctatgtcaaggactatggggaatatgtgcaggacatgcatgaatttatggaacaggtggtaaaaaagcacagcctgacacataagtattatctgtatgcacattccatgggcggtgccattggaaccctgtttttggaaaaatacccggaggtctttgagagggcagtattgtccagcccaatgttacaggtgaatttcggcaaaaacccgacctggctggtcaaggtgctgatggtgctttccaagatcctgcgctgggacttaaaatatgtgccgggccaaaagggctttgaccatgtatatgtgttcgcaaccagcagttcgacttcggaaccgcgctatgcctatattttcaaccagcgtgagcaagtgccgcaatatacgagttatggcggtacctatgcctggaccagggcatccatcaaggcgaccaagcagatcgcacgggatgcaggaaaggtacagatcccggtattactctgtcaggcaggcagggacaccatggtaagagcggaaggacaggagtattttgcaaaaaatagcggaaatacccggatcgtgcgttttccggactccaagcatgaactttttacggcgacctatgacatcatgttaccgtattacgaggaagtctttgacttttacgctgagaagtgatataataccacagatgcgtttcgcaagacgagaccatgttaggaggtacattgttcatggaacattcagattttgataaagtacgcgcttctgttaagcagcagtgtggcaacaaggtcgtgattcagctggataagggacgcaacaaggtagacattcaggaaggcattattcaggaagcctatccaagcgtgtttacgatcctgacagatgataccgaggagaagccttctcagttgttatctttcagttatacggacatcattacaaaagagattcgcatgaagttatgttaatttcataagagcagggaaccgggcagatatgtccggttcttttttatcaataagaaaataatcatatccgtctgttttgtctcatatcttatatacaaatacgaaaaatggtgggaatggtatggagttagagacaaaggtaatacataaaaataaaatgccaatcgaggtcatgtcgcagttgatcgcagaggaggattacaatctgccggagtataagccggacatcaagtatgtgatcaagagccatggaaatatcgtggtagaggaggtcgtgccggaggaggaatatgtcagcgtcaaaggcaagatgcagtttgccattttgtatcagggagaaggtggggagagcctggtagaccaggtaaacggatccatctcttttacggagcgcctgcatgtcgagggggctatgcggtcggaaaacgtgaccgtgagaacacagatggaagatctgggcgtggttgtgatcaattcacgcaagttgtctctgcggggactggcaaatgtgactgtctgcatctgcgagggcgtggaactggaactgccgctttattgtgagtgtccggcagagtaccaggtgcaaaaagaagaaagacgtatcttaaaatacgtggaaggacggggcgatcgtctgcgctttaaacaggaagtgaccctgcccaaggaaaaaccggatatccatatgcttttgtggcaggatgtccgtttggagcagatgagcatacgacagaataatgagggggtggagatcgccggtatgttatatctttttgccctgtatgagacagggcaggaggaaaagtatgcctggtatgagaccagcctgccggtctctgcgcagatggagtgtgacattccgctgacggatggcttctttctggtaaaacaggtgcggacccagaccatgctggaaccgagagaggatctggacggtgaactgcgcaatctggcggcagagtgcagtatggaggtggaactctttatctggcaggaggaggagatcgcccttttacaggatgcctattgtatggcgagagagttacatgtgcaccggcatgaggaagaactctggcaggtggcaatgaaaaatgaggcacttttcacagccgaggggcggcagacgatcagcgccggaaaggaagttctttatctgtgtgatacgcagagccaggtgcatttgcaggaagtgcatctgcaagaaggcaacattgcaatcaagggagtctgtgaggtggaagtcctatatgcgacagcaggcgagacccagccttttgccaatgagcgcatgacgatcccttttgccggagagatcgaagccggaaatgtccgtgagggagattatatagatgctgaggcacgggtttaccgcacccagtcttccatggctgatgccatggcactgcaatgccgggtggagatccaggtgaccatcatggcgtttgagcgcaaccacttgcagatcccggatgatctggtggaagaacctctggatctggaaaaattacagaaagagccgggcatgatcggttatgtcgtgcaggagggggatgatctgtggtcgatcgccaaacattttcacacgaccagacaggaattgatggaaaccaacgatctgacgcaggagaccttgcagaaaggacaaaaactgctggtgatgaaacatatttatctgatgtcttaagatggttttctagtattttccggttgcaaatgcttgcgcttttttctattataatataaggaacactgcgtctgtaaaagaagggaaagaggcgcaagcataagaacaaatgaggtgcacatgaaaaaaattactttacataaagggggacggggagtgctggcggtatgtctggcaggatccatgcttttcacacgtccaatgcaggtgagcgctgtccgcagtatctccgagatcgaggaagagcaaagcagtatccagtcagaattgaacggactggatgcagacatggtttccctggttacagacatgaccaatctggaatcccagatcaccagcaaaacacaggagatcgcagatgccgaggctacccttgccgaggcgcaggcagccgtagatcagcaatatgcttccatgaaagtccgtatccagtatatgtacgagaacagtgacgaaaatatcatgacggttcttctggagtccggcagtatttcggactttttgaaccgtctggaaaatatcaatgcggtctatacctatgaccgtacggtccttggaaactatcaggcggcaaaggatgaggtggaagatcttaaggcttctctggaggaagaaaaggcttccttagaggcaaataagacacaacttgccaaccagcaggcacagttaaatgccatgatctcagagaagcagggagagatggcagacatcaagtcagaacttgccgatgccaaggctctggcagccagacaggcagaactggaacgccagcgtcagttggcggcactgaccaacaataccaacagctccaataatggaggcagtggaaatacgggaggcaatacagggggcagcaccaacagcggcggcaatctgaatccgtcaaatacaacgggtgtcagcggaagcgccgtggtagcctttgccaatcagtatgtcggttatccttatgtatggggcggaacagacccgaatacaggggcagactgtagtggatttgtatattatgttctcaaaaatttcggtatcaattacggacgtctgacctcttacggatggcgtagtgtcggacaagaagtcagtgtcaacaatatgcagccgggagacattgtatgttatgcaggacatgtggcgatctatgccggcggcggtcgtatcgttgaggcacagagtacctctgccggtatcaccaataaccggtctgtctattgccataatatcattaccgttcgacgtgtgttataatacaaaggcaggatatggggagaaaggcgcataagatgaaacggatgtcgagaaatattatcattgcgatcattatagtggctgtcatctgcggtctggtatattcctggcagagccgtcagcagttggactatcgggattgtctggaagaaacggcatttacggtagacggtcaggcggtgcagatgaaatggctgggattttatgttgtctatgaggagcgcgaggtagaaaagcaggcgcagatctatcatgccgacaatacagccgattactggaatctccatgtggatggtcattttatccggcaggatgccaaggacacgatcatgcagatggcgatccatgattatatttattatcagaaggcacaggaagaagggatgacgttggatgcctccgaacaacgcagtctggagaatacgatctcggatttctggatggatcttttagatgatcaggtggacaaccttccggtgacagatgagtatatcgtcgagactatgcaaaggattgcgctggcagaaaaatatcaggcagccctggctgcaaaaaaagacaggtcatacacctcttattcctggaatggcggctactataagaaatggctggcaaaacaggatgtagagatcaatgataagatatgggaccgtgtgtcggttgggaatatcaccttaaaacacgacaaagtaaattatgtaaacggtcaggatgaaaaggatagtgatgaaaatgaaaatcggaagaaatgatccatgctggtgtggaagcggaagaaagtacaaacagtgtcatgaggcgttcgatcacaagatcgcgtcctttgagagagcgggacatatcgtgccaccgcatgagatcatcaagacaccggagcagatcgcggggatcaaggagagtgccaagatcaatattgcctgcttggatgaggtggcaaagcagatccatgccggtatgagtacacaggaaatcgatgatattgtctatcgcgtgacgacagagatgggaggcatcccggcacctttgaactatgaaggatttccaaagagtgtctgcacatccatcaatgatcaggtatgccatggcattccgtcggaggatgtgatcttacaggatggggatatcatcaatgtagattgttctactattttgaacggctatttttcagattcttcccgtatgtttatgatcggcgatgtcagtccggagaaacgcaaactggtcgaggttacaaaggagtgtgtggaactggggctaaaagagatcaaaccatggtcattcatgggagatgtcggagccgttgtttgtcagcatgcagcagaaaacggttataccgttgtgcgcgagatcggtggacatggttgtggtctggaattccatgaggaaccatggattggctatcatacaaagccgggaacggaaatgctgatcgtaccgggtatgacctttaccattgagcctatggtcaatgccggaacagagcgtatttatacggatcaggagaacggctgggaagtctacactttagacggagagccgtctgcacaatgggaatatcaggttgctgtgacagaagacggcgtggaggtgctttcttactagatgaacgagcgtattttgtttgtgcataccagagaactctgttattattccgggtcttactttttgcagcagatgcagaaagaggtcgcaaaactcggcatagaaagccaatattttagcctgggacaggatccttcctctttggaggggattctgggcaggcattatgatggggtagtggatatcaattccaaactaccctattttgtattggaggatgaccggcgttttttggacgttctgggtgcacctttttataattatattgtggatcatcccctctatcatcatccggggctgatttttcctttgaaagattatcatgccattgccattgatcattgccacaagtcttacatggaaaagtattatccgcatttgcagcatgtggcttttttaccgatcggggcgacgcagagcagacttgcagatgtcatcccttacgaaaaacggcagattccccttttatttctgggaacttatgaatcgaaagatggcatgctggaaaagttcagggctttgtgcaggaagacctttgcagacccaaagatccggcaggaattttatgatcttggcatggcgcttttggaagtcatgctggcgggcaaggaatcggcaaatggagagcgggtagagataccaatggaagaagccctggcgggcattgtggatcaggaaaaattgcaggcaggggcttatggcaccagggattttgcggttcttatgaattatctttacctgatcgataaatatgtgcgcaatgccagaagacacaaggtactttcttatgtggcagacctgaaagtgccgctgactcttgtcggggagggctgggaaaaagtgccgctggcagggcaggcacaggtaaggcttctaggggcgaagcggatcgaggagacctatgatctgctggcagatgccagacaggtgctggatgtcaatccgctttttgccgacggcgtgcacgatcgtgtgacctctgccatgataaacggctgtctgtgctgcagcgacatgtccgtgactgcggatcccgccatgggggacggcagacatttctgtcattacagtaactggaatctggatccgctgggttatgccctgaccggaatgccactggggcagcaggaagaaatggctgggcgggcaaagacctatgccgtagaccattattcttggcaggcacatgcaaagaaactcttagacctgatgcagatcagaccataaaggaaaacatacaaaaggcgggcaaccatacatctgtgatgggcacccgcctttagtaatgttctgttgtcgtattgtccaatggacgatacctctctttcttttcaattatctattgcactcgttaatatgtatctcctatctaacaagccctgtaattgcatatgcttctcaatttctaataattttattaaggactaagactgtccgcgcctgaaagtgctactaccttgttaaataagattctgatctataccaatcagagtggttaagataaggatgaaaattctggtggtctgtacctcctttgcttaaattttatcgctgatacgagaaacgttctattcgttgtgctcgttctttgtttgtgactatataatatctcataattatcatattgtcaataataaattagaaaatattaaaataaatattaagatgtcgcaatattcagaaaactacgagtgaaccataagaaggggattgcatatgatagattacggaggtggcatatggagcaaaaggagattgtggcagaagaaaaggtcatcgacaaaagtacaggagtaggtatcctgatcgtggaccaaaggcaggtctacatggcaaaattactggaagaaagaggctatcgtctgatcacatgggatctgcgcgaaggccagatgccgcggggcaaagatcctatctggtgcgcgggagtcctgatcctgccggtcccggtcagtcgtgtgcaggatttggcgcgtctggaacaatgcctgatcatgcacagatacgacatcaaaatgtgtattggcggggcatttccgcaggagttgaaagaacttctggatcaatatgagatcccatggatggatgttctgacggattctggggtggcgatgaagaatgcgatcgctacggcggaaggatgcattgctgaactcagccgtctcatgccggtcaatattgaagatgccaacattattgtcatgggctttggaaattgcggcaaaccgatcgcggagaaactttattgcatgggggcgcatgtttctgtggtggcacggagtgaaaaagccttatccatggcgcattactttggctttatggattatcccatggatgcagccattccatacacagaggcagatgccatcatcaatacgatcccggcacttgttatcacaaaaaaggagatcgatcttttacatgaggatgcggtcgtgttagacattgcatcagcgccgggaggatgtgacagtgcctattgcaaggaaaagcatgtgccttacaaactggcattgggactgccgggactgtattgccctaagaccagcgccatgatactgttagaagccatgccttttggctataagccggaccgggagaaatggaagtcataaatgagaggaagagaaatggatttttcaaaatacaccattggatttggtattacaggttctttttgtacgcatgagaagatcaaaaaagaaatacagaggctggtggatctgggggcgacggtcattcctgtcttttcctatcagacacagtccttggatacccgtttcggaaaggcggctgattttatgcaggaggtcgccgagatgaccggaaacaaggggctgcgtaccattacggaggcagaacccatcggacccaaaggacttttggatgtcatggtcattgcgccatgcacgggaaattccttggcaaaactggaggcggggatcacggatacgccggtgctcatggcggcaaaggcgcatttgcggaacgaccgtccgcttgtcatttccatctcgacaaatgatgccttggggatgaactttaaaaatatcggaaaactcatgtacatgaaaaatatatattttgtgcctttcggacaggatgattatgccaagaagccgtcctccatggtggcaaagaccaaatggctgccggagacgatcgaggaggcactgcggggaaggcagatccagccggtactgcgatgaaaaaatcccatcaggaaagattgacctgatgggatttgtctgttttaaaattatgaaggtaattgataggaaacctgatattcccgcagccagaagtcaatctgcagatagtaggcgagcagttgcggtcctgccataagttgaccgaaccaaggcttgccgtaatcttttggcgcattgcagaaggccaggaccttatccgggtcaatgaaatccaggatcggatgattgccctgtgcgatcagttttttcatttccttacacagcatctgttcatattccgggtgataattcttaggatatggactctttttccgctcggcgacctccttcggcaaaagtggggcggcgatctgacgcaagaggtgcttgacctcgccgtcctttgccttcatttcccacggcacattgtagagatattctgccagacggatgtctgcaaatgggcagatggcttccatgcccgccagcgcagcaacacgatccatgcggtctaggagtgtctgcatgaaatattgtgtcgtcagggcaaagagacggcggtggcggcggttctccggcgtatcatccggcaggtaagagacctgggaacaggaggcgtcatagacctgggcaacgtattcctccatgcccagatgctctaagaagtggtcgcgcaaaagcatctgtcttggctgcagatccatggtccagggaaatgtgttagcagaccgcatgggctccttatggtaccaagggtagccacagaagatctcgtccgcgcattccccggtgaaagccactttggagcgcggggcgatctgcttgcagaaatagagcagggaagaagaaatatcagccatgcagggaccatcgtgcgccaatactgactgtcccagaagggatgcctgcaccttggcgttacattctaaaaaggtgtggttggtatggaagtgctctgccatggcaatgacataaggacgatccagacttggctggaagtcattggcagaaaaatatttgctgctgtccgtaaagtcaaaggaataggtggtcagtggcacgccgctgttcatattttctcgattggcaagggcggtgactaccgaggagtccagaccgccggagagcaggcagcattgggaagcatcttcgttccactgacgatgcagggcttcggataagagatgggaagcatggtctacggtttcctcataggattcctcatggcggcttgcctgcaaatgccagaaggtattttcgatgatccgcccctggctgtagatgatggtctttccggggcggacttcatggatatcctgatagacggttgcacccggaaggtgtgcaggtcccagagaaaatacctgatgcataccgcgcagatccatgctggcatgcacgctcggatgggcaaagatgcccttgatctcggatgcaaacaaaaagagatctttctgctggtgataaaataaaggttttacccccatggggtctcggaagagga

SEQ ID NO: 12542 - DNA, 17855 bp, Unknown
  gut microbiota DNA sequence
ccaaagggggggcctggtatgcgtgagatgttaaatccgacatctgcgatcgccggtatgggacttggttctaccgttgccctgatcacagacggacgtttctccggtgcatccagaggtgcatccatcggacatatttcaccggaagcagccgtaggcggaccgatcgcattggtggaagaaggcgatattatttccattgatattccaaacatgacgatccatatggaagtctctgacgaagaacttgccaagagaaaagcggcttggcagccaagagagccaaagatcaaagagggctatctgagacgttatgcagcacaggttacctcaggtaacatgggcgctatcttaaaacagccggaataagtcgaaagaaaaggggaagaatcatggaactgacaggagcacagatcgttattgagtgcttgaaggagcaaaaggtagacaccgttttcgggtatccgggcggtgcgatcttaaatgtttatgatgaattatataagcacagtgatgagatccatcatgtgctgacatcccatgagcagggagcgagtcatgcagcggatggctacgcaagaagtacaggtaaggtgggcgtctgtctggcaacgagcggaccgggggcaacgaaccttgtcaccggtattgcaacggcacagatggattcagtgcctatggttgccattacctgtaatgttaccgtaccgcttctgggaaaggatagttttcaggaagtggatattgccggtattaccatgccgatcacaaagcataactttatcgtaaaagatgtgacaaaacttgccgacaccatgcggcgtgcttttatgatcgcaaagacaggcagaccgggaccggtccttgtggatattccaaaggatgtgaccggtgccaagtgtgaatatacttttaaagaggcagaaccggtcgggcgtgtgacaaaggatctgacagaggaagccttagaaagagcagtagccctgatcgaggcagcaaaaaaaccatacatatttgtcggtggtggagccgtgatcagcgatgccgcagaagaattagcagactttgtatcgcttgtagatgcgccggtctgtgataccctgatgggtaagggtgcttttgacggaaccaagcctgcctataccggtatgcttggcatgcatggtaccaaggcatccaatctgggcgtcagcgaatgtgatcttttgatcgctgtcggatcgcgttttagtgaccgcgtccttggcaatccaaagacttttgcaagcaatgccaagttattacagtttgatgtagacccggcagagatcaacaaaaatgtcatcgcgaccgcagaggtgatcggggatatcaaggagatcttaaaacggatcaatccaatgttaaagaagcaggatcacagcgactggatggcgcatgtgatggatctgaaagaaaagtatccggcaagttattgcacggatggactgtccggtccatttgtggtcgaggagatctatcgtcagacaaagggcgatgccatcatggtgaccgaggtaggacagcatcagatgtggacagcacagtattataaatatgcaaagccacacagacttttgacttcgggcggactgggaaccatgggctatggtcttggtgcagccatcggcgcacagatcggaaacccggataaacaggtcgtcaacgtagcaggcgacggatgcttccgtatgaatatgaatgaagtcgcgactgcggtgcgtgagaacttaccgctgatcgaggtcatcatcaacaaccatgtacttggtatggtacgccagtggcagactttattctacgacaagagatattcgtccaccgtcttaaatgatggtgtggattatgtgaaaatggcggaagctatgggggctaccggtttccgtgcgaccagcaaggaggaatttacagaggtctttgcaaaagcactggatatgaagacaccggtagtgatcgattgtgtgatcaactgcgatgacaaggtatggccaatggtcgcaccgggtgcaccgatcagtgattgttttgatgacaaggatatagaaaagaaaggaatgtaaaaatgagcagagtgtacaatttttcagcaggacctgcggtacttccggaagaagtactgaaagaagcagcagacgagatgatggattacagaggatgtggaatgtccgtgatggaaatgtcgcaccgctcgaaggtctttgacgatatcatcaaagaggcagaggcagatctgcgtgatctgatgcagattcctgacaattataaggtactgttcttgcagggcggtgcttctcagcagtttgcagccatcccgatgaatttgatgaaaaaccgcaaagcaggctacattgtgacaggacagtgggcaaagaaggcttttgcagaagcaaagatctacggcgaggcagtggagttggcatcatcggcagacaagacattctcctatatcccggattgctcggacctggatattcctgaagatctggattatgtgtacatctgtgagaataacaccatttacggaacaaagtataagactttgccaaataccaagggacataccctggtggctgatgtttcttcctgcttcttatcagagccggtagacgtgagcaagtatggcgtgatctatggtggcgtgcaaaagaacatcggaccggcaggcgtggtcattgtgatcatccgtgaagacctgatccgcgatgatgtgcttccgggaacacctaccatgctcaagtacaagacacaggccgatgcagattctttatacaacacaccgccatgctacggtatttacatctgtggcaaggtattcaagtggttaaagaagatgggcggtctttctgtcatgaaggaacgcaatgaagaaaaggcaaagatcctttatgatttcttagaccagagcaaactcttcaagggaaccgtccgcaaggaggacagatctctgatgaacgtaccttttgtaaccggagatgcagatctggatgccaagttcgtagccgaggcaaaggcagcaggctttgaaaatctgaaaggtcaccgcacggttggcggtatgcgtgcctctatctacaatgctatgccaaaagagggcgtagaggcgctggttgctttcatgaagaagtttgaagaagaaaatgcataaatcgtaaaggagagatgacctatgttttcatatcattgcctgaatccgatcgccgaggtgggattggatcagttttcaacagattataaaaaggtggaggcagcggagactgccgatgctatcttagtcagaagtgcagccatgcacgatatggagtttggcagcaatttgcaggcaatcgcaagagcgggggctggtgtcaacaacattccgctggagcgctgcgccaaggaaggtatcgtcgtatttaacacacccggtgcaaatgccaatggtgtcaaggaacttgttttcgccggtatgcttttggcatcccgcgatattgtcggcggtattgaatgggtcaaatcccagagtggcgagactgatatcgcaaagatggcagaaaagcagaaaaaggcatatgcaggtacggaacttgcaggcaagaaactgggtgtgatcggtctgggcgccatcggtgtcaaggttgccaatgcggcaacccatcttggcatggatgtctatggatacgatccatatatctctgtgcaggcggcttggaatctgagccgttccgtaaagcatatcgatgttgtggaagacatctacaaggaatgtgattttatcaccatccatgtgccgcttctggattcgaccagacagatgatcaataagtctgctatccagatgatgaaaaaggatgtcatcatcttaaactttgcaagagatctgctggtggatgagcaggcagttttagacggtattgcagcaggaaagatccgcaagtatgtatccgatttcccaaatccgacgacagcaggtcaggatggcgtgatcgtcatcccacatctgggggcatctaccgccgaggcagaggataattgtgctatcatggcagtgcaggagatttccgattacatggaaaacggtaatatcacgcattccgtcaattacccggattgccagatgggcatttgccagacggcaggacgtatcgcacttttgcactataatcgtcagggcgtgatcgcacagtacacgaccattcttggcgatgccaatatcaatgtttccgatatgacaaacaagaccagaggagactttgcgtacgcacttcttgatattgatgcgccggtgacaccggaagttgtcgagaaactggatgcgatcgaggatatgatccgtgtgcgcgttgtaaaataaaggttctgatcctacataggtatagaaaaagaaagcaggagagcagcatttttttgttgctctcccttgtggttttagcgagactgttgtaacatggcagaggaagtattttcaaaatacacagatgagaatttatgatttttaaccaaaagaaggggatacaaaatgattttaatgtcacaggtattatctgataatctgattaaaaatttggacgaaggcgtaatgaaaagttggctgcaatcggtgcttccatcggtactgggctttttctggagtgtggtgctggcactgcttatcgcttacattggtggtaagatcatcaatctggtgcgacgtatgttccaaaagtctttgcgtcgccgggatgcagaagagggggtttgccagttcgcagatcaggtgctcaaatatttcctgtggatcgtaattatcgtgattattttgggcttgtttggatttacagcatcctcgcttgcagccgcagtggcatctttgggtgtgacggcaggtcttgctttacagggaagtttgtcgaactttgcggggggtcttttgattctcgttttgcatcctttccgcgtgggagattatatcattgaagatacacataagaatgagggaacggtcattgagatcagtgtattttatacaaaattgcgcacaattgataataagatcattgttattccaaacggtacacttgccaatacgagtctaactaatgcgaccaagagcgaccgcaggcagatggatctggtcgtgccgattggttatgatgccgacatcaaaaaggcaaaggatatcttaatggaactggtggaggcagaaaaaagacgcctgccggaggatgtcaatgtctttgtcaaggaattgggggcaagttccgtggatctgggacttcgtttctgggtgccgaccgatcaatactggccggtgcgctggcagttgttggaagacatcaagatccgctttgacgcggagaaaatctccattccattccagcaggtcgatgtcaatatcaagcaatagaggtggaatttccacacaagatagaaaaagagtatgggaggaagacaaatatgcataatgcgtatgagttgatcaaagaagaaaatctgggggacttaaattccaagggctatgtgctgcgccacaagaaaagtggggcacatatcagtctgatcgagaatgatgatgacaataaggtgttctacattgcttttcgcacaccgccaaaggactctaccggtgtagcgcatatcattgaacataccgtgctttgcggttctgacaaatatccgctcaaggatccttttgtagaacttgtcaaaggttccatgaacacctttttgaacgccatgacttacccggataagaccgtttatccggtggcaagctgcaacgatcaggattttaaaaacctgatggatgtttatatggatgctgtttttcatccaaacatctaccacgacccggagatctttatgcaggagggctggcattatgaactggaaagccgagaggacgacctgaccatcaatggtgttgtttataatgaaatgaagggggctttttcttccccggatgatgtggttaatcgcgagatcttaaattctttgttcccggataatacctacagtgtggagtcgggtggagatccaaaggtcataccggaactgacctacgaagattttctgggatttcataagaaatattaccatccatgcaattcttatatctatctgtatggaaatatggatatggatgagcggctggattatctggatcgtgaatatctgtcgaagtacgacaagatcgaagtggattctgagatcaagaagcaggaaccttttacccgcccacgcgcggtagataagacttatccgatttcttcagcagaggatgaaagagacgcaacctatctggcatacacctttgttatcagtgatgcgctggaccaggaattataccaggcatttgacgttttggagtatgcgcttttcagttctccgggtgcgccggtgcgtacagcacttttggaaaaggggatcggaaaagatatcatcggttcttttgataccggtatgctgcagcctatgttttctgttatggcgcgcggtgccaacccggaagataagcaggcttttgtcgatgccattcaggaagttttattgcatcaggtagtcgatggtattgataaaaaggcactcctcgcaggtatcaatgcgtcacagttccagttccgcgaggcagactttggcagtttccctaagggactgatctttggcttgcagtgcatggatagttggctgtatgacgaggatcagccgtttgtccatatgcatggtatcgatgtcttagacggacttcgcaaaaaggtggataccggttattttgaaaaattgatcgaaacctatctgcttgccaatacccatgcatctgttcttatggttgagccaaagaaggggctgaccacagaggcagaagaagagttaaaaaaggaactggcagaatataaggcaagcctttcagatgaggcactggatgctttggtcgagcagaccaagaccttaaaagaacatcagcaggaaccgtcctccaaggaggctctcgagtgtctgccgatgttaaagagaagtgatctgaaaagggaagcacgtccgctcgacctgatcgaaaaagaagttgacggtatcaaagtcctgcatcacaaagtctttagcaatggcatccattatctgaatctggtctttgatgtgacaggtattgggcaggaggattggaagtatctgtctcttttgagccgtatgctcggacttgtggataccgagaattattcttatgcggaccttgccaatgcagtcaatatctacaccggtggcattggggcatccttgaatgtctatgatccggcggagggtaagacccactttatgtgtgaagtgcgtgccaagttcttatatggcgaggtagaaaatgccatcaaacttatcgaggagatcattttacattccgacttttcggatgaaaatcgtatccgcgaactggtggctgcccagcgttcccgtctggaaatgcgtatgagcagtgcaggtaatgtacttgccgcaggacgcgctatgtcatgcttctccgtgccggcactcatcacggattccatcagtggtattgcctattatcagtttgtcaaggatctggacgaacattacgaggaaaagaaagacgagatccgcagcaagtgtcaggaactggtaaagaaagtctttaccagggatcatcttttggtaagttctaccggagacgatcaggcatttacccaggtagagacctatctgccgggcattgcagagcatctctttgcaagcggtaaaaaggaagcggcacaggagatcagactgactcgcaaaaaagagggattcaaggatgcctctcaggtgcagtatgtatgccgtgccggtaattttaccaaggatggctatgagtttaacggcgcactcaatattctgcgcgttgccctttcctatgactatttctggatcaatgtccgtgtcaagggcggcgcctatggctgccgcagtgcttttggaatgaatggggatacctattttgtatcttatcgtgatccgaatctggaaaagaccaatgagatctttgcgcacacggcagactatgtccgggattttgatgtggatgaacgagatatgaccaaatatatcattggtacgatcagtgagatggatacgccgctgacaccggcacagcgcggcacgagagccctgtcctgctatctaagggatgtgacttttgcagacttgcagcgcaaccgtgatcaggtcttgaatgccacagtagaggatatccgtgcgctggcaccgctggtacaggcaaccatggatcaggattatttctgtgttgtcggaaacgaggatacgctgacggcagccgcagatatgtttgacgagttatacaatttatacgaataagagtaaggagcattacatgcaagataattttaaatcaggttttgtcaccattatcggacgaccaaatgttggaaagtctacccttatgaaccatttgatcggacagaagattgcgatcacttccaacaagccgcagacgacccgcaaccgcatccagacggtttatacggatccggaactggggcagattgtattcttagatacgccgggcatccatcaggcatccaataaacttggcgaatatatggtcagtgtggcagaacacacgatgcaggatgtggatgtgattctctggctggtggagccgtctgattatatcggtggcggcgacagacatatcgtagagcagttgcaaaagaccaaaaccccggttatccttgtgatcaacaagattgacacggtagaccatgatgcggtctttggcgtgatcgaggcttatcgcaaactatatgattttgctgagatcgtgccgctttctgccttacgcggaaagaattgcaatgtccttttagaccagatctttaagtatctgccttacggaccggcatattatgatgaggacgtggtaacagaccagcctcagcgtcagatcgtagctgagatcatccgtgagaaggcgctccatgcactttccgaggaggtgccacacggtatcgcggtttccatcgatcagatgaaatggcgttcgggcaagcatggcatgtatgatattgacgcaaccatcatatgtgaaaaagactcacacaagggcatcatcatcggcaaaggtggtgccatgttaaaaaagatcggaagcaatgccagatacgagtgtgaaaaaatgctggatgccaaggtcaatctcaaactctgggtcaaggtcaagaaagactggcgcgacagtgattatctgatcaaaaattttggttatcgtaaggacgagatctaattccattttttatctggtatatcttcttttttgctggagaatctaaagaatagagaagcgaaaaagaggtgtgcgtctatggatgaatggtgggagagatttacggcaagcggcaaggtaagtgactaccttgcttattgtaaaatggcggaggaagagtcccatgggattcaatattgttctgacagggatggttctttcggcgattcctgtgggagagtacgacaagagaataacgatacttaccagggagcgcggcaagatcacggcttttgctaaaggggcacgtcgttccggtaaccaacttttggcggcagccaatccttttgcctttggtcagtttgaggtctaccagggcaagagtacatataccgcggtgcgtgcggacatcaagaattatttccgggaactggcagaagattttgatatggtctgctatggttactattttctggagatggcggaatactatgcacaggaaaatgcagatgaagtagaacgcttacggcttttgtaccagacacttcgggcgcttgagagccgtaagttttcttttgcgctgatccggggcatctacgagttaaagacctggacgatcaatggggaatatcctaatgtctttgagtgcttatcctgtggcagcaaagagcatctggacttcttttccatgcggctgcggggctgtgtctgtgcgtcctgccagggcaagaccggtggcaatccgatagacggatcgaccctttatgccatgcagtatatcatttccacttctgtggaaaaattatacaccttccgtctgacaccggcggtggaggcagagtttctgaatttactgcaatcctatcggaatcattatgtgggacataagtttaagagcgaggactttatctgagccacagggacgttcctgtggcacaaggcggttgaaaaaataattgtgtcatagtataatagtgcagattgttaagtgcttcaaataggaggaccattgatacatggaaaataagaaaaagcattctgccaaggcagcacaaaatgcgagagaaaataagataaaggcgagaaaccaaaagatcgtccagcacaggatcgcgatcctgatcgccgtcattatccttgtgatcgctgcgatcgttgcggttgtcaagtttagcggatggtttgataagataccggatcaaagtacccttacgatctcagatgacggcaaggtgatctgtgaagaattgacagactttgcggaggattactcccgaagtgagttaaagacttacatgaaggaagagatcaaagaatacaacgataccaatggcaaagacagcgtcaaattagacaaaataaagttttacagtgaccttgcccatgccaagactacctatgcatctgcagaggattacagcaagtttaccggctatggactttataccggtacgatcaagtcggcagtcaagcagggctttgatttctcagatgcttttgtcagtgttacggacggagaaaaggggacatcggttgatactttagacattacttcccaaaagaagttaaaggtggccatcatcaaagagaatatcaatgtcacggtagacggcaccatcctttatgtttccgatgcctgcacgacaatggtggataagagtaccgtctcaatcgaacagccggatggcaatgaagatgcaacacagttgacctatattatttataagtagagtgttatacaggagattgcctgtacacaatagaacaagaaatgagaggatcagattatggaaaagacaatggacaagattgttgctttatgtaaagcaagaggatttgtatatccgggttctgagatctatggaggtcttgcgaacagttgggattatggaaatcttggtgtggaactgaagaacaatatcaaaaaagcatggtggcagaagttcgtacaggaaagcccgtacaatgtaggtattgacagtgcaatcatcatgaatccacagacatgggtggcttccggtcacttgggcggattttccgatcctttgatggattgtagagagtgtcatgagcgtttccgcgcagacaagatcatcgaagattttgcgcaggaaaatgatattaccttagagacatctgtagatggatggacggctgaggaaatgatgggattcatcaaggaacatagtgttccatgtcctacttgtggcaagcatgactttacagatattcgtcagtttaacctgatgtttaagtctttcatgggtgttaccgaagatgcaaagaataccgtttatcttcgtccagagacagcacagggtatttttgtaaactttaagaatgtacagcgtacatcaagaaagaagttaccgtttggtatcggtcagatcggtaagtctttccgtaacgagatcacaccgggtaactttatcttccgtaccagagagtttgagcagatggaacttgagttcttctgcgagccgggaaccgatctggaatggttccagtattggagaggcttctgccgcgactggttactttctcttggcatgaaagaagaagaattacgtctgcgtgatcatgatcctgcagaacttgctttctactccaaaggaacgaccgatatcgagttcttattcccatttggatggggtgaactctggggtatcgcagatcgtaccgattatgatctgacccagcatcagaatacatccggtcaggatctgacctactttgatgatagcaagggcgagcgttatatcccttatgttatcgaaccttctcttggtgcagaccgtgtgcttttggcattcctttgcgctgcctatgatgaggagaatatcggaacagaggagaagccggatatgcgtaccgtactgcatttccatccggcaatcgcaccggtcaagatcggtgtgcttccgctttccaagaagttaaatgagggcgctgagagcgtatatgcccagttgtccaagaagtacaactgtgaatttgatgacagaggaaacatcggtaagcgttatcgtcgtcaggacgagatcggaacaccattctgtgttacttacgatttcgattctgaggaagatggagccgttactgttcgtgaccgtgacaccatggagcaggagcgtatcaagatcgaggatctggatgcatactttgcaaagaaatttgagtggtaatttgaatcataatacagcaaaaggtctttcccaagagggagagaccttttttgatctatttatgagattttcgatagtccgttggtgtgcagttcattacagccttaaaatcactacaaaaatgtgtgtaagaagaatagtgaagatactcggcggcgtcggcgatggatatttcggattccagcagcatcctggcggcatagtgcattttgagatcgcggtaatactgttttggggaaatgccgacttccgttttgaaaaggcggttcagatagtagggctcgtagccggtctgatctgccaactgtgcggtcgtgacgccgcttgtgatgttattcttcagatatgtcatacattttcttatcatagggctatattgcgttttctcatccatcgcttcttgtaccagtgcgcagtaggtctggtgaatgtcttggtgtaattggttcatgccgagtggagagtgcgtattttcaatttcctcgatgaaggactcctgtgcgcggtaggcggttgagatcagtacaccggcttctatggctttatggcattctaaagcgttcaggatgagtaatgagtccttacggctgcgtgatggttccgctacattggcatattcggttggcacggttgcaagccgacccttttgcaccatgtcgtttaattctgcagcataaaggctgctttgtccctgtgcaacctcgtttaacagcaggttttcaaaatgatagatgttttcgtagaccacatcccgatcttcggaaacatcacttgccacgggaaaggaggctgtagcaagaaaggaggtatcctgcatatggtcaaaatcattcatagagatgcgctgcccattgaccagataatgcagcatcatgccatagtgggcaaattggctgtatttcatgacggggagttcttgcatctgggcaataagtttgtgcttgtcggaaaaggacataccaagcgactcatattggcgcagacaacgctccatagcctcgttggaatagggactgtagaagatgggaccgagcacatgtacacgcaccaattttccctctcttttttcatagacagcttcccagacaaagccgatgtaggccgccagaacaaagggggtgtcatggttctttccgtgggaaaaaatcatttccatatattcctcagtacttaaaaaagcactaaaaatacgacctatgttatcgtttgatcgtatcattcgccggtctgcgtcgaaagtaatcagatgcagttggggaatgaccgagaataatgcgtaaatatccattgcattttcatctccttttttctatcgtaaccatactttactaaaaatagaataaaaaagcaaattttagtattaaagcatgtgcaaaaaggtcatatgataatgccagagggtgtatcaaattgtgaaaagatacagaaaaaagacaactcaaaggaggagaacaatggggaataaaaagttaagcgcggcaagcgtgagagatggtgtagaataccgcaccgccagtaaattatctatgatactcggtgtcgcaaccaatggtggaggtatgtgtttttatcttttgatgatgtacgcatcctacatagccaatgccggttatggaatcgcagttgcggttgccggaatcattattacaggaacacgtatttttgatggtatcacagatcctttagtggcatttgtttttgaccgcatcaaggctggaaagcatggaaagatccgaatcttcctattcgcagcatgggcggttatggcactggcatgtttcatgatgtatgactggatgagtggcaagtacacaggtgtagccggtgtggcatggttcatcggcatctatgtggtatatatcattggttataccatgatgaatatgtcatccggagctgtcggcaacctgatcacaaatgatccgacccagcgtcctttcatgaacctgatcggaaccatttattcatactgtgtaccaatggtatttaacaccattatttcatttgcagttttaccaaaatatgacaatcagtataatgcagcctgtctgcgtgaagcatgtgtgtggtatgttgcgggtgcctttgtatttatgattcttgcatgtatcggtctgacaccatgtgacaaaccggaagtgttaaacagtgtgacttttggtgatgatggtaaggaaaagaagatcggatttaaggatatgtggaatctgctcaaggataacagaaatatgcagatgtggatcattactggtgcttctgataaactggcacagaccacagccggacagtctatcgttatgacactcttaagtggtgtgctgatcgcgaactatcagacagcaactatgcttggtaatatcacggcgatcattggtattgcctttgcgacaattggcggtatgtatgttgcaaaattcggagccaagaaagcaacatctgtctggtcatgggcatgtatcggcttgtctgttgtgatggttgtattctgtaccatcttaggaccaaccggtatgtcaagcattggtaagttcggtgttccaatgatcatttatctggttcttaatgttggattgaccggttttaagatgatcctttctacagcaagtggtgttatgagagctgatgtttgtgattatgagtttgagcgttccggcaattttatgccgggtaccgtaggcggtgtgtattccttcctcgataagattatttcttcactggcatcaaccattgctgctcttatggtatctctgatcggatataagaccgtgatgccacagatgggagataaggcaacacctgcagtattctggatgactatgttcttagcatttggactgcctgtcattggctggatctttaatgttatttctatgaagtactatgatcttgacaaagaaagaatggttgaagtacagaagaacattgtagccatgaaagcagaacaggaagcgaagaaagaagcataatttagcaatttacaaaacccttcattatagagacttcgagatttgatttcgaagtctctttttcaaaaagagagaggaagaaaaatatgagattgtatgatgtgacagtggaatatcagaaggaaccgattggcatagatgtctgcccacgtttttcctggaaactggaaagtcaagaggaaaacacctatcaaaagtcttatgaaataagcgtagcaaaagagggaaagagtgtctggtcaagcggcagggtggaaaacggacagtccctgtttgtgacttatgaaggcagtgccttggaggcctttagccattatgatgtcaatatctgtgtctgggacaaccatggaaacgctgcggaaacgaccactttttttgagaccggactgatgtcagaggacaattgggaaggtgtgtggatcactacgaaagaggaattgccggccgttaagactttctccaaagaggtctgtctgcagaaaggaaaaaaactgcgtcaggcaagaatctatgcatctgcacttggtgtctatgatctggaaattgacggcaaaaaaatgggggatgcatatctggctcccggctggacgtcttatggcaaccgcgtccaatatcagacttacgatgtgacggatgagttacaggagaaatccctagtgtctttggttgtcggcaatggttggtatgcaggctacttaaacggcgaaggggagcatcatctctatggaaaaaagacagcctgtatcgccatgatccgtatcacatacgaagatggttcggtggacgtcatgggaaccgatgcctcatggctggtatcagaaaatgcgatccggtcgtcggaaatctatatgggtgagacactggatctgaccttgccgctatccgatcattatgccggtgatacccaggcagtactcttagaaagaagtgcctttccaaaacgtttgatttcacaagaggcagagcctatccgtattaccaaacgtttcccggtggttcagaagattcttacgccaaagggtgagttggtgtttgatttcggtcagaatatggcagggttggtggaagtagaattaccgccgctttctttgcttaccggtgcgaagaaagaaatccgtatcacacacggcgaagccctggacaaagatggcaatttttacaatgaaaattaccggacagcaagatcagaggatgtttactgctatggtgagggagatgtcgggaaaaaagccatgccacattttacctatcacggtttccgttatatttgcgttgagggtgtagatagcagtgtggatcccaagtattttacggcctgcgccatgcatagtgatatgcacaaagcggggacgatgacaacatcaaaccgtctggtcaaccgcctgatccaaaatatcgaatgggggcagagaagcaacttttttgatattccgaccgattgcccgcaaagggatgaacgactgggctggacaggggatgccatgatcttcagcaagactgctatgcagaattttaacacgggcctctttttcaaaaaatggctgcgtgatgtggcagtggaatcggatgctaaaacaggcattccgcagatcgtacccaatgtggtaaagggcagtatgggaacttctatttggagtgactgtgctaccgtgattccatggaatctttatatgacctatggggataccggtgtgcttgccgatcaatatgataatatgcgcctctgggtggactggatctttgggcagtgtcagggagaagtcctatggatgcatggtttccaaagaggtgactggctggcactggacagtgatgaaagcctgcatctgatgtcgggcggcacagataagaatctggtagcaaatgtcttttatgcatattcgaccaagatcgtgtgcgatacggcacatatacttggaaaagaggaggatgccaagatatacgatgggcgctatcaggctatcgcggatgccatcttaagagagtatgtaacagcatccggacgcttggtttctgagacacagacagcctgtgccctgcttctttattttgatttggtcgcgggcgcgaaaaaggagcgcattatacagacgctggagcaaaatctcaaacagcacaaaaacaagttgacgaccggctttgtcggaacggcatatctgtgccatgccctttctgaaaatgggctgcatgatctggcggcggaacttcttttaaatgaggattacccgggctggctctatgcagtgaagatgggggcaacgacgatctgggagcgctggaattctgttttgccggatggaacttttgatacatcgggcatgaattctttgaatcattatacgtatggttccataggagattggctttatcggaaagtcgccgggattacgccgacctcagcaggctatgcgacttttgacatcagaccttatctgacaaagggactggaggaagtggaagccg

SEQ ID NO: 12543 - DNA, 9442 bp, Unknown
  gut microbiota DNA sequence
tgtaaggatggacagattcaggtggaggtaaaggtgccggtaaatacgaccgctacactttatctgccggaaaaggaagatgcattggtgcttggctccggtcaatatcattatgtatatgagacaaatacggtgcttatcgcgggaagatacaacatgaacacaaaattccgggatatggtcgaagatccggcagcgaaagccattctggatgcggcacttccgggtatgttggatggccctatggcatcctttatcctgaaccagtcgccaaacgagatgcttgcctatgatgcgggtaaaaaggaaatgtttgaacagatcatagggcaattgaaccagtctgtttaaagtttttatggaaaagtgataagaaaaaaagataccgataaaaatacttggataaatttgtcagaataaaacggattttgtacattagtcaatgatgtgacaccaacttttgaaaaataaaaagattggcatggtactatagaatctaatcggtaagcataagatactatacctcattcttgttctgtttgattactttttatctgcaagattttattgaacaaacggaataagaattattgtgtctcgagttcgagacgtttttctaaaggtgatttccagcctagaacctgcattggtattttattagagcgatttaggtatcgtctcatttgaatcattagatcatcataactgaaaaacgacatatgattgtagaatcgttcttgatcattacgatggctacgttcaactttaccgttatgtcggggtgttctagggcgaatttgcttatgctttattccgatttttccacagataacatcaagaggatggattcggtctgttttcttcaagtgggtgaattcgcctccgttatctgtttgcaaaatctgtggctgatagccaaagtaatcgatcgcacgctttaaaaagtcaacagtggaatagctgctttgttccatgtaaggataaataaatcgttctcgagaagcttcatcaataacggtgtattgatagaacttttgcggaatagatcctgagtagcaggcggcagggacgtactttacatccatttgccacttgattccaagcgtagatggagtgtcataaggctgaggtttgcgcttgttcttagtagaaggtgcagaactagaataaccaagacgacgataaacgcggtacaatgagcctggatgtctggaataccctttattagaacggagcttaccataaagctcacagacggaaattttagggttgcgtctgtgatagtcctgaatccattttagttcttcgtctgtatgagcattgggatgcttggagagaggacgatgcgacttgtcgattaaggattcttttgtaccatcgaatttcttattccatcgaatcaaagatgatttggaaatatgatatcgacggcagacaaacgatacacctacaccggtacgataaagtttgactgcataaaattttgtattaagttcatgtggaaaatatcgttgtgagtatgttattgtattcatgacggttgataatcctttatatagagttttggtttggcgattaaaattctataggactcaaccgtttttgtataggggtaggtgtcacatcaattgtaaccctacacaggaaaatgatattacacttgagacttctgtagacggctggagcgcagaggaaatgatgggattcatcaaggaacatagcgttccatgtcctacttgtggtaagcatgactttacagatattcgtcagtttaacctgatgtttaagtctttcatgggtgtaaccgaagatgccaaaaatacagtatatcttcgtccagagacagcacagggtatttttgtaaactttaagaatgtacagcgtacatcaagaaagaaattaccatttggtatcggtcaggtaggtaaatcattccgtaatgaaattacaccgggtaactttattttccgtaccagagagtttgagcagatggaacttgaattcttctgtgagccaggaacagacctggaatggttccagtattggagaggcttctgccgcgactggttactttctcttggtatgaaagaagaagaattacgtctgcgtgatcatgatccggcagaacttgcattctattctaagggaacgacagatatcgaattcttattcccatttggatggggcgaactctggggaatcgcagatcgtaccgattatgatctgacacagcatcagaacacatcaggtcaggatctgacatactttgatgatacaaagggtgagcgttatgtgccatatgttatcgagccttctcttggtgcagaccgtgtgcttttagcattcctttgtgcagcatatgatgaagaaaacattggaacagaagagaagccggatatgcgtaccgtacttcacttccatccagcacttgcaccagttaagattggtgtgcttccactttctaagaaattaaatgaaggtgcagaaagcgtttacgcacagctggccaagaagtataactgtgaatttgacgacagaggtaacattggtaagcgttatcgtcgtcaggatgaaatcggaacaccattctgtgttacatatgatttcgattctgaggaagatggtgctgttaccgttcgtgaccgtgataccatggagcaggagcgtgttaagatcgaagatctggatgcttactttgctaagaaatttgagtggtaattggattgttctttccgatatttcccagcggaagtaccaaagtatttcttgaaaatacgacaaaaataattataatcattaaaaccaaccctgtctgatatttcgtgaacggacagggttgtttcttttaaaagtcgtttggcctctgccaaacgtaatccccgaatgtgttctgcaataccattttgcatatatttattacatgattcatagagcttatttttgctaatatgaaattcttttgtcagtctttcgattgacagatcctccgccaaatgtgccaacagaaaacaatccagattttgtacaaaattttgacgttgcagggataccatgtcccgaaacaatacatagagagtacatgcttcaaggattctgaccgtggcttggatttgttccgaacttttgtataccatgttaaaaataggatccgaatcgcaaaaagtatgagaggtataggagtgtaggtagagacggagggaagaaatgagtttgtcatgatccgggttttccgtgaattgcccaatcatgatatagccaatgatttgtccattgtcaatgagtggtgccgtagtttctaataatccagcatgacaatgaaagatttctaaggtctgtgtctgctgacatcgcgcaaaagaatttcgattgctttgcatacaattagcattgccttttttataagagcgtatcttggcgcaaaaggcgcaatgttcctttggataagacagaatctcatatccatccaagtcgaaaagggcgattttgatattcgtaagtaaataaaaatttttcataagatctaacaaagcatccttgttaagatttaaagtcaacatatccatttatagcatttctccaaaacaaatttacagtttttaagtacatcatacactatttctttttaatgtcaaagtctatgatgcagtatataaatatggataaaggagtgatggaaatgttagtaacgttaaaggaaatcttggaaattgcagagaagaaaaagattgcgattggatcatttaatgcttccgggctagaagcgattgaagcagaactggctgcagcagaagaattgcaacttccaattattatccagtttgcacagtgccatgaaccatgggtaccattggatacgataggaccaattatggtacatatggcaaaaagggcaagcataccggtttgtgtacatttagatcatggagaaacactggaatatctggcaaaggcacttgaaattggttttaccggtattatgtatgatgggtctgtcctctcatatgaagaaaatcttgcgaatacaaaaaaggcagttgcaatggcaagaaaatatggggctggcgtagaagcagaacttggctctatgggaaggagggagtcgggaagtggagaccatagtggtgaagaagatgaaactaaaatttatacagactcggaacaggcttcttcctttgtgacggagacaggaatcgatgcgctggcatgttcttttggtacgacccatggtatttatctatgtgagccaagattggattttgatgtggtcagaaatgttagaagaaagtgtggtaatattcccatcgttatgcacggtggttcgggagttagcacagaagattatcataaggcagtagaagccggtgtaagaaagattaattattttacttatatggacaaggcaggtggaaacgctgttgcagattatcttgctaagcaggagaaaaaggaacccatctttttttcatctatgtacatggtggcaagagaagcaatgaaagaaaatgtacagagtgctatgcagacgtttgcattagtaaaatagccgttggatagaaaatagagattaggaaaggacggaaagaaaaatgaataagaaaatgacatttgcacttgctttttgtaataggggatttatgccgggagaactgatttacggtgcaagagaggatatgatccaggcagtgacagaagcaggatatgattatatagcgatggatgcagagctgacgagatatggtggaattgaaaccagagaggagggtgctatgtatgcaaagtggctaaaaaaacatgagggagagtatgatggtgtcatcttttctatgccaatttttgcagacgagaatggtgcgattacagctctgcaggatgcaggcgttccaattttgatgcaggcatatccggatgaaatagggaaaatggattttgcacatcgacgtgatgctttttgtggtaagttttctgtgacagatgtttttacgcagtatcaggtgccatttacagtgctaaagcctcatgttgtgcatccattgtcaccaaagtttcaagaaaatctgcgggattttgcagctatttgtcgcgttgtcaatggcatgaaacgttttactattggttgcataggtgctcgaacaactgcttttaagacgacgaggtttgatgaagtggggttacagaagaatggtattacggtggaatcgttcgatctgtcagaattaatctttaaagtaaatgcactgtctgatcaggacgatgctgttttgacgaaaaaagcacatttgatgcagtacgcagattttagtggtgttccggagaaaaacaggaacattttggcaaagatttctgttgtcattgactcgtatattgaatgctatcatctggatgcgctggccattcgttgttggaacgaaatggaaacaatccttcgtgtgtgcccttgtgttctgttatcggaattgaacgacagaggtattgtgacttcttgcgagattgatctgacgtccgccatttctatgcgtgctatggcattggcaagtgaagaaccaactgcagttctagattggaataataattatggggatgatgaaaataaagtgattttattccattgcggatcgacagcgcaggggcttatgacagaaaagggtaaggtcacagagcataaaatgttcgcaaaggaggatccgggttctggctggggaacgaatgaaggaagaatccgcccaatgaagacaacaatttcaaattgtctgacagtggatggtaagattgtgatttatgccagtgaagcagagtttacggatgatccaattgaagatgcgtattttggctgtgcaggtgtgtgtaaaatggaaaatatgcaggacaagatgatacgacttgcaaggggaggtttcaaacatcatacttgcgttggtgttggacatatgaaagaaattttaaaagaagcatttacgacgtatttaggctatgagtgggtagatattgatgcataaaagtacttggcgaggtgaagaagatgaaaattgctggacttgatattggcacaaccggatgtaaatgtacggtttttgatgaaaggggcaagtatctggatcatgcttatcaggattacccggtaaagcgaagtatgtcaggccatgaaattgatatgtgggtacttcgggatgcagttttacatgtcgtttctgagatggcattcagatatccggatattatgggtctgggggtgacatcttttggagaaacgtttgtactgacagatgaaaaaggaaatcctttggatgtcgctatgctctatacagacccaagagggaaagaagagtgtcaggaactgatagaaaagctaggagatatgcacattgctgaaattacaggattacgtcctcatgagatgtatggtatctgtaaactgatgtggatgaaaaagcataagccagagatttatcatgctgccaagcatatgtttcaggtggaagattttattgtctttgtgttaagcggcgtggcgcagattgactattcgcttgcaactcgttctatggtattagatgtgactcatcttagttggagtgatgagattatacgtgcagcagatgtagataaaaaactattttccaaggttgtgccgacaggaacaccagcaggaaaaataaaaaagcagatggcagaacgaacaggtttgtgcgaaaatacgataattgtgtcagtgtcgcaggatcaggtggcagcagcaatcggtgccggagcgtttacctcagatgttgcggtggacggtgcaggaacggtggaatgtatgacacctatttttgataccagaccagatataaaagaattgtacaagggatattttgcgacagttccgtatgtcgttcctggtaagtatgtgacttatgcattttcatatacagggggagccttgacacaatggtgtacaaaaaccttggcaaagcaggaaatcatagaggcaaaagaacagaataaaacagtaaatctgttattggaagaaaaatatgccgccaaaatgaaaaaaatgggatttgcagaggatgaaccaagtggtcttttagtgttgccccattttgcaggggcggccacaccctatatggataccggttccaagggggctgtgatagggttgactaccgatacgactgtggaagagatttatatgggatgtctggaaggcgtttgttatgagatgttccaaacctatcaatatttgaaaacaacaggtatttgttataaaaggtttcatgcaacaggcggaggcgcgcattcagctgtctggatgcagatgaaggcagatgtattaaatgttccttttgtggcacttaacacggtagatgctggaaccgtgggctgcgccatgatgacggggattgccataggaatatttcgtgacttggaggatgcagcacagcatatggtagaaaaaacaaagacttatgaaccacgaaaggaacagcatgaaaaatacatggcacattttgcaagatatgaaaaattgtatgatgctatccgaccgttggtataaatgcatggtgtgaagaagaggaggagagaataatgaatccatatataggtcatagaagtcaggtctgtggtgtagaagagcatcggcttgttggagcaaaaggtgatggtatgcgcctttatgaagcatacaatggaaaaggaatagaattgacggtgtctcctgatcgtggtggagatattacgagattacgttttcggggcatacagatgaattatatgagtccttgtggctatgtagccccagcctactatgatgctataggagatcactggcttcaatcttttacagcaggatttttgacaacatgtggattgcagggtgtaggtactccctgttgtgatgaaggagaagaaattcctttgcatggaagtattgcaaatcaaccctgcgcgcagtcttatgtgacagagaatgaagaagaaatttgtttgcatctggtgacatacgacgaaacaatctttggcagaaaactagcattaagaagggaaatttgtttgtctaagacagagaatacatttacaatttctgatgaaattgaaaatacaggggatcaggaaataccatttgaaatattatatcatatgaatatgggatacccgctattggatgaagacagtgaactggtaattccttcggtagaagtaagaccaagaaatgaacatgcaaaagatgatatcgaacattggatgcagatggaaaagccaacagcaggctatcaggaacgctgttactatcaccggtttgcagatgcgcgtggaatggcaaccatttatcaaccgaaactgaaaacaagacttagtatatcttttgatgcaaatgaactggatggttttgtggaatggaaaatgatgggggtacgggattacgtgctgggtttagaatgcggaaattgttatcctgatggaagagatgttatgcgtaatacaggtatgttaaagtttataaagccgggtgaaaaaaagagatatcaggtaaaagtgacacttgaatagaagaagataagggagatccgtttgataggattctcccttatttttttggagaaattttttctataggagaagtggaaaaatctctacgatattctgtaggtgttttgccggtggaagctttgaatatttcggtaaaatgactaggggaggaaaaagcaagataggatgcgatttcggtgatacgatagtctgagtaacgaagtaggtttctggcacgatgaatgcgttcttcggtaatgtattgttttaaagtaattccctctgcatggtgaaaggtacgagacagatgcccggaggtaaccccgagataggaggcaatatctgttaattttatgtcgccatgtaggtgctgataaatatattctttggtggctttgactaacggatgatattgtctttcccggtattgcttcattaaatcactgattttagcaagaccggcataggcgcattgtaataattcaggataggaattggtttcttcacacatgagaatacatacatctgcagcagtaagtacaagttcattatcaaccagacgatctcgggctgcccaattggaaacagctgttatgaggcctataaataggtttttcttggaacgaagatcgttgacagccaatctgcctggatgataatcaactgtgacagtgcttaaggcatcaatcatactatcaatatcattttgttttagacaatcgtagatccagtttccccattctacactattatgaagataactatgttcttgtcgttcaaaaaccaaagcttcgtatcttttctcaaaagaagcctgatattgatttaaataggttttgctaagggtgattttctctctttccattgtattactccgtgtattcactaaaaatctttgtataatgtgaaaaaaattatatttatatcaattata

SEQ ID NO: 12544 - DNA, 14174 bp, Unknown
  gut microbiota DNA sequence
gggtatacaaaccacgtttgttcatatatacgagaatttgcaagatatagtatatagtaatgtatatcagcatatctcatctctcttccacgcctctgcttttgttttcaatggtatcaaaagcatcaatttcgaaatgacaaaatctctacagaagcaaaagattatctcgctttcaatggtacaatttgagttttggttttaattgtcgtttgattattattccaactcgcataaataaggacaggttgtttatattcgtataactgttttctcatttctttaaataaatcttttgtttcaaaataaactaaaagcataaaatgatttccttcatacggaaagcggaaccttataaaattcttctctgaatcataactataataagaacactcaacaagtttgatgcccgaaatatacttggtatataggtaagaagtttttcgtcccgcgagaatatatttgaccataattccattaattttatcatcatcatcattctcaatacatatcgcatacaattggcgtattgtatgtatatataattgtcgcttctcttcatctgcagatcgcgccacactgtatatagatctttttttcacaaatcctcgtctgccttctgatttttgtatattattcaataatgattctggcgagaaatctgatgtgtcataattttctttatctcctgtatccgtcaaaaccacattataccagcatctctccacatgatcgctactaggaagtttgacgaaatgtgttcttatcttgttggagttgaatgctgatactgtaaatttacagttgcattttggatttgggcaatagaaaatatgatcttgttcttcaggacgaacgtccgcagcatatctcttattaatatgttcctcttcattatatgctataaatgacatcttatttctagctccttataccttctctattttcttatagttcttcacaagtatgccccaacaaatacgtcgccgatgtctctctctccgaaaaacatccacgatctccaaagacaataaacgcatctttggctcgtgacacggcaacattcatcatactttcatccttatcaataaaataacagttttctccacttccatagactgtagaaaacaagataatccttctttctgccccctgaaaggtatgcacagttcccacagaaatatttgacatttgtttggccaatggtgagttcatcaattctttttttatcaaaaatgcctgtcccttaaagggcgtaataattccaattacgtctttactttccatttttcccgcatcaatatcttgctgatattctgtaataagcaaagtatagttatgggtcagccaagtgactagagcctccgcttccgctctattctctctactccccccaatcttgtgtgaatactcaacagatacctgataatgtcccattggaggaagcaatttcttctttccggcctcataggcacttcctcgtttaggttgtagccttcctttataaactagtttattgcaatatgaaattatctcatcgtaacatctccgatgctcattcaaaaacataccatgttcgtatttgttataagcacatgataatgctgcaaccttcataatgtttgattgagaacaatttaaaccattattctctaattgttcaaactgtctctcttcagcaatcaccccataaatcatagccatagtcttatctattccccgcgtcacaccccaaacaggagatatctgatgttcatcgcccacaactaacgctttttttgcaagcgaaaaattccctgcaatcatctccggtgaaatttgaccagcttcatctacaatcagaagatctatgtaattatacagatactgtccaccatatacctggaattgcttgggtagcataaatgtcgtcataaccatacatggagcaatcatcgccatcctatgataatattcgtctagaactttttcgaaagtagtaggaatttgcttaactgttatagtcgtatcacgtaacaaccattctccctcataatagtgcgctgccatccagaattccttataacggattttatcaatcagttcattcagatctgttggtgtaaattgattccaaataaatttctgttcttgctttacatcaaatgaatagatatctgctagtttttgattgatttcctccatctgtttcgttgtgctctccattaattcttgagcactgcttatcgcctcttcaaattgattgatctgttcacatgtcagtcgatattccatatcatattccgacaattttgcttgatactgtttttgcacatcatgatacgtcacactatcttgtagtatttggcactcgtctaaaagagaaaaggttgatacatatgctgcttctcgattcttactccatggtaaaaatggaaaaatcctcacccacaacggtagcatttggtaactttgttgccattccaaatatcgttttttacatacttctgcgtctttactgatcaattcctgtttttgcaggaacatttccttctgttgttggtcctcctgtatctgttcttgcaacgattttagataagcacccccttcttgatttcccatagcctcaaacaactgatgcgtcatattcaatatttgcttccgttcttgatctatatcgtttaaatgttgatagactttctccacacatcgttctaagtcaacttcttcctgtccaaaataaactttaaactcctgacagtatttttccttagaacttcttctattgctttctgcttctattttctggaaaaattctttctgaccaacactagaacattgataacctatttccatggcatttttcattttacttgatgagggaaaatagatagcaaacttgtccgcacctgtgatccatttatgttctaggttctttatcccttgattttcaatacttcgaaaagattcaataatattggttaccggctgattgttcatcgaagttgccacaataagtggtgcatctttttttcctaatgcggcatttacatacatatccgccactatcgattgtagtagagtagtttttcctgtccccggtggtccaccaaccgctaaaatatccccctcttccatttcattaaaatgattgattgcctctctctgagatggtgacaagggatattgtccattcatttgtcctgcatgttgcatcatcttatttacatcatcattggaaatcagctgctttttcggttcagtctttccatttgtcaacttagcatataatttgttttcttcctggttctgcaactcattgtataaacttaatatatgctttgtggcattgaccattttatcctcaaagatatagtatttattatctaatgcaattttttcaccacaactttgtacaaaagcatcatcaaaagaactgtgcgtaacagtttcatacataaatatcgcgtattggacatattgttcccatgtctcgatttcataacgtgcacttgtcatcttttctacgtactcatcataggttgtcatatcgccaacagataattccgggtcaatcattggatataaatattctctaggaaaccatggttcttttccaacatccgctctggacaattttccttctccgtctaattttgccgggacaaagaaaatggaattcaagtcctctatcttctcatctatcctatctccattttcatatatgcttgctaaagttttaaaggcaattatgacattgatagtttgcttttgcatctgctggtctgttttacattttccaaataaatgctccagaacaatatctccgacctctcctgtcattacttcttgctctggaatcaaacaaaactccccatctttatactcgcatttcggatttgtttgtaccgccacggcatttctaaaatatcttgtaacctctctcattctctccctatgcccctcttcgtccctctcgcacaccataattgatatagtgtaagtaatacgccttccagtcacttccataagttttctgcaagtcctgatatcttgtacgataattctgcacactaaaatccacctttgcctgacgtccttcgttcattccatactggacaaagtgctgtaatactgcggcatcatcatctccatacgcacgatatacatccggattttttgatatataataactatagtcatacaccgcgctataatccacgccattccacaaggtcagtccattctgcagcgtattgcaaccggttcctcttcgtccttcccgagcgccccaattaatatagtgcacatagtaatttttcagatcatttccatacgcacggcgcaaatctgcatactgcagacgataggatcgtacatcaaatgtactcttggcctgacgtccttccttcattccccactggacaaaatgctgtaataccgcggcatcatcatctccatacgcacgatacacatccggattctttgatatataataactatagtcatacaccgcactataatccacgccattccacaaggtcagtccattttgcatagcattgcaaccggttcccactcggccctcccgggctccccactggatgtaatgcatatagtaattcctaagattatttccgtatgcgcgacgcagatctgcatactgcagtcgatatgacctgacatcaaatgtactttttgcctggcgcccttcgttcattccccattgaacaaaatgctgtaacagtagatttgtatcatagccatatgcctgtttcagatcactgtatctgctagcataataaaatgggtcgaatatactactatagtcaactccattataaactgctgtataggaatgattttcattgttaccctgctcccctccaggttcttcatttcctcccggattctgaccaccagaagaactacccgtattactatctgtatcttccttaccatagtcatacttacactccggacgattgaccgtactccagaaagtctccggtacatgtgaccggttatttttccgcaaagtctcatcacttacattgtaatatgccaaagtgccggatgtatccgcccacgtcggatctacagcataccaataatttcctatatggatctgattccattcgtgcgttgtgcttgtcacaatgatcgtttcaattcctgctccattgcacaataattcaaatgcttctgcatagccggcgcatacactctgtcctctcataaaaacgctataacaagactgattataggatgcaccatccttatatatcgtattggttatcaccaattcatgtgccttatactccttgtccaaaacgcttgcctgcgcattgacctgactcatccagttatcgatcacactctgaaactggtcggtataattctggcgcgttgcaccatctacaaattcgtcatagacatcaacatagatcgttcctgcattctccacaccggcataatattccctgacataatcctcaccatccaggaaataaaattgcggattagaattaacaaaggcaatcgttgtattgattgcctctgtgtctgtcaagccgctatatgacacaccttgtgtatattcacggcttacgttcatgacagcagtctttccattgatatcccctgttccagtcagatatgccatacacatctgatagagaccatcataaagtttcttctgactcgctgtcatttggttgtaataataatctgagccatactttgcccagtaactgctgcctgcatttctggtataactcggctcatatacatcggtgtactctgaaacgacctgttctgtgacttgcggtgcatggtatccctctgcatttgttatttcattcgccgcataaaccggcaatgcatccagcgctgacacggtcacaaataccgcactacataataccagcaacagtttcttcattcgtttcataggttttctcctcacttactatcgcacaccgcttcttccttcaatctgtccataagatatgtaatgcatataatatgccggtaaattatcaccgtacgcagactgcaagtccgcatatctgcttcgataagactgcactgcaaacgtttcctttgcacatctgccttctttcattccataattaacaaaatgctgcaaaactgccacatcgttattgccaaaggcttttttcacatccgcattatttgccacataatagtaataatcatacaccgcagaataatctacaccattatatattgttgtggctccctgtaccgtcgtgcagcccgttgcaacacgcccttcctttttgccgtatcttatataatgctcataataggacttcaactgtccgccataagcattgcgcaggtccgcatattgcaggcgataggatgtcgcgttaaagttgctgcttgcctgccgtccctcattcatgccatagttgacaaaatgttgcagaactgcaatatcatcatttgatccataggcatttttcacatctgcattatttgcaaggtaataatcacaattataaacggatgcataatccacgccattgtactgtgtcacatatccctgtcgggaagtacagccggttccttttctatgttcacgatatccatatttcagataatgttcatagtatttcgataggtcattgacatacgcctgacgcaaatctgcatattgcagtttataagagttgacattaaacgttgcacagccctgccgtccttcattcataccataaaccgcaaaatgcgtacaatacttctttaaatcatcgccatataccgcagccagatccggattgttcttcttataatatgtaatatcaaagatcgggcttgcgatacgcccctctgccagaccataattcaggaaatggtcaagcaatgccttttcatcatatccatagaccgcttgcagatcggcataattattgtagtaatatgacgcatcaaaagccgcagaacaatcctccttggacaagccataataattcgcaatacccgcggcatctgccagaccaagttgctgcaatccactttcatttcccaggaaacgctggatatctccggcatttgtcagataagcatgctctacgatgatacccggaaatcccaacaatttactgttgtggttcacactataatagtccgtcacacttccatccggataggtgcttccatcgtttgaattgcggatcttgactcccgcgtttgacagaccgatccactgtaatacattggctatgctctgtgacagtgaatggctctccgcactcagatccggtcggtagccgctattttgtgcatacacttccacaccggatgtcgccgctgactgtgagacattcagatgcaggctgatataaacatctgcccccatattagaagcccacaccatacgatagtaattatccatggtagatgaagttccgggattcggacatgcatttgatgatctggtcaaatacacatccacgccttgatattgctccaactccgctttacaatactgggcaatctttaatgtcagttcttcctctttcaaaccggaacgggatgccccatgatgtgtactatcatgtcccgcatccaagacaactgtcagtcgtcccgtatttgcatattttttgatagctgccttttgcaacgcccagtcagcatcaccaaatgcttcttccaactccttgcgcatctgcgctgtcgtagagtcatcaccatcctttgcgtgcactatgctgcctgacggcacatacaagcaagtgcacataacaagagcaagcagtatggttattaatctttttaaaaatttatctttcatcgtcttttctttgagagttcctaaattccgcttctgccttcttttttaccgaagttcatataatgcagatagtaacttttcagatcatttccatatgcgctttgtaaatctgcatagttttcacgatatacccctgcattgaaatctgctttcgcctgacgtccctctttcattccataattcacaaaatgcgcaagcactgcctggtcatcatttccataagcattctttatatcgctgttatttgatacatagtagtagtaatcatacacagcagaataatctacgccattatagacggtcgtagctccctgcacagtggtacaaccggccccttttcgtccctcttttgctccataattcatataatgcaaatagtagttcttaaggttgctgccatatgcatttcgtagatccacatactgtaagcgataagagtttgcattgaaagtggattttgcctgtcttccttctttcataccataattgacaaagtgtgcaagcactgcgttttcatcatctccataggctttttttacatcgacattattatttacataatagttgtaatcataaacactggcgtaattaatgccattatagaccgttgttgcattttgcagcgccgtacaaccggttccctttcgtccctctttctgcccatatttgacgtaatgcaaatagtaattcttccagttcttaccatatgcactacgaagatccgcatactgcaaacgataggatgttgcactgaaagtagaaattgcctgacgtccttctgccataccataatttacaaaatgcttcaaaaccgtggcatcatccgtacctaatgcatttttcacgtcgacattgtgctccaagtagtagtaatagttatatacgccagaataatcaatgccattatagaccgttgtcggtccctgcatagtcgtacaaccggttccctggcgtccctctgcctttccataaagcatataatgctgatagtacaaaggccagttcgtaccataggcatagcgcagatctccatattgcagataataagattttggatcaaaggttgcgcaaccctgtctaccctctgccatgccataatttttaaaatggctcagcaatgctccggcatcactacccactgcacttacgacatctgcattgtgttctccataatatgtagcatcaaagacagccgaatagtcctgcccgctgatggttccatcatcataccaatagtccagatccacataaccggtgatacccggtacagatccctgggaagagaattggaagaaatcgtatgtcttctcataatctgtcgttgctaaatatcctgcatttgataaataacctgtccactgtggatttgaataatttgctatccatacgcgtccattggctgccagagagtctccgtcaaagaaatttcttaaggttgatttattggcatacaatgctccggtatagccattcaatgcgcactgattcataaaagcatttgccacggctgttctctgtgcagcattctgcctggaattgtataaacggcaatcgctacgatactgcgaaggacaccattcgtaatccatacagatcggcagcgtaatattatacatataaatgagccccgtcacataatttgcttcctctctcgcctcagcctctgttacagcctctgaccagaaataaacgcccacacgaagtcccgccgcaagtgctccctctatgttctgcttatagcacttgtctgtataaaatgaaccatcattatagcgaccaccaactttgacaatgacaaaatcaactccggaattccttacagcactccagtcgatcgtaccacggtcattctgccagtgcgatacatcaattccaattctaggccactcgtctacacgcggactggttttggtatagcccatgacactggtggaatcgtcatcaaaaaagccctcatctacctgtcctgacatacgataatcattaccatcaaaatgggccactgctgccttagcctcaagaatgcctgtgttcatgaacaatccgacaaataacgtcgtgatcaacgagacacataatcctcttaccttttttgaatacttcatctctcttgttttcctttctccactttggtaatcttcacctttgaattcatatcataaaatcctactgtgtttttgtctgaaacgactgaaatatttatcacatcatacaagcgatggtagacagtaaaatccccatcgcgatatccagtacaacttatagaaagcagatattcaccgccttgtagattcatctcctgattgaactcacaaagatatacatctccagcattagccacatctatttcctgtttttcgtacattgtattggtaccggtaatcgctgtgccttggatatttttaaaagtataggtaaatatcggattctgaaccgtgtcttcaaatttgacctctgataagatagaaaacctggttcctttttctatactgcttgttattgttccctcttcatcacgaactgcaaaatcaatgatatgtgccttaccgttcccatattcgtcaagagctgggttgattttatactggtttttccacaattccaccttatcacttgtattatcgaacaccggcgagtttattctattatgttcctgttcgtcctccataaccatttcctgagttcgttcatcaagttctaattggttgacgagaagtttcttgtacattccaatcatttgcttgggattaccttctgctatcttcgctcctttgttcaatagaactacccgatcgcaatattttgcaacactacctagatcatgactgacaaacaagattgtttttcccaacttcttgaaatcttcaaacttcttataacatttagcctgaaagaaaacatctcctacagaaagtgcttcatctactattagtatctcagggtcaatatttattgcaaccgcaaatgctaagcgaacaaacataccacttgaataggttttgaccggctggtagacaaaatcaccaatatctgcaaattttaatatatcatcaagtttcttatctatctcctcccgggagaatcctatcatagtcccattcaaatatatattctctatacctgtatactccatattaaatccggctcctaattctagcagagccgaaatacgaccattgatatccacttctccatctgttggattcaagacaccagtaataatctttaggatggttgactttccagcaccattggttccaataattccgactgtttccccttttttcacggagaaatttaaatcatgcaaagcataatgttcatgataccgtggcgcttttgatagtccaaacgcatccataatacgatccctattacgatcatataacttgtacattttacttacattttttacttgaatcgcatattcgctcatagttatccctcgttccaatcttataatacatccgcaaagtggacttgaagttttttaaatattgtgctaccgataaggaaaaggacaatagtcacaccccaaaaataaatcgtcgtttctggtcggttccaaaaccaaatgccattaatcatagaatctctataaccagatacgatataatacatcggatttaatttcagtatgatctcaatcggcttggaaattctgtcaaccatagcatccatattccacataatcggtgtcatccacatcaaaatctgcaaaataatattaatcaactgtgttaaatcccgaaagaaaaccgtcatcgcactagttgcatatataattcccacgcataaacaaatcattgcaaaagagtagtacaaaatctgaagtgtatatacggttggatagtaatgatatgccgcatacaatacgaccataaagccaacaaaaaaaagatgcacaaacagacttgaaatgatttttacaataggcaatacactgatcttgaaaacaactttttttacaagataattatattcaaccagaacattgctgcctgtattaattacctccgaaaaataaaaccatggcaccatacctgccacaagccatatgacatatggcacattaattcccgcttttgtaatctgtgttccggcatttaacgctttgtcgaatacaaaccaatataccaaaattgtaataattggttgaatgaacgcccaaataataccaaaatatgaacctgcaaacttggctttaaaatcgttttttgacaaattgaaaatcagtttcttattctgcgcaatttcacgcaaaattccacctgatttctttgttttgctattactcatttctattctcctcgttatacatgatactatctgtccattttaatttccatccaaagacagaattctttctcacttgcactccaacttgatatttatcccagcctgtcaaaaactcctctttaggcagataacatgagaatcctacatagcatgtaccatcattcaaattatttgctacatcctctcgcatttcttttaatgctaatgctcgcacataatgattttgttcatcacgtaaccagacataaacatcgctgtcattatcacatttgggttttcctgtagagtaccatccacgaacaaatatctcattttcgtcatcatcgaaattatcaataatgacaacataattgtcctcatattttgaacaataatgcgtaaccttttgtacatccgcatatacgattgccggtgcactgtttctcacttcataatttactttgtccggcactaaattaacgttataaaatggatctttaccattatactgaggatggctttcatacaatctctgtctttcttttaacagcctttttctctttgccccatcctcattatccgttccgcggcttaatgattcgtaatgatacaaggtcacatcattacgcacgacattataccaaccgcattcagataatttgaagcacaaatcgacatcattatagcctatcttcaattcttcttcaaagccgcccacttgctcaaacttgctcttttgaaccaccaaacacgccgctgtcactgccagccagttatattcaattttgtttctgccaaaataataaatgtcattatctgaaaatccgatctgactatgagacggtcctatttccaaatttgtaataccaatatgctgtatcacgttgctgtctggatatagcaatttcgcaccgacagccccaacatgtttttgtgatgcatgtccaaccattctctctaaccattcgtgacgaaatacttctgtgtcatcattcaaaaacagcaagaactctccattcgctgccgcagcaccaatattacacattttcgaaaaattaaactccatcggcgtatatatatactgcgcatttttttctttgagataattttctatcttctttttattactctccttgctcccattatccacaacaataatctcataccgatttcgcgtataatatgatacagaatcgatacaacgcattagagtttccggattatccttcgacggaataataatacttgtcaacgcatctttaggtgcatggtatacgacacgatactgatacatatcaggtacatactccacttctgcatcaattccgcgtcgcgccaacatttcttctttcatttgacgcattacttccaacgcatatggctttgcttctggattagatgcgatcgattcacctctctctctccaataatacagtactttgggaatatgccccacgcgttcattactactatgctccataaaacggaacgtaaaatcataatcttgcgttccattatattgtgtgcgaagtccgccaacttgttttactatgtctgctcgatatactcccaaatggtttgtgtacattaatgacataaacgtatctggagaccagtccggcttgaaaaatggcatgtgacgctttgttccgtcttcagacaacttatcttcatcagaatatatgaaatccagttcaggatctttatttattgcaacagccatttcatataatgcatgctctgacaaaacatcatcgcagtctgaaaagactatgtaatctcccttagtagcattaatccctgtattggtacattctgatatatgtccattttcctttcgatatattacctttactctatctcttttttcatactttctcagtacatcacgaacttcatcccaagtcgaacagtcatctaccaaaatcaactcataattatgatatgtttgtcctaatacagattcgatacattcttccagttgttgacgcaatacattgtatactgggataacaatcgaaaacatcgtactgggtgaaattttttccgtagtccaaacggctggttcctcttccctaatccagttttg

SEQ ID NO: 12545 - DNA, 4700 bp, Unknown
  gut microbiota DNA sequence
ggcatatagcggaactccgatctcgattgagcgtttaatggcaggtgccaaagaatacgatattgatcatatatatccacaggcatatgttaaggatgacagcattatcaataataaggtattagtgctgtcagaggaaaatggtgcaaaacaagatgtttatccgatcaaagcagaaattcgcaaccaaatgcaaagtacatgggcatactggcatcatttgggaaccatttcagatgaaaaatacaaacgactgattcgctcaactccatttacagaggacgaaaagtatggatttatcaaccgtcagttgacagaaacgtcgcagtccacaaaagtagtagccgaattgctgaaggaaagatttccacagacggaaattgtttattctaaggcaggactggtttctgagtttagacatgagtttgatctgtataaatcacgtacatataacgatctgcatcatgcggtggatgcgtatttgaacgtggtggtaggaaatgtgtatcatatgcgattttcgcgtcaatggttccgtgtcgagtccaggtatagtgttaagacgaaaacattatttacacacactgttaaatgtcaggatcaaattgtttggaacaaggaagaaatgttaccgcgagtacttaaaacagcaaagaagaatacggctcactttaccaagtatgcaagttttaagactggtggattattcgaccagcaaccagtaaagaagggagcaaacttgataccattaaaggcaggactcccaacggaaaaatatggtggctacaataaggcgggggttatgttttttatcccggtacgctataaggctgggaaaaagacagcattgatgattttatctgttgagttaatatatggaaagcgatttttagaagatgcatccttcgcaaaagaatatgcaaaagacagattgcaacgcattttaggaaagaaagtagacgacgtgactttcccattaggtatgcgaccatggaaggtaaatacagtgctatcactggacggatttcgtgcatgtattacaggtgttgctagtggtgggacaaaattgattgcacagccaattatgcagttttcgtcggatgaatactggaagtattatctgaaaaaagtagagaggttaacggaaaaagtatccaataacccacgatacgtttatgatgtggactatgatgtagtgcaggcagaggataatttgaaattatatgacctctatatagataaattgcaaaataccatttacaaaaaacgaatcaactctccattacaacttcttatagatgggagggaacggtttataggatgtaatgtaatagaacagtgtcaggtgttgttaaatattcatcaggtgtttggcagaatgacggcgggatgtaatctggaaaaaataggtggaaaagcgcatagtgcagcgacagtaagttttagtagcacgatgtcaaactggaaaaagaattattcagatgtacgtattatcgatcaatcggcatctggattgtgggaagtggtttcggataacattttggagtatgtatgagttggcgagtggtagtcattgaaagtcaatccaaattagattacaagatggggtatctggtcgtacgtggattggagacaaaacgtgttcttttagatgaaatagcggtgcttcttatagagaatcctgcagtttctatgacaggtgtcttgattgcggcgttgacggaaaagaaaataaaagtaatcttctgtgattcaaaacgaaatcctattgcggaattggtacctcatcatggttgccatgacagttcagccaagattcgttcacaaatagcgtgggaacagatggtgaaagatagtatctggcgagatattgtaagtgaaaaaatacgaaaacaggcagattttctcttggagatagggtgtttggagcaggcaaggatgctatccggttatacagaacagattgaacttgcggatacgacgaatcgtgaaggacacgctgcgaaggtgtattttaatgcactttttggaatggaatttaccagaagtgccgatatagccatcaatgctgcgctaaactatggttatagcatgattctttcggcatttaatcgggaaatcagtgcgaatggatatttaacacaattgggaatatttcacaataatatgttcaatcattttaatttgtccagtgatctgatggaaccatttcgtattttggtcgatcggcttgtatatcaaatgcagccggtggaatttgatacagaagaaaaacatgaaatgtggcgcatcatggatcaaaaagtgagtattgatggacagagtcagtttgtaatgaatgctattaagatatatacaaaaagcatattggatgcaattaatgatggagatgcttcgcttataaagttttatggtatgttgtagcgaaagcatttgggagataaaatggcagggtttcgatttatgaggatgttagtcttttttgatttaccgacacttacaacggaagacaaacggcaatatcggcagtttcgaaaactgttgataaaaaatggatttattatgttgcaagaatctgtatattgcaaaatgatgacaagcccatctatggaaaattcgattaagttgcttattcataagaataaaccgtcacagggaatcatacagacgctggttgtaacagaaaagcaatttgtcaagatggattatgtagtcggagagtatacaggcgatgtgatcgatacagaggaaaggctggttgtgttatgaaagtatatattccacaaatagatagcacagttacgtgtgaagcggggtgttgccagacaatcgtgattgagaatcaaaaagtattgtgtgatattctaaatgatttggctgaccagtcgcaaggagcagaaggaaaaatagttttatcgaatgaggataaagttcttccaatggcaaaacatgcagaaatgatatcacagtttatcccttttgatatgaatcaaaaaggactcataacaaagattgtcaatcggatgcaacaacgggcaataggagaagattattttttgaagatgtcaaccctggtagcagaatgggagcaattacttttggaattatccacggagatgacaggccatataagtttttcaaaggttaatatagaatccctgatcaaggcagcaggagtggaagtggagaatgtttatgataatctgggggaaaagttgttggattattttgaactggtgcagatatacgatcataataagttgtttttcctgatcaatctgagaagttatttatcggatggagagatggaagaattttttgaagatgtgcaaaatcgtggatatacggttttattcatagatgccatggaacatccaatttcaaagcgagaacatagaattatagtggatgcagatcaatgtattttatgttaaaataaaagtgtttccgaaaaaaactagggatgttacacaaatatttcgcagatatttttctcgggcaacttgaggtttgaggtttgagagcagtgtaaattcgtaggggaaacaaacaagagggggtgcgactaaaaacgaatcgcagtttgagagcagtgtaaattcgtaggggaaacaaaccggcgaacttccacagccgggcaaagtattgtttgagagcagtgtaaattcgtaggggaaacaaacccttggtcgatctgcaagagaaggtcagtgtttgagagcagtgtaaatttgtaggggaaacaaaccagcacccggaaatcttctcatccagagggtttgagagcagtgtaaatttgtaggggaaacaaacaaataccaccgtttttataccaactgatccgtttgagagcagtgtaaatttgtaggggaaacaaaccgtttgacgaattattctctcagcttgacgtttgagagcagtgtaaatttgtaggggaaacaaacatgtgggaacagaatcaaccagttccgctgtttgagagcagtgtaaatttgtaggggaaacaaaccgttgtagtcacaaaacttcatgaacttatgtttgagagcagtgtaaattcgtaggggaaacaaaccatcggtctgctctgtttcctttacctcgggtttgagagcagtgtaaattcgtaggggaaacaaactgcagtttttcttccagtgcatcaggaacgtttgagagcagtgtaaattcgtaggggaaacaaacgggagggggaacaggaaattatagacatgagtttgagagcagtgtaaattcgtaggggaaacaaacaaaatgcatacataaaaatgcgccatatgtgtttgagagcagtgtaaattcgtaggggaaacaaacactggaaaatgttcagcattatgtacaaccgtttgagagcagtgtaaattcgtaggggaaacaagctacaaaagatttttccgtatttgtacccgtgtttgagagcagtgtaaattcgtaggggaaacaaacatttggcagcgtccgtaaatacaagggaaagcttgagagcagtgtaaattcgtaggggaaacaaactatccatttttacctccattctaaaagactgtttgagagcagtgtaaattcgtaggggaaacaaacgctgcataactgatagcctctccttttttcgtttgagagcagtgtaaattcgtaggggaaacaaacgctgcataactgatagcctctccttttttcgt

SEQ ID NO: 12546 - DNA, 13504 bp, Unknown
  gut microbiota DNA sequence
caaatagtacgtgtatatatgaaaacaatatataaagacagataacaatataaatatataaaaatagtcgaataatcagacaatataaaagaaaaagttgtttacaaacgggaaaagcaggagtatattagttagcgacagatgaattttcgggaaggaaaagatatacagagaggatggatacgatggagaataagaatcagaagacgggcttatatcgacaggaatttgaacatgataactgcggtatcggtgccgttgtcagtatgaaagggatcaagacacatcagacagtgtcagatgctctaaagatcgtagagaatctggaacacagagccggcaaggacgctgaggggaagacgggcgacggtgttggtatcatgttgcaggtatcgcataagttctttagcaagatcgcgggtaatcttggcatagatttaggagaggagagaacctatggtgtaggtatgttctttttccctcaggatgagttgaaccgcaatcaggcaaagaagatgtttgaaatcattgtggaaaaggaaggcatggaattcttgggttggagagatgtaccgaccaatccaaaggttcttggaaagaaagcaatcgactgcatgccttatattatgcagggatttgtgaaaaagccggcagatgttaagacaggactcgattttgaccgcaagttgtatgtggcaagacgtgtatttgagcagacctgtgagaatacctatgtggtttcactttccagccgtacgatcgtatataagggtatgtttctggtaggacagctgcgcaccttctttactgatctgcatgatgaagattacgagtcagcgatcgctatcgtacattcccgtttctccaccaacaccaatccaagttgggagagagcacatccgaaccgttttatcgtacataatggagagatcaatacgatcaagggaaatgcagaccgcatgctttcccgtgaggagactatgtattctgagttcttagagacagaactttctaagatcacaccggttgtcaacacttccggttctgactcagcaatgcttgacaatactttggaatttttggtcatgaatggactgccattgccgcttgccgtcatgatgaccataccggagccgtggatcaacaatcaggcaatgaatcaggagcgcaaggacttttatcagtattatgcgaccatgatggagccttgggacggaccggcatccattcttttctcagatggagatatcatgggagcagttctggatcgaaacggtctgcgtccatccagatattatgtgaccaaggacgactatctgatcctttcttccgaagttggtgtactgccgatcgatgagagcaggatcttatccaaagaccgtttaaagccgggcaagatgcttttggtagatacggttgccggacgtctgatcgatgatgatgaattaaagaccgcttatgcgaccaagcagccgtatggtgagtggctggacaagaacctggtacatctgcatgatctgaagatcccgaataaacgtgtaccgaaccacaccaaggaagaacgtgccaagttgcagaaagcctttggctattcttacgaggacttaaagacttccatcctgccaatggcactcaatggggcagagggcatcggtgccatgggtatcgatacaccgctggcagtactgtctaaccagcatcagccgctctttaactatttcaagcagttgtttgcacaggttaccaatccgccgatcgactccatccgtgagaaggtcgtgacatctacgaccatctatctgggcgagagcggcaatgtcttagaggaaaaagaagaaaattgtaagatgcttcggattaacaatccgatcctgaccaatacagacctgctcaagatcaagaatatggatgtggagggatttaaggttgagactattccgatcacatattataagaatacatctttggaaaaagccatcgatcacctctatgtagaggcagatcgtgcgcacagagagggtgctaatatcatcatcctgtctgaccgcggcgtggatgagaaccatgtagccatcccatccctgcttgcagtttctgctttacagcagtatctggtacagaccaaaaagaggacaagcctttctgtgatcctggagagtggagaaccgcgagaggtacaccattttgcaacccttttgggctatggtgcatctgccatcaatccatatctggcacaggagagcatccaggaactgatcgatctcaacatgcttgacaaagattattatgcggcagtggattcttataatgaagccgttatcagcggcatcatcaagatcgcatccaagatgggaatttctaccgtccagtcttatcagggagccaagatctttgaagccatcggtatcaatgaggatgtggtaaaccgttactttaagggaacggtcagccgtatcggcggtattggtatcgaggatatccaaaaggatgtagaaatgctgcattcacaggcattcgatcctttggatctgcatacggataataccttggacagcaagggcgcacacaagatgcgcagtggcaaggaggaacacctgtataacccacagaccatccacttgctgcagctttctaccagaaccggcgactatgatacctttaaggaatatacctcacttgtcaataaagaggatgataccattatgaacttgcgcggacttttggatttcaaatatccgaaaaagggcatcagcattgatgaagtagaatccgtagatgagatcgttaagcgatttaagacaggtgccatgtcctatggatctatttccaaggaagcacatgagactatggcgatcgccatgaacatgctgcacggaaaatccaattccggtgaaggtggtgaggaagaagagcgccttaccatcggcaaggacggaaagaaccgttgctctgccatcaagcaggtagcatccggtcgatttggtgttaccagccgttacttggtaagcgccaaggagatccagatcaagatggcacagggagcaaaaccgggtgaaggcggacatttgccgggcaagaaagtttatccttggatcgccaagacaagactttccacaccgggcgtatccttgatctcgccgccaccacatcatgatatttattcgatcgaagatctggcacagttgatctacgatctgaaaaatgcaaataaagacgccagaatttctgtaaaactggtttctgaggcgggggtcggaacggttgcttccggtgtggcaaaggcaggagcacaggttattttgatttccggttatgacggaggaaccggtgccgcaccgagaagttccattcacaatgccggacttccgtgggaacttggacttgcagaagcacaccagaccttgactatgaatggtctgcgcaacaaggttgtcattgagacagacggtaaactcatgagtggtcgtgatgttgcaatcgctgccatgcttggtgccgaggaatacggctttgctacagcgccgctggttaccatgggatgcgtgatgatgcgtgtctgcaatctggatacctgtccggtggggattgcaacccagaatccggaattgcgcaagcgctttaccggaaaaccggaatatgttgtcaactttatgcgttttatcgcacaggaactgcgtgagtacatggcaagacttggcgtgcgcagcgtagatgaactggtaggtcgcacggatcttttggaagtaaaggagagtgcaaaacagggcagatatgcaaagatcgacctttctgcgatcttggacaatccatatgccaaggatgcaggaaagatctgctacaacaagaaaaatgtatttgatttccagttggaaaagacggtagatgaaaagatccttttgaaacagtttaaggacgctttggaaaacggaagcaaaaagggtctacagattgatgtgaccaataccgaccgttccgtaggtaccctctttggcgcggagatcaccagacgctttggcgaatctttgccggaagatacctttacggtacagtgtaacggtgccggtggacagagttttggtgcctttattccaaaggggctgacgcttgaacttgtcggcgacagcaacgattactttggtaagggactttccggtggaaagttagtcgtttacccgccaacaggtgtaacttataaagaagacgaaaatatcattatcggtaatgtggcactttacggtgcgaccagcggtaaagcctttatcaacggtgtggccggagagcgtttctgtgtcagaaattcaggtgcaactgcggttgtagagggctgtggcgatcacggttgtgaatatatgaccggcggacgtgtcgtagtcttagggcagaccggaaagaactttgctgccggtatgagcggcggaatcgcttatgtactggatgaagatgcatccctttaccgaaaactcaataagaccatggtatctttggaaccggtgacagataagtatgatgtcttagaattaaaggagatcattacggaacatgttgcttacaccaattccaagaagggcaaggagatatttgacaactttagccagtatctgccgaaattcaaaaagatcgtgcctcacgactacaagaagatgatgatgactattgtccagatggaagaaaagggactcagcagtgagcaggcccagatcgaggcgttcaacgctttgacaaagtaagagaaaggagataccaatgggaaaagcaacaggatttttagaatatgagcgtcgggagtcacaggcgatcgacgcaaaggagagaatcaagaattttaacgaatttcatattccactttcaacagaagaacagcagagacagggatcacgttgtatggactgcggtgttcctttctgccagtcgggtatgacgatcaaggggatgacctcggggtgtcctctcaacaacctgataccggagtggaacgatctggtctatcatggcaactgggagcaggcgtacctgcgtttgcacaagaccagcaatttcccggaatttacttgccgtgtatgcccgggactttgtgaaaaggcatgtacctgcgggctgaacggagatccggtcacgaccagggaaaatgagcgtgctatcattgaatacgcctatgcacacggtctggcagacgcaaagccgccggtcaatcgttccggcaaaaagatcgcggtcatcggttccggtccttccgggcttgcagcagcagaccaactcaattccagaggacatgcagtgacggtctatgagagaaatgaccgtgtgggtggattgctccgttacggtattccaaatatgaaactggaaaagcagatcattgaccgcaagatcgctgttatggaagaagagggcattacctttaagaccaatgtagatgttggtaaggacatcaagccaaaggaactcctggcagaatatgatgctgtgatcttagcatgcggggcatccaatccaagagacatccaggcgccgggcagagaggcaaaaggtatctactttgcggtagattttttgacctccacgaccaagagcctgtgggacaatggattaaaagaaggaacttttatctctgcaaaggataaagatgtgatcgtgatcggtggtggtgataccggtaatgactgtgtgggtacctgcatgcgtcatggttgcaaatccatcacacaactggaaatgatgccgaaggcaccggatgagagacgggagagcaatccttggccacagtggccgctggtctgcaagacagattacggtcaggaagaagcaatcgcagtctttggacatgatccgcgtatttatacaacgacggttaaagaattcaagaaagaccgcagcggcaacctaaagagcgttatccttgtcagtctggaatccaagacggacgaaaagaccggcagacgcatgatggtgccggtggaaggtacagaaaaagaagtgccatgccaactggtgctgatcgccgcaggttttttgggaagccagtcttatgtgaccgatgcctttaaggtaaaggtggacggcagaaccaatgtcgctacggaggcaggaaagtttgccgcttcggtagacaagatctttaccgcgggcgatatgcataccggtcagtcgctggttgtgaaggcaattcgacagggacgtgattgtgcaagagaagtagatgaatatctgatgggatattctaatttataatttagatttacggaaaagacaccgacggtgcagagtcagaagacgactttgtgctatcggtgtctttttgtgtccggatatgtacaccgtgtatggtataaagcccatccgtggcttaatttataaaaatttaagaattgaatcttatgtccttccttgtaaaagatagtcgctatgccttaaaattaaagtaagaaaatggcaggtgatttattatggaaaaaggaaagaaattattgaaaaataaaaaggtctgggtatttttacttctgataattttggcggtggcgatcggctttatcgtggttgtccgcaagcagaagcaaaaggaagaacaggtggcggaaaaggtctatcaggtcaaggtcatggaggcgggggagaccgggagtgatgtaagtctttcctatacggggattgtccagccggaagaaaccatccaatgtacctttgaaacggttgggacgattgagaccgtgaatgtcgaaaaagggcaggaagtcgcagagggacagatcctttgtaccatggatgccggggatgcagaggatcagttggatagtgccaatcggacgttggaatatgcggacaagacaagaaaaaatgcgcaggaatcttatgagaatgcccaggaggactatgcgacagcctgcggtaccaaacgtgaattggaaaatctagatgatgccatagcaagaagggatgagcagcagaaaaaggtggatgccctcaagagcaagttggatggcatgtcgcagtacaagccgggcaacggcagccttggcaatatgccggagaccaataccgagtattattctaccaagttggaactggattctgcacaaagcaccttggaagtctatcagcgaaatgtagacagtgctcaggaagcctatgataaaaaggcaaaagaaggggcagattccgatgaggcaaaagcccagaaagaacggctggactctgcgcgtgatgccttggataatgccaacgaagcctatgataatgctgcggacaatgtggaaaaggcacagagtgcagtagataaatgtacgctgaaagcacccaaggcgggatatgtggtcaatgtttctgcgacagagggcagtgtttcaacaccgatcatgccggcggttgttctggcaacgcatgatgttgtgatcaatttcggtgtgtcacagacagatattacatccctttctgccggtatggccgcacagatccagattggagataagacttttgccggaaatattaagagcatagatgtgacgccggatgagaataccaggacttatgcgacggatgtgacggtagataccgcggatccggaggtatatctgggagaactggcaaccgttgagattaatataggagaacggaccggcatctggctgcctttgtcggtgatcctaaatgatggcaatgattatgtttatgtggtggaaaatgacagggcaaagcgtgagtatatcaatgtcctggaagtcagtgatgatcaggtgctggtcgaaggaacaaaagcaggggataagatcatctgcgaaggcatgaagctggtccgtacaggtagtgctgtgtcctatgacaaggcagaataagggggcagggcatggataaattaacaaaaggtttattacataatcgctatattgtggtattctttctggcgatcattgttttactgggcggcatttcttattatctggtgccaaagcaggaaaatccggacacgtccatagcggttgcgctcgtgacgactatctatccgggagcctcaccggaagaggtagaggaatacgtgacagataaattggaagatgccattgggcagttggcgaatgtggactatacaaccagtatgagtatggaatctgcaagcgccgtgatcgtgtattataccaccgatgtgacgatcgaccaggtggaatccaagttgcgagaatgtgtatcggatgtgcagggcgacctgccggatatgtgccagacaagtacagtaaaaacggatctggtctcaaataatcaatttatcattagtttgtcgggagaagactattcttcggaggaactggtagcctatgcagatacgatcaaggatcaactggaggatatcgatcatgtggcatcggtatccattgagggcgccagcacgaaacaggttgtggtggaggctgacatccagaaattgcagtcttacaatgtttccattgaaaatatcttatccttgatgcaggcgcagaaccttaatattccggcaggaagtattgcttatgattccggtacggtcacggtgaccagtgacggactttttaccagcctgtcagatattgagaatacagtgatcggcggtgcggatgacagtctttcttttgtaaaattaaaggatgtggcaaatgtctatgtggaaaacaccagtgataagcattatgagcaggacggaaaaaactgtattcttctggtcggcaagtttgatgatggtgtcaatgcggtaaatgtcggcaaagatgtccgcagtcagatcaatacgatcaagaagcagttgccggaaaatctggatttccatgaagtcatgtatgcgccggaggcaatcagcgaaaatatcaacggctttatcttgaatctgatcgaaagtgtcctgctgatcatggtggttgtcctgatcggtgtcggtatccgcaatgcacttgtcatcagtacggcactgccaatcagtgttctggtgacttttacggtcatgtatcttttaaatatcgagtttcagtttatatcgatcgcagccttgatcatcagtctgggtattttggtggataatgcggttgtgatcagcgaagcgatccaacagcgcatgaacgccggacaggaaaaagaagaagccattgtgggcggtgtcaaagaaacctggctgccggtactgaccagtacacttacaacgatcgtgacctttagtattatctattttatcccggggacgatcggtaaggtggcaggaacgatccctacggttgttatcacatccctgatcgcttcctatatcatggcgatgtgcggtattccggttttggcatatttcttctttaaaccggaaaaagaaaaagaaaataaaaagccgaatccggtgcatagattttttgaccgcctgctggggatcgggcttcgctatccgaagcggacgctggtgttttcctttgcaacgcttggcgtggcagcacttttagccacacaacttggcatgcagtttttcccatattcatcaaagccggtgatctatctggatgtcagtggagaaaccatgaatctggatgcgacggaaaaagtcatagatcaggtagaagatgtcttaaaagaggatgaactggtggcacattatactacagccatcggcggcgggctgccgagtttcttcatatcggtaccttccatgaatgatgcagacaatgccgggcgcatcatgctggagttagatgaggatgcattgaaaaaggttggcagtacggaaaaggctgccaaacaactgcaagaggaaatcaatgagaaggttaccggcgcaagcattgaggtcaaatgtctggaatactccctgccggcagatgataagatcgtttatacggtatcgggggatgatctggatgaaatcaatgcatttgcggcacagatggtagaagacctgtcccagatagaaggaacgacgaatgtgcgtgacacttccgtaaatgcacaatatgagtacaaggtaaatctggacagtgagagattatccagttatggacttttgaaatatgatgtggtcaagcaactcaataccagccttatgggggcaacggcatccacttataccggcgcagaggatgagatggatatagtcgttagggcaaaggtggatagtctggaacaactgaaaaatctgccaatttccggctccgtcagtgatacccatgttttgttggggcaggtggcggacatcacgctggagccgactattccgctgatcaaccattataacggaaagcggtatgtcaatgtcttatccggtgtgcaatccggctatgtatccggtacgatcgaatcaaaatttgaaaaacaatatctggacaaaatggatagcgagggacttaccattgtggaacagggcgagatgagcaatatgatgactctggtcggaaatctgatcaaggcggcaggtgtggcgattttgatcatatacattatcctgcttctgcagtttaaggattttggaaagccgctcaacatactgacttccataccgttgtcgctgatcggctgttgctttggactctggatcttaaacatgaacattcaggcgatggcgcttttgggcattgttgccctctttggcattgtggtaaataatggtattcttctgatcgaggtcatcgacgagaaacgaaggaatggcgagagcgtccgggaagcctgccgcagtgcggtggcagcaagattccgtccgatcatgatctccagtgttacgacctgtatcggtttggtaccgctgatcgtatcacaggatcccatgtcagcgccgatggcggtaacgctattattcggactgctcttttctaccatacttaccatggtggtcgtgccgacgatttattatttgcgggagagcaagaaagaaacagaataaggaaaagaaaacgctgtgggtcaaacctacagcgttttgttatgataggaatatttacttccaagaaaaagtcgcaatgccataaatataaatgatggcgatgatcacaggtaccacgaaggtaaaaatgggcttttgccagttcttcatcttaggcccgacaccggtattggcttccttaaagaaattatcccatccccagccaaacttatgacagcagaagagggcgaggacgagagaacccagcggcagtatgttagtagaaacaacaaagtcccaaaagtccatccaggtcgtcccttcagcaaatggctggaaatgcaggacattaaatccgagtgctgttgtcagtgccagtaaaaagacgatgatgccacagaccagacttccctttggtctggaccaaccggtcagttcgcggaccatggcaagaatattttcgcagacacccagtaccgtggagagcgcagcgaagatcataaacaaaaagaataaggatccccagacgcgcccaccgggcatattattaaagacggttgccatcgtatcaaataaaaggctcggtccggcaccgacttccagatcataggtaaaacatgcagggaagatgatgacacctgctaaaaaagcgaccaaagtatcaagtgtgatgacatgcagggcttcgcccatgagggtgcggtcttttccgatataagagccaaagatcgccatgcttcccataccggtggaaagcgtgaaaaatgcctggttcatggcggcaaccacgacagatccgttgatcttggaaatatccggtttcagataaaaaagtaagccttgtccggcaccttttaacaaaagactgtggactgccagtaccagcatgagcactaaaagtgcgctcatcataaattttgtgatccgctcaagcccgccctgtaaatggaaggacaggatgaaaaaggcaaggacaaccgttatgaacaggaaagtcacattgatcgtaggacttgcgatcatggaggcaaatcctaaagtctgctgcctaccggcaacaaatttacagaaataatagacgagccatccgcataccacggtgtaaaatgccatcagtgtcagattaccgatcagacagataatgccgaaaccaccccatttttgacccggcttttccaattttttatacatattgagaggactggtctgtgcggctctgccgatcgcaaattccatggtaagagccggaatgccgaggataatcagacagatgatatagaccagcataaaagagccgccaccattttgcccgcacatccatggaaatttccacatatttccacagccgatagcgcaccccgccgatagcatgatgaagcccagacgacttcctaattgttcacgtttcatataaatctataaatcccctcttatttattcaactcggcgatcatataaagcaacttctcagaatcctcccatccaagacatgggtcggtgatggacttgccatagacctgatgatcggaaatcttctgggagccttcttccagataactttctaccatgacgcccttgaccaggttcttgacatcgcttgagaactggcggctcatcatgatttcacggacgatacggatctgctgcttgaactgcttgttggagttggagtggttggcatccacgatcgtagccggattgacaagatccatagaggcatacatatcggaaaggcgaaccagatcctcgtagtggtagttctgtacacagttgccatgcttgctgacagccccgcgcaggatcgtatgcgccaaaggattgccggttgtgcgcacctcgtaaccggaaaaagtaaagtggtgtgcatgttgtgctgcatatacggaattgagcataacggaaaagtcaccgctggtcggattcttcataccacttgctacatcaaaaccactgacggtcagacgatggtgctggtcttctacagaacgtgcaccgatggcaacgtaggagagcaggtcttcaacataaggccagttctccgggtagagcatctcatcggcacaggtaaaaccgctttctgcgatagcgcgcaagtgcattttacgcatggcgatcagaccctcgaccatatccggtgccttggtaggatccggctgggaagcaatgcccttgtaaccggaaccggtggtcctaggtttattggtatagatacgaggaacgatgagcacacggtctttgatcttttcctgtacggaggtcaggcgattgacatactcacagacagaatcttcgttgtctgcggagcatggcccgatgatggcgagcacgcggtcatcttttcctgtaatgatatctgcaatctgctgatctctgtcagcctttaatgccttcatctccggtgttaaggcaaattcacttttgatggtgtccggatccggcatcttttttaaatatgaaaaactcatgataatctccattctgtcgcagattgcgacataaatttaacaataactatattataagaaattgttggctctgtcaaacattggcatgtttcttacattgactttggctcgtgattttgatagaataaacaagatttgtattaagtaggcgtagcgtagctggataacgcatcggactccgactccgaag

SEQ ID NO: 12547 - DNA, 269 bp, Unknown
  gut microbiota DNA sequence
atttccgcagcttttacttcaagcgcttcaaagtagctgcggttatgcttgttatagatctcatcgtaaagcggtacaagatcaggatatttttcggcgatataatccataattgtctttttaaaaccgcctcgaagattgagattttcgagccagaacagatcgcactgattctttacccgctcaaagatggcttcaaagtccgtgataccggggaataccggggatacgaaacagactgtacggatacctgcttcatatacctgctt

SEQ ID NO: 12548 - DNA, 887 bp, Unknown
  gut microbiota DNA sequence
taccttcatagaggttaagatctgaatcagacaactggttggtgatctctgtaccgttggcagaaaccgcataggtcgtggtatccaatgtcggattgttccatgagcctacaagggctgcatttccctgtccgtccataccgttttctgcactgtagcccttggctgccagaatattgtttacggcattatgggcatcggttgctgctgtaaaataatatgtacctgcatctaagatataagtctctgcgccataagcatcataagatgcgatgtctgcgccgtctacgaccatctcaagttcctgagattcgcccggctccaactcctgtgtcttatcaaagccgaccagagatacggatgccttttccactttattctcgacatcataagtggtatatggagactgcacataaagttgtacggtttccttgccagccactttaccggtattcgtcacggtaaccttggcatggtactgatgatttgcctcatcataagaaaggctatagttgctatagtcaaaagtcgtgtacgaaagaccgtaaccaaatgggaatgccacattgtcaccgtaaacataatcgcctgcggaaccggtctgcataatcccatcctcataacgagtctcataatacttgtaaccgacatagataccttcctgatagatcatataggtatccgcactgtccgggatcacgccttcttcgtagccttcatactgtaccggtgtgaagtttgccattgccggtgatgaataattgtcatagcagtaggtgtctaccagactaccggatggattgaccttacctgccaaaatttctgcaacagcgttgataccgctgataccgacatcgccgatccaaagtactgcgtcaatgtcatag

SEQ ID NO: 12549 - DNA, 224 bp, Unknown
  gut microbiota DNA sequence
ctgactaatgtatccatctgcctgattgccaaatttctaagcaatataagtctttctgattgagatttcccctgctcaattaaaatagcattataactttccatatttgccaataccaacaactgatttaaatttgcatcatcacgcacattcccctttttacccggattattatttttccattgctttgcagtctgaccaaataaagcaacatttaaaagatc

SEQ ID NO: 12550 - DNA, 8285 bp, Unknown
  gut microbiota DNA sequence
tgccttctttccatagcgctttttcttggaatatatcataaaaaattatcaacaacaagaaaaaaatgacataatcaaaaattttcatatgctatcttttttttacaagataacgttattgaaaaccatttcaaaggagtgaagaaagatggaagataaattatatgtaccggcagaagatccgtatttcagagatccatacattgatgttgaggaatggcgcgatacgccagttcgtcattattatgtgcatggtggattccatggtacggatatcaatggcgaaagtgaggcgcgatttgccttatatttcccggaaaaagagaaatatgagggtagatttttccagtatttgtctccggcaccggaaagtgaaaatgcgacagaaagtcagacgggcgaggataataaaattgcctttgcactcacacatggagcatattttgtggtttccaatcagggcggatttatgttaggaggagactccagccgcctttataaggtcagtgcaaatacggcagagttttcgcgaaaagttgcaaaacgcatttatgaggcagaggagagaccttatggttatgtctttggcggcagtggcgggtctttcaaggttatgggctgtattgagggaacggatggcgtttgggatggagcggttccttatgtgatggcaaatccaatggcagcaccaaatgtctttgcaccgcgtatgcgtgcagtacgtctgctcggcgaagaaggtatgcaaaaagtcgttgcagcgcaggagcccggcgggagcggtgacatctatgagggcttaaacgaagaccagaagcaggcgttaaaagaggcgaccagcatgggatttccacccaaagcatggtttgattatccatatatgggagacggtgcactcatggtactggttccggcagtttatcagatgtttcctacttactttaaggatttctgggaaaaggaaggctatgaaggggcagaccctgagagtaatgaggctagagcccatatgaaacttgtgacgacagtggagcatttggactatgactatgcggaaccggaattatcagaagaagaaaaaaatacggtggataccagttggcttaatacaatccttggtggagaaaaattaccgcatatatatttgaaggatgcaataccggcagatacctatacctatcattgtcgttttaaagtcttagatggtgcatgtgcaggaaaggaaatcaatattagcagtatagatgggaatgtgttggaactccatccggagaacgacggcaagcatgaaaatcctttcaaagagttgaagccgggagatcaggttatgattgacaatggcgatgctattgccatgcagtgtttccacagacatcagttgccggacgagacttatgatgtgtatgatcagtttcgcaatgaggacggcagtccgaaatatacacaactgcctatgctggtggcaccaatgacagccatcagtggtgcaggactgatgccgacgggaaatatccatggcaaggtgatcggcatatgttccatgatggacgaaagtgcctgcccatggcatggagactggtatcgcaaggcgatcggacgctgtggtattgatgagcaggaccatttccgcctctactatcatgacaatagtatccatgacgatcgtgcgggttatctggacgatccgcaaaatcaggtagattatttaggaactctgcatcaggcactcttggatgtggctgcatggtgtgaaaaggggatcgagccgtttgataccatgaattatacctatgcagacggacagattactttgccaaagggggcaaaagagcgtggcggcatgcagccggttgtatcagcagtagtagaaaatgcagcaggacaaagcgactatgacggcaaggtgaccagagcaaaagtcggtgaaaacatatgcttcaaggcagtgatcgaagttccgcccaaggctggaaaagtaacacatgcggcatgggattatgaaaagacaaatgactggtccaatgatgaggtcatcgaggcagtggatgatactacatacaagattgaagcagaccatgtattcaccaagccgggtatctattatccggttatcaaggtggcaagcaaccgtcatggcgatgccggcgacatcttcacccagtgcaagaacttagatcgtgtgaaggtcattgtagagtagatttaccataagagaaggaagggttaaaaatgggaacagaaatgaaagaagagaaaaagggaaaagttggaatattaaaattctggacatggaactttagaactatgtccgccggtattcaggcagtgctgatcggttatatcgtattttattgcacggatgttttagaattaaatgcagccttagttgcaacactgctcatggcatccaagatctttgacggtgtgaccgatattttggcaggttatcttgttgataagacacataccaggttgggcaaggcaagaccttacgaatttgctattattggtctttgggtcgcaacatgggcggtattttctgtgccaacatctttgtcaacggtggcaaagtgtgtttgggtcgttgtggcatatactatggcacagtcagtatttaatactttactaaatgcaaataacacagcctatatggtaagagcatttaatagtcagcggacctatgtcaaattgagttccatcggaggtttggtaacggtcgctggtgttgcagtctttaatgtggtattcccgactatgatggcaaatgcaggtacagatgccggaaaatggagccatatgattcttatgcttgcagcaccacttgctattattggaatcctccgcttcttctttgtaccggagaaatatgatgtggatgccggaagtgcaagtgttaatttcaaagaagttattactcttttaaaaacgaataagtacatctattttgtagcgctggttactttggtggcacagattatatctggttttggtgtatcggtttactattttacctatattgtaaagaacttaagcctgatgggaattatgtcactctttacggttgttgccatgcttaccatgattgcatatccggctatgttgaagaaaatgagtgtaaaaaacctgattcagttaggatgtgttttctatatcgtagcgggtcttgttttattccttgcaaaggataatatggcgttgttggcaatcggtaatattttgatgggaatgggaactttaccgatttctatgatgggaccgcttctgatcattgagtgtgcagattacaatgaatggtgtggcagacctcgtatggaaggaacactgggaagtataaatggttttgccaataagatcggttctgctatcggaaccttcctttgcggggtacttatggctgcatccggttacgtcggaagtgctggagatacagcagttttaccggattctgcccttatgatgatccgtttgctttacagtttgattcctgcggctttctttgccgtggttcttttctgcttgaagttctatactctggataaaaagattgatggtatgcgaaaagaaaatgaggaacgcagacaaaatgcagaagtaatggaagaagcataaaaacatataaatacacagaatgaggaggctatagagtgaaatcaagcaagaccatacatatgaccgagggcaatgaggtgacgcagattctgcgatttatgcttcccatgctggttggtgcggcctttcaacaattatatacttttgtcgattccatcgtggtcggacgctatgttggccctgtagccctcggttctgtgggagccgcggcaggtattgtcaatctctttatggcactttgcgtcggactgtccggcggtgtcaatatctgcgctgcccagtccttcggtgccggggacgaaaagaaattaaagcaggtggttgcaaattcggtttatgtgacattggcatccgggcttgttatgggactgattggcttgatcctagcccgtcctatcctgcttcttatgggaacaccggcagaaaatctgacttacgcattggtttatatgcgtctggtctgtggggctatggtgattacagccgcctataacacgatttcccagattctgcgtgctctgggagattcggtcacacccctgatctatattgtcatatccagcctgatcaatgtagggatggatattgtgctggtcttatatttttctatgggcgtcgcaggtgtggcgatcgcgactgttgtggcacaaggtgtatctgtgattggtctttggctgcacggcaagaaacatcttgcctgtatgcagttacaggggcaggatatgcaaccggactggcatctgatccagaaaatttgtgaattagggatccccttggcattgcaaaacgccatggcatccatttcgggagtggtatgtcaggggatcgtcaattcctttggcagtcaggtcatgtcagcctatacgattgtatgtcgtttgaatgaattttttatgctgccatttggctattacggcatggcgatggcgaattttgccggacagaataccggagcaggaaagcacgaccgtatttatcggggctgtcggcgcagtttatatatcacaagtatttattcccttgtctgcatggctatcattcttgccggcagacggattttggtcggtatgtttgtggatgatgtgacagtcgcagaattagcaatcccgggattgttgctcaatggtgtgtgtatgttgattcgtcagatcatctatatttataaggcaacgctcaatggagcgggcgatgccttttttaccttgtggaatggtgtggttgaggttgttgccaatatcctctttatgtttgcctgtacaagttggctttctttggggcatatgggtatctggtatagcatgattccggcagcggttttgtcagccatgttatcggcggggcgtttttacagtggaaagtggaagcagaagcggattttttaagttagattctgcctatcggatttcggataaaaagtatcggaatgctggatagagtgatttaaagtaagcagataagataaagatatcatgatgaaatgagtgaggttatgtatatgagtgaaaaatatttagattcatccctgacaccggaagaaagggcagaggatctgcttgggcgtttgtcaatagaggaaaaagtatatcagatttccggcatctgggcgcagatgatcgatgaaccggggcagattgactatggtattggacaggtatcaacacttgagatgcgccagaaaaagaccatgcgtgagtgtgtggactggcagatagaaatacaaaagaaagtcatggaaaaaagtccacatcatatccctgcaacttttcatatggaggggctttgcggagcctttattcaggatgccatgagttttccatcaggcattggcagaggttcctcttttgatgtggaattggaagaaaaaatcgggaaaatcgtcagtcgtcaggaacaggcagttggaatcacacaggttttggcaccggttctggatgtcacacaggatcccagaatggggcggcagggcgagacctatggtgaggatccgaccttaaatggtcttatgggggcatcctataccaggggcatacaggatcatgtagacgcggacaatggcagacgttgtgatgcctgtgccaagcattttatgggatttcacaagtcgactggcggtatccatggtgcagatgtatctgtgagtgaccgggaaatgatcgaaaagtttggaaagccatttcagattgccatcaaagacggtaatctgcgtggtgtcatgccttgctattgcacttcgggtggcagtgcatcttcttccaataaaaagatgctgacacaggtcttgcgtgaggagatgggttttgacggggaagttctggcagattacggtgcaatcggaaatcagcatcgttttcagggactttatgagaccatggatcaggcaggttatgcatctatccgtgccggcatggatgtagaattgccgatgcgagaggcatacaatgatgactttatcgacaagttcaagtctggggaatacgatatgcagtatctggatcgggcagtaaaagcagcactgacggcaaagtttcgtcagggattgtttgagtatccttttgcgtatacaggggaagagttaagggagaaatattatggtgatatagaggctgataagaaggtatcgttacagtctgcaagagaatccatggtgcttttgaaaaacgatggcgtcttgccgattaaaaatcatataaaacgtattgttctcgtgggaccacaggcaaagaatgcccgctttttctttggcggatacactcatctttctatggcagaggcaacgtttgccgcatacaatgccatggcgggcgtggatattgaaacagcaattacaaatgccggatatcagttgatcccgggaaccaatatccagagtgatgatattgaggaaatggacaatctgcttcgtttgcagaaaccggattgtaggagtctgttagaagaaatgcaggaaatgatgccggatacaaaagtggattggacatatggatatccaatcgcaggaaatgactgctctcatcatgaacaagcccttaaaaccatggaaggagcagatctggtcatctttatgctgggcggcaagcatggctcctgctcggtatcttctatgggcgagggcgtggatggaacaaatatcaatctgccgatctgtcaggatgctctgatccaaaaagcggcagaattaaagattcctatggtcggcgtgcatatgaatggacgaccgatctccagcgatattgcagacaaatacttaaatgccatcattgaggcttggaatccatcggagatgggggcacaggcgattgcggagactttgcttggtatcaacaatccaagtggaaagatgccggtaacaacagcaattcatgccggacagttgccgcttcagtacaatctttacaatggcagtgcctggagtcagggagacagtattggctttcaggactatgtggattgtccgcaccgtccgcgttatgaattcggcagagggctatcctatacgacttttgaatattccaatctttcctgcaataaggaagaagtcgcaccggatgagacagtgcaactatcttttacccttaccaatacgggaaatcttgcgggaactgagattgtgcaaatctatggaaaagacctatacgcatccatggcaagacctatgcaggagttgatcggtttttcccgtgtgaccttacagccgcaggaatccaagagaatacaggtggagattgcgccatcgcaaatggcttttctggatgaagatatacgctggaaaattgagaaaggtaagattttagtgcgcatcggatcttcatcggaggatatccgtctggaaagtagtttttctgtgacagaagatgcatttataaagagcagagatagagtttttgtggctcgcgttgagtaggaggaataatatgtacgattctttcagaccgggacaagtatggctggataccgaggaaaaacgcattcaggctcacggcggttctgtcatttatgttgatggcatttactattggtacggagaaaacaaggaatttacggatggaacaaatgatatctggacctatggtatccgtttttacaggtcaaatgacttatataactgggaggatcttggcttagtgattcctccggatacggaagatgaaaactcgcctttaaatcccacgaattgtatgttggatcgaccgcatattatctataacgaaagaacagaaaaatacgtttgttgggtaaagatcatgcacaaagagggacatcaggatgaagccgtattaacggcagacaagattactggtccctatacgctcgtgaatcaggggattcgtccacttggtatgagtgcgggggattttgatctggctgttgcagaagacggaaaggcctattattattttgaacgtgtacattctgagacgatctgtgcggatcttaatgaggaatatacagatgtaacaggtttttacagtgcacattttccacatccacatcctccatatgtcagagaagcaacagcccatctgttccataaacacaaacattatctgctgacatccggaacaagtggatatctgccaaatccgtcagaggtggctgtggcagatagttggcacggtccatatatggtgctgggagatccgcatcctgaggatgtttcacatacatcctttcactct

SEQ ID NO: 12551 - DNA, 28996 bp, Unknown
  gut microbiota DNA sequence
cggcagatcaaagccttgaatcatcgccaaaatatcctcatactggtcttttgtgatatgtccccgtttgaaagacagatatgctccactgtgcataccgattgccacgcattgcccatgatacaaagaaaaatcagacatcttttcaatggcatgtcctatggtatggccaaaattcaaataggcacgtatgccctgttcctttggatcagtctcaaccacattcttcttgatcagacaagaaccgtagaccatttcttccagaatatcctcatcatgcgcctgaatggcagcctgattatctttgagccactgataataagatgcatcccggatcagtccatgtttgatgatctctcccatcccggaagcaaattgtaagtttggcagagacaaaagactatggatgttgatatagaccatacgtggcatataaaaggccccgaccatatttttatattgtaaaaagtctacaccagtcttacctccgatactgctgtcaacctgcgaaagcagggtcgttggcatctggataaaatcaataccacgtaaataggtagcggctgcaaatccggtcaggtcaccgacaacaccaccgcccaaagccagaagcaaatccttgcgatcaaagcggctttttattaaatattcatataatttctctactgtagccatgtttttagaggattcgccagcatcaaatacaaagtattcgacgactggaaatgcatttttgcagatctctgtcacttcatttaagtatagttttgccacgttagtgtctgtgacaatgcatatttttcgatctctggcaatgccttcctgctctaacgcatccaaaaatccgtcaaaagaatggtttaaaatgatcttatagcagggtttctcctgataatttacctgaacctgtcgtgccatatctgtctctcctttttatacataccaggcataccttatatgcagtctgcccttttttgttgtatttaaaaatgcctcgaaacgtaacttgccatgaccacgcagggaaacgacatccccctctgctaaaccctgattatgattcgtcacaagtgcgccgttaataaagacattctctcccaggataaattgtgctgcctgcgcccgggacaatttgcatgcctgtgccacaaaagcatccagacgattggaggcaacaaagccctcttctgtacggtactgcatctcaatatgcagatccacaggctttacgcgctgagtcatgacctgggtgtgtttgatcttgtatagttcctttgcgataaaatcagccatcttctctacacagaaaatataagccgacttatcctttataaggatatctccgatcaaagaccggtcgatacccaagtgcatcaaagcccctaatatatccctatgggacagatcctcggaaaaacgatggttgagtggctctacctgcacgcaggaaatcggatattcccaattataataaagagcatcaggctggaatgctaccatctgacgctctgcttcctgataacctccatataatgagaacccggtataaaaaaggttctcattctgatgtaaaaggttaatttcatacatattgaggaaattactaaataatacgatcccttttcggtctgcctgattggcgagatctaaaaagcgatgtaggatctcatccggattgtcacatttactcatgatctaaaatcctgtctgaatgccggaaaaatcaaaggcatccacgattccctgcagatcacccgaaatatcaacggctgccggggtaatgataaagatataattgcttaccttttgcaggttgccatcgatcgcatagcagcatcctgaggtaaagtcaatgatacgctgggcaagtccaagatccagaccttccatatttaagatcacggtacgatctgccaataatgtttcggatatctctcttgcatcttcaaatgaagacggctttataacacatacttccatatttgtactattaccctttctactagcgcgcattggtgtgatctttgacgaagccttggctgccggtttctccttgacacttggtgtcggctttgccttgactacacgaggctgctcatcttcttcctcatcctcgtcatcgtctttcttgccgaacagatggaagatagaatgatcatcgtcatcatcgtaatcatcataatcgtcgtcatcatacatctcatcatcgtcgtagtaatcgtcttcatcttcgcctaatttcatcacatcaagcatacgatcaaaaaaagccatgatttatctctccttaactaataacctttaggtgttttgataatttcttttgccaaagattcctgtcccgacgcgcaccatggtcgctccctcttcgatcgcaacttcaaagtcacccgtcattcccatagacagaatatccatagatacattatcaatgttttgttttgctatgtcaacagataactcctttattttgcgaaaataaggacgattttcctcggcctctacaacatatggtgctattgtcatgagacccctgatctcgatcgcatccagtgttgcgatctgtctgactaattccatggcatcttctctggtaacaccaaacttgctttcttcttctgcgatgttgacctctaccaggatcggtacgacaataccctttttctttgcctggatattgatttcttccgccaagcggaaactgtcaaccgaatggatcagggcaacattgccaacgatatatttgaccttgttacgctgcaaatggccgatcatatgccacttgatgtcctgtggcataacttccatctttgcacacaattcctgtactttattttcgccaaaatcacgtttgccggcatcatagatctcctgtaagtcttctaccggtttggtcttgcttacagcgatcagtgtaacctcactcacatcgcgtccggctcttttacatgctgcctcaacgcgtccttcaacttctcttagattttcttttaacatgcctttcctcctcaaaataaatgtatggatcgatcaacgaataatctgattttcctttaccagatctccctgcaacacaatgtggtcgtacagggaaagtccataggtcgtgccggtactgataatggcataatcctcgttctgatataagatattgatctgcttaaataccgcatagcccttattgatattatacacgccctgtaaagatgctgtctcagaaccgatggtgtaggtttcctgcgaatccggttttaaaataacggtatcctttttgacatcctcggaatcaatatagtaataatcgtccgtctcataatagatcgttggtgctacgaactgcgaatcgcccttcttatcccgcaccatcagaccggaagaatcggaatcatttcccataaagaaataagccttcggaacagtgaaaaattctttttccacgatagcactgtttggaatcttgagccccgactcctcatttaacaaaagttcgatcgggataaaacgggaatccccataacgggcaacgctatcatccagactcagcaccagatagtaatcgcctgccttttccgtgatgctgcatgccgcccaggtcgtcgcattgtccgcggcaaaacggatctcgatatattccatcttctcgtcctggatgatcttgaccaggtcttcatcgatcggcatgatcatattccagtcgtcggaggtgatgagtttatatgccggtttccctgcttctacactctcctgcgtttttagattggtcacggaaagattgcccgtatcaaaagattctgatgtgacctgatccaatgtcagcccctcatagccatccgtctggtagacgaccacaccggaggtcggtgccgtataaatggaaaattttccttcctgcgtcgcctgttcgatctgcggtgcaatctctgacatgagactattgctataatactgttgcagattggaagaaagatctgacttaaaggaatagaccttctggaactgattgctgtcataatcatagacaaaatcaccgatctgcttttgtaggcggctcatatcattatccgtcagtgctgtcgtatccgtggcatggctctttaactgcttggtgatctctcccgaagtgtcaatagagtaaatattggatttgactcctacctgatccagattggatgcataataaaaaatatctccggaactatccgcgttgacaacctgctcctgacggattgccagcgcctgatagatgtaattctgtgcgatcgtcccctcctgtacctcgtagaccgtgatattatccgaagtcatataactgaagatatggaaaagtacataaataaagataataccaaaaatgatcagtccgatattgatctgtatctgcttatgaaattttataatattatcatttcttttcaaaaaactgctccttggcatgtataatcgcgccttacctgtcccatactatctaaaaaggaggttatcatgaaaggtttagattatacattactcactcttgtaatcatcggtgcaatcaactgggggctgatcggcttcttccaatttgacctcgtggcctttatctttggcaatatgtcatggctatcacgtatcatatatgcccttgtcggtctgagcggactatacatgatcagtgcctatggcagaatccgatccaattaaacttttatcatgtaaaaaggtgttctcatataacgaacaccttttttgatacctttatctaaagtgataaacaaatctttgcatttaattcttccggcaatttttcctctttttgtgaaatgctgaggacaaaattcacatggaatgtcttgctgatcacggataacttgtcgatcgccagacgaagtccttctgaggtgtcaatgtatgccagtgtgagaaaactatcaataaagatcttctcaatgctattgttctgcgagatcacaccacataaaaatccgatcagttcatccgtatcattgatcggataatccggcatattgatcatgcgcacacgagaatccaactggtacatatatttgggactcttatcaatgtaaacaagtgtcccctgcactgttttgatctcctgattgacgcgctccaacatgtgctttgtctttcccgttcctttttctccaacaataatctctaccatagcgtccactccttatctgtgctttacgatggtgcttctccgaatgtatataacaattcattcatgagataatataaattcagcgtacaatctgaattatatacaatggaaatgatcggctggttctggtcgttataagagtaaagaaccagacaatagccggcttcgtaggtcgtaccggtcttgccgccaactacggtaaaccctgccggtgcgctctccttgccatttagataacgattggtcgaaacccaggtctgtgactttgcctgcccgtctgccccggtataagagacatcataggacggcgtactgatgatctgtaaaaaagtctcattctgtacggctgcctgaaaaatcagatacatatcataaacggtcgtataatgatcgtcctcatgtaagccgtgcggtgtcacaaaatgggaatgtgttgccccaagtgcggctgccttttcgttcattaactttgcaaagccttcttcactgccaccgatcgtctctgctatggcgatagcggcatcattaccgctgcggagcatcagaccatataataggtcttttagtgtcatggcatccccttccgccagattggctacggaagaatccgctgtctggtcggctgcatgggcactgaccgtcacctgcgtatctaagtctgcctgctcgatcgcaaccagacaggtcagtatcttggtcgtgcttgccggatacattttgccaaataaattctgtccgtagctacactgaccggtcgccagattaaagacgccaccggctccggcaacctgggaatccacctgatcgatcccgaaattgtcctgatcggtcacacacagattgctaccgtaaaaagatacatccgatatattattgacctttgtgatcccgtattgataggaagtcgtctccagatcatatgatgtctgatcagtgctctcactcccgcaggagacaagccccaatccaagacaggcgactaacaatagggaaagcagtttatcgatacatttcacgccactcaagatctcctctatctaaggatttgattagaagttccgctgtcgcaagattcgttgccaatgggatattgttggcatcacaacagcgtgcgatcgtgttgacatccggctcatgggatttggcagtgagcggatcgcgcaaaaagatcacaaggtcgatctcgttgtgctcgatctgtgcagccaactgctgggttcctcccagatgtcctgccagatatttatgtacggaaagattggtcacctcttcgatcaatcttccggtcgtgcctgtggcatacaggtcatttttggataaaatcccacgataggcaatacaaaagttctgcattaattttttctttgaatcatgtgctactaaaccgatgttcataatgcaaatccccctaatttaatattttttcgcttgtaatccaacatttaatacaaatcccataccaaaatacatggtcaccagggatgtcagaccataactgacaaaaggcagtggtaatccggtatttggaaaaagtcccgtaacaacgcagatatttacaaaagactggaaaccgaccagggctgccataccggagcagatcaacttaccggaaagatcttttgccacctttgccgtctggatacattcataaacaataaaaagaagtaataaaatgatcaagaccgagcccagaaatcccatttcctcaccggcaaccgaaaagataaagtcggtgtggggctctgatatataattaccgttcttgacggaatctacactgttattgtaaagtcccttgccaaaaaactgaccggatccgatcgccatgatggaattctgctgctggtaagccgtctcgggatattcctccggtttgagccaagccaagatacgcaggctctggtagccctgtaaaatggaacttcccttgtttacaatgacaagaagtaaaatggcaatggcagggatcgtgatccccagtacaatgccgaccaacttgtaactaagtccggtcacaaacataagggatgcaatgatcaaaaaggtaacgatcgtcgtcgacagatccggctcttttacgatcagtgccagtggaatggctgctaagatcgctgtctggatgataaacttaggattattgatctcatcctcattacgcatcagataagaggcaaagaaaaggatcagcagaacctttccaagttccgaaggctggaaacggataccaacatcgatccaacgggtcgcgcccttggaactatctcctaccaaaagaaccagagccaaaagtccgatcacggcaacatagtaaagccgcgagaactgtaggacaaaatcataatcaatcagtgccacgatccccatgacgataataccaaggatcatacctaagatctgcttgttctggtagtccgcatcagcagagccgatgatcaagatccccaggattgtgagtgccagaatcccgatgatcaattttatattcagattttttaatttgtaagttcgaaacataaactactctcttctattctgtctcttttgccggcatcaggatggtccgacagatcggtaggatctccttgccccgggtcagaaaatctgacggcatagcgcatttcttatgcatatcgggcagactgcccaaatactctgcatgaaaggcatgtcttgccatctcctgcagcctgctgcggttgcgtctttttgccatatcaggtcccatctgattaaaaataagacgggctggaagtccttgcttttgcagaacatggcaaaaggataaggcatcagccagagaggcctgactcatggtcacgaccacaagtgcctgatctacatagggaaacatagcctgatgtatcggcgtgatccctgccggcgtatcgatcaagacaatatcaaactgcgcctttaatttttcgatcaggcaggaaaaggcatcttccggtaaggaaaaatcataattcctgctgcccggcataatataaaatgtacgattggaatccagtggtaaaagagcctgccgataggaacaaacgccctttaatacatccaccagattatatatgatcttattttccaaatgaaaatataagtcgaggttccttagtccgaagtctgtatccaacatgacaacggtcttatccatgcgtgcgaattggcttccaagcatggcacacagtgtcgtctttccaacgccacccttgcccgaagcgaccataaacacatcgcccacaacaaatctccttataaatgttttaatagtccactccgaagtggctccgccagaagttcctgttcccagacaacgaccgcatatggctcgctctcactctttctggagcggaaagaccatttactcgccaccttgacatcgcctgcgaccttgccgatctgcatgtgagcggcattgatctgattggcagcgatatagcatttgtcatcctcaggataaccggcataaacactgccttccaggctgcccataacgatgacattgccggcggcctgaacaatcgcctttgacttgacatcaccaaggatcacaatgcttccgtctgacgtcacgacatccttctttgtcacactacccataataattttagcattctcataaatattttcatagtagaatctgtcgattttttctttcatttcgatattctttaattcgttatcttcctcgatcaaagaaatcgtaatgtccgaatttaactggatcgcctccacgatgaccgcggcttcctcagcactgaccggacgtccctcaatggaaagcacaagtgtggcagttccaaagaaactgcgcgatgtggcaaattttttgcagatctcccgcactaattgttcaaaagaaatctcccgatccaaaaccagtgtcagtccataaggactgctcttgatcactacagaatcttttttaaccataagcgcctcccttttaatctgtcacactgttggtggtagtctctgtgttggcaccactctccgcaatgttttccagcgtcttttcgccgaagtaataagacatgatctcagccgcaacaacggatgcattgctggatccatatccatgtgcgatacgggtcgcaaccgcgatctccggatctgtatatggtgcatatcctacaaaaagagcgtggtttggtcgaagcagggactcctgcgccgtacctgtttttccggctgccgcaacgctggttcccttaaatgccgacaggtcttctacgaccatacgaaggccggaatttaaggtcgaccattcactgtccgtcaatgccgtgatctgatttttcacagatggactgtatgttgcaacggtctctccgctcgccggatcctccacatggtctaaaagtgtcagatcgtagacagttccgcggttggaaactgccgtgatataacgtgccaatgagatcgtcgtaaagttgttatcagactgaccaatggcagccatgactgggaattccgttgccggtgtcggcgtagactcatcgatctctacgcccgtcttggaatccaagccatacatagatgcatatttggcaagtttttcaataccctgactgtcattataattattgctgttgccaccagccagatcataccccacttcataaaagaaatagttgcaggaaaaacgcaatgcctcagccacattgatcagaccatgtgtacttcgcggatagatccaacattccggtttattgctgactttttcaaacttaccctgatccaggatctgggttgaagtcgtaatgacattttctgcaagcccggcggtcgcactgacgatcttgtaggtagaacccggtgccgtcttctgctgggtcgcatggttataaagcggttccgacttactgttggtcagataagcataataggtagaatccaccgaatttgccagtttgttgttgtcatagcccggataagagacacaagccagaacctcgccggtctttgaatcaatgacgacagcagatccggaacaaggatccagtcccaactgccccggtgtgatctcaaggttcttgatcttatccaagacaaaactgtaagcagagatacgaccggacaagagtgcatcgtgtgtcgtatcatcctccggcagaacgccctgctcatataaaagagcacacaactggttgccggatatcatatcctgctgaatagcatatttgtagaccagtttttcaaaagatgcatcggtctgcaactgatccaagacatagtcaatcaaaagaccgtacaattcatccgtatccacatacttggtatcttttgcatattttgtaatgtcgatccagttctgctcgattgcatagagtaagtattcgttgacactcaaagactcactggtccatttggtctgcatctcatccgaggcgtcgatcgcatctttatcaaaaatgccctgttttttcagataggtcacaatgtaagtcgcataatcctgatattcctcggacagatccttatagaccgtaccggtggtcggcttaagctggctttgcaactggctgaatacatccgctgtctttttatcataagcagactttactgccctctctgtatccgttgcatccgcatcggaaaactttgaggtatcgatcaggttgttattgataaaggaatgatagacatcatagaccgggatcatgatatccgattcttctcctgtcgtatgataggtcttgatattggcgatcttggaatagacaatacttgcgatctctttttccagagcgcggtaggtcgcctcctgtagatccttgtcgatcgacagatagacatcatccccggattccggctcctcataatccgatacctggatcagattaccgacactgtctacataaagtttttgtttgcccttggtaccggacagataatcgttcatgacctgttcgatgccggatttaccaactacatctgtcagttcgacggaatcgtcatccttctttttttcgttgtattcatcagtagaaatggtaccggtataaccgatgatatgtgcaaaatactcgctgtctacatatttacggattgaagtttccttgatgtctacgccggtcagttcattgctgttttccttgatataggcaacagactcatcactgacattgctggctatggtcgtagcaatatatttctgataagaattctgtccgatattgtaacgcacgatacagatcttatagcgcatttctccatcatatttgtcggaaatgttgtagcgttcctctcccatcagatagtccatgatctgatccggtgtggcttccgcttcatcaaatcccagtttgtcattgtattccagatcatcaatgcttgcatgtccaaaaacatccgcacggaaacgctgtaatgctgtgccgctgtcattgacaaaggaatattgaccggaagaagaccgcgtaataccaaaattattgtcaatactgtcaccgttcgcctcgatatgggtgatgatgtcagaaatctcctggttcatctttttattgcggtcttttctgttctcataagtgccgttgtcttcaatggtaatggcgtaggcaagttcattgtaggcaaggagtttgccattgcagtcgtatatgttgccacgggtcgctgcgatcgtctcatccttttctacagtcaggtcataattttcctgataatcggcaccgcggacgatctgcaagacaaaaagacgggtgatcagtatgcccgcaagcaaaaccataacagccgtcaatacacgcaaacgcgacgtaaatattcgattcgtcaaaaaatcttttatttgctcaaacaagttttctagaactccttttattatctttgtccaatcgctgattgatctttaagatgacataataaatcgggatggcaaccaaaatcgtataagtgacctccggtaaaataaggttggtcagataaaagaggaagtcgtatcttccacggaataaaaacagaacgacaaagactgcaatcccatagatcaggtcactcagaccgatcacggcaagcggtaatttgatatcatcaccaaagaagatctttttgaacagaccacacaaaaatcccagataaagatagaggatcgcatataatccaaaagtcgtaccgctaaagaaatccaaaatcagtccactgcaaaagcctatgatcatcccttgtttgcgtcctcgcatcaatccgtaagaagtgatgatgatgaccatgatattgggtgtgacacctgccagttccatgtgtgggaacacggtcgtctgcaataaaaatcctacaatgacgatagcaagaaccacaagaatatattttatgatacccttgatctccatgactacttacctgtctcctttaactgcgtgatcacaagcacatcctgtaaatgtttaaaatcgaccaccggtgtgatctcgcccgatttggtcagattgttattgtcctctgtgatatctgtcacatagccgatcaaaagtcctggcagatacttgtcactgatgttgctggtaacaacagaatctcctgtggaaaccttatcctcactgtcttctaaattagaaaaagtgatcatgttggattccgtcatggacttgagattaccggatacgatacagttgtcattgttggataagatcataccgctgacattgctggtgtcgtcgataatagcacgtactaccgcataattcttgcccacatctgtcacgatgccgaccagtccgcttcctgcgatgacgttcatatctaccttgatcccatccttggagcctttgtcgatcgtaaaggtattaaaccagttgctggttcccttgccgatcacgtgtgccccggtcgtcttgtagtctgcataagtctgatccagatcatataactcccgcaaagtatccagttcggattgctgcaatctggtattggtcagttgtgtggaaagttcgtctatctgctcctgtaactgctcattctctgcgatcaactgctccttggtcttggtatcatcactgttgatggagatagattcacccacatagtccaagcccttttgcattggcacaaagacatagttacagatggtccgtatcggttctccagcataaccggtcgcatagccggcaaagagcagcatgatacagatcacagtcaaaagcaataaaacatatttacttggaaaagaagattttcctctgcgcttcataaaatcctacctttatttaaaaattcttgttcgcatactatagccaaagcgtttgtatttggcatctgtcaaaactttttccagtcccagagccgttgtctcttttgcatgctcactaacattaaccttaatgtttgtcacttctgtgaacagatcggaaagatctgcgatggctgcactgccaccggtcagataaataccggaatacacgatatcttttgcgagttccggcggaaccttctccaagatcatcttgatggaattgcaaagattttccagatcagacttgataccgtcataaacggtagatgcctgcacttccatttcgatcggcagaccgcttaccacatcacgtccgactaccgtcatagaagcctctttgccaggcattgcactgccgatattctcttttaactgacaggctgtcttgcgtccgatcaaaagattaaacttgcgcttcatgtgtgtcacgatggcatcatccagatgattgccgccaaatggcaataattctgtcagtaccagtccgcccagggaaatcacagagatctctgtcgtatcggcaccaaaatcaacgaccatgacaccggtcggttctgtgatatccagatccataccaatggcatctgccagtggcttttcacataaaagcacactgtgtggcttggtcttggaacgggcaaacatatcgtaaaatgcctttttttctacctctgtgatgtcggtaggaacggcaaccacgatgtccgatcccttgatccttgcctttgctttcttttctaagacctcaaataacatggtctgcatattatcaaaatcagcgatcacaccagatacgatcggaaatgagacagcgatcgtctccggtgccttctcatacatagaatatgcatcatcgccataggcatacatctgatctttgtctacaatggcgatggtatttttcacattgatgatctcactgctgttgctgctataaattttaaggttattggttcccatatcaattccatatgaattgctcatttgttcttcctccgttgcctttgtcaaaacattcttggctacattattttatattagcataattaaatacccttaacaagattggcatcataaagtttttggagtgccatcatgataccgagtttgccgtgataccaggtaagtccgccctgaaaaaaggctgtatatggcgggcggagcggtccgtctgcgctgagttcgatggaagatccctggacaaaagcacctgccgccatgatgacctgactgtcatagcccggcatatcccacggctccggtgtcacataggaatctaccggtgctgctgcctggatcccctggcaaaaagcgatcaatccttccggcttttcaaaagtcactgcctgaatgatgtcatgtctggactcactaccgttcggaatgacggcaaagcccagtcgttcaaatacatttgccgcaaagatggcactctttaaggccgcgtttaccaccgttggagccagaaaaaatccctggaagaaagactgcatcatgccaagggatgcaccgacttccttgcccagtcccggtgatgtcagacggtatgccgcattttcgacacattctttctttccgacaatatagccgccgatcggtgccagtccaccgcccgggtttttgatgagggaaccgacgatcatatcagcgccgacttccagtggctctctcttttctacaaattcgccataacaattatcgaccatacagatgacatccggcttgacctccttgataaaggagatcaactgaccaatgcgttctaccgataatgtcggtctggaagcgtagcccttagaacgctggatggtcacgagttttgtgcggtcattgatggcatttctgatcccatcaaaatcaaatccgccatcggcaagcagatcgacctgggcataggtcacaccatattctgccaaagaacccttagacgggcggataccgatcacctcttctaaagtatcgtatggttttccgaccggggataagatctcgtcacccggacggacatttgacatcagtgccaatgccagcgcatgtgtcccacaggtgatctgcggacgtaccagtgcggcttctcctttaaagcaggtcgcataaacctcctctaaggtatcacgccccagatcgttatagccatagccggtggttccgttaaagcactcggcactcacgcggtgcttctgcatggctgccagcaccttcatctgattgtactctgcaacctcatccagtttttcaaatctatctttgagggatgcctccacctccagacaaaaatctgaaacggcatccgcgatcccaaagtttttatacatttctttcatatctgatctattctcctagttttctttttgcatattttttatcatgtaggtcaaaatagcggcattgtcataggaaaaatccgccttattgatccagataacttccggtttgctgtgaaaccaggtcaactgccgtttggcaaaatgtctggtatctcttttgatgcggtagataccttcctccagactgcaacttccatctaaaacatcaaagagttccttgtaacccagtccctgcatagacaccatatccttggtatagcccattttctgcaaatgatcgacctcatccaaaagtccttcttccatcatctgatccactcgcttatcaatgcgtctgtaaagattttccctgtcgtcatttaaaacaaaataacggaaatcataaggtgattctttttgtctttgttcctgattatgtagggagatcggcttgccgtgcatccggtaatattccagtgcccttatcacacgtttgatattattgggatggatggtatccgcgctggcaggatcaacctgacgcagacgatcgtgcaaggcaagtgcaccctccgcctttgcaaaggcttctaattccgcccggatctttccgtcactgtcttctttggaaaaatccgtatcatacaaaagtgcctgaatataaaagcccgtaccgccgactgcaatgggaatatgcccgcgctcatagatctctgccatagcctcttttgccatagcgacaaagcgcgccacatgaaattcctcatccggcaacaactcatctaccagataatgcctgatgccatccatttcctccggccggatcttggcggaaccgatatccatatatttgtagacctgcatagaatcacaggaaatgatctcgcctccgattgcttttgcaagagagatagaaagttctgtctttcctactgccgttggtccggcaaggatgatcaaaggtggtttcttgctcataattatacgatcctcttaaatttcttctctaattcatatttggtcatggctatgatcgtcggtctgccatgtgggcaatggtaaggattttccaaggataacaattcatccagcaattcctcgatctccggataagacaggcggttgtttcccttgaccgccgccttgcaggacatggaagccactttttctacgatcatatcgtgaccgtcattgccttttaattcgccgcaggaagccagcagttccataaaaaattctttgacatcaaaggaaaagagattgcccggcacaccctcaatggcaaattcattgccaccaaaagaggaaatgacatagcccaattccgaaaagacttcctcgtagcgtttcaggatatcccgctctgctctggtcagtgatacaatgatcggcgggctgacgtattgtgtcgtcatctccttatcctgcaactgcttcatcatgcgctcaaataagactttttcatgggcggcatgctggtcgatgatatacaacttattgtcatgctcgatcagccagtaggtatcaaagacctgtccgatgatacggtgcttggcgcgcgcctgctcggataaaaacgaggtctgctcataagtaaccttttcctcccggctctggtcctgctctttttccttttcctgataatactcctggtactttctttcgtatggcgtgtccgcatggatctgtgccgtgatcttctggcgcattttttccagacgggacttttcaaaaggttccggtgccacttctattatggtttcttcttttttgctctccggttcgcatgtcatagactcactccccggatctgtcgcatcgttctctgtcgtcttacgcaaaggagcagcctgcacattttcatctaaggtcacctcgacaatgtcctctctttgatgcagacgttcaaagatcagcgacttaaagatgtccgcgattgccatctcatcatcaaagcggacttcctgcttggtcggatgtacattcacatccacagatgcttccttggtcgtgatcatcaggacacagaaaggatactgatgctgcatcagatagcccacataaccttcttccacagacttggaaagcaggggactcttgatatatctgccgttgatataaaaattttccagactgcggttgccgcgcgccacattggaattaccgataaaaccactgacttttaaaagatcggtctccttttctaccgcaagcaggttggatgcgatcagtctgccgtagatctgataaatggtatccatgagattgccattgccggaggtatgtatcttttcttttttattggaaataaagcagaaagaaatatccggatgcgacagtgccagccgctccatcagttcggaaatataggaggcttccgtcgtgtctgtctttaaaaatttcttgcgtgccggggtgttaaagaacaactgatagaccatgatcgtcgttccatccggtgccccgatcttatccaaagatacttccttagagccctcgatcacataacgcacgcccataagggtatctgccggtttggtgatcatttctaccctggagaccgcactgatgctggaaagcgcctcaccgcgaaagcctagggtatggatatccgccagttcggatgcgtcccggagttttgacgtagaatggcgcataaaagcgacagacaattcgtcctccgggatgccacagccgttgtccgtaatgcggatataggatttgccgccatccttgatctcgaccgtgatggcagatgcccctgcatcgatcgcattttccacaagttcctttacgacagaggaaggtctttcaacgacctctcctgccgcgatcttatctattgtcgatttttccagaaccgctatcttatttcttaccatcgatttcttacctttacctgtagttcattgagcgcattcattgcttccagtggtgtcatatgactgatgtccagattgcggagttcgtcaatgatcgcatcatcactgaccgtatccaaaaaggacatctgtgccttgtctacatcatccagtggcttggtctgttttttgccgcctgtcgtctgcccttcgaccgcaatattttttgccaggtctacaatatcattttcacaaagctgggtcacaatgcggttggcacgatcaatgacctcatccggcagacctgccaatttggcaaccgcgataccataactcttgtccgcgccgcccgggacgatctttcgtaaaaatacaatatcatcaccgttttcttttacggcaatgcagtaattatgtacaccctctaatttgccttccaactccgtcaattcgtgataatgggtggcaaataaggtcttggctccgatcagtttgacattgctgatatgctcgactactgcccaggcaatgctgagtccgtcaaaggtacttgttccccgtccgatctcatccaagatcaaaagggagtccttggtagcgttgcgcaaaatgtttgctacctcattcatctctaccataaaggtggactgtccgctcgccagatcgtccgatgcacctacacgggtaaagatacggtctacaataccgatatttgctgactttgccggaacaaagcatccgatctgtgccatgagtacgatcaatgcactctggcgcatataggtagattttcctgccatatttggaccggtaatgatggaaacacgctgttttttgttgtctaaataggtgtcgttatcaataaagagctgctgatccatcatctgctcgaccaccggatgtctaccacccttgatgtcaatcaggccgcgcgtattgatctttggtctgcaataatggttcttttctgccacataggcaagggatgcatagacatccagtctggcaatggcttttgccgttgtctgaatacgggacacctccgacgcaatgcggttgcgcaactgccggaacaattcgtattccaaggagatcagtttatcttccgctcccaaaatggtatcttccaactcttttaattccggggtaaagaaacgttctgcattggcaagcgtctgttttctctgataatccgccggtaccagatccttataggaattggtcacttccagataatagccaaaaaccttgttgtatttgatctttagatttttgatcccggtacgctctctttctttcgcttccagttctgccagccactttttgccctcggtcttggcttttctgaggcggtctacttcctcattgtaaccatcctttaagatgccgccgtctctggaagatatcggtggttcttcacagattgccgcatcaatatctgcacagatatccgataaactatcgatattttcagaaagttccaccagattttttgacttaaagtctgccagcacggtcttgatcgccggcaacatggcaaccgaatttttaaatgccagaagatcacgcggatttgccgtctgatatacgatacgggtgttcaaacgttccagatcatagatcggatttaagtattcccgcaattcttctcttgccatcatattatgtaaaagttcgttcacggcatccagccggtcagtgatcaggttggcattggtcaggggctgttcgacatcagaacggagcattcttgctcccatggcagtcttggtcttatccaagacccagagcagggaacctcttttttgcttttcccgcaaggtctcgaccaattccagattgcgtctggtcgaagaatccaagagcataaaattgccattgagataaggctgcacatggttgaactgttccaaggatgacttctggatctcggtcaggtacttcatcaaagcgccggcagaaatacttcccataggaaactcttccagaccaagggcagacagccgactggtgtggaaatgttccagcaagacagccacagccagacggtcatcaaaataatgagcatccaattttgcgatggagatctgcatgcgttctttgagatccgcaatatcgataccgctgatggtaaaattctcattgcagatgatctccgatggcacatatttattgatctcgtccagacaggaacggttggaatccacttctgtaacaaagaaatccgccgtcgtcacatctgcgatcgacagaccgtatttgtcaccgtcgaaaaagatgcccataatataattgttcttggactcgtccaaagacatagcatccatattggtgcccggtgttacgatacgggtcacggcacgctttaccatgcccttggcttcttttggatcctcgatctgttcgcagacagccactttataacctctttgtaccaggcgtgtcagataggtctctgctgcgtgatatggcacgccacacatgggagcacgttcctcaagcccacaactttttccggtcaaagtcagttccagttccttggatacgatctcagcatcctcaaagaacatttcatagaaatcccccagacgataaaacaggatacagtccggattggcatccttagtctgtatgtaatgctgcatcatgggcgttaattgttcaaaatctacacttttatgattcataattcacctgatatctctttataatctcttctgcaactttcatgccatccatggcagcagacgtgatcccgcctgcataaccggcaccttctccgcaaggatatatcccctccacactgccgacaaaggatccgtctctatggatgcggataggcgaagatgtcctgctttcaatgccggataatatggcatcttttcggtcaaagcctgtcattttatgcccgaacaaggtcatgccctccacaaaagatgcattgatctcctcagaaaaaagttcccgcagattggcaaaatctgtctttcccttggtaagcgaagcaaaatcgccataggaagaacttttgacattgctgcaaaaatcaccgtataactgctggggaacggctccctttgccagggtataagccttcttttccagtgccatctgataagcgatcgctcccatgggatcatctagggcatactcgcccgcccccacggaaaccacaatggcactgttggcattggcagaatcccgcttggaataactcataccgttgaccgccagatgttcctgcatggaagatgcattgacgacatagccacccggacacatacaaaaggaatagacaccacgtccgttttttaatttggtcgccatcttataaggggctgccgccaaaaagcccggcgcatccttaccgtattgcgcctcctggatcatggtctgtggatgttcaatgcgcagtccgaccgcaaattccttggcactcatggagagtccgccctcataaagcatctgaaaggaatctctggcactgtgtcctaaggcaagcaccgccactccggcatccagcctaatggtctcatttagacctgcctgtcggatctttaaggcagacaaaacgccatccttgacctcgaaatcctcaaactttgtctcaaaatagacaagtccaccaaggcgccggatctcctgtcgcatattctttacgacttcctgcaggatgtccgtaccgatatgtggctttgcatcccaaaggatctgccttggtgccccaaattccacaaaagtctgcaaaacaaattgatttctgccggtcttgtccttagtcaatgtatttaatttaccatccgaaaaggttccggctccgccttcaccgaactgcacgttggactctgtatcaagcaatccggtctgccagaatttttccacatccgcctgtctatcttcgactgcgcgtcctctttccaaaaggatgggtgaaaaaccggcgcgtgccagcaaaagcccgcaaaaaagccctgccggtcccataccgacaataaccgggcgcttagagagtggctgttctccgctctttggcatctgaaaagtcatcggttgatacagggaaatgtccgtatcctttgcacatttctttagtaacttcttttcctgatggctgtccagacgaaccgccacggtataaatataaaaaagatccggctttttccttgcgtcgatcgaacgcttcaagatctctatctcgtagatcgatgccgccgtaatatgtattttctttgcgaccgcctgccgtatgccttctgtctcctgctccgacacggcaacctttaactgtctgattaagatcattttctttttcctatacaatgcatgcctgcaagggctccgctggaccatgcccattgcagattatagcctccacagataccgtccacatcaaggacttctcctgcaaagaaaagtcccggcacaagttcagattccatagtctttggatcgatcctgtcggtctttacgccgcctgccgtaacctgcgcattggaaaatccatgggtatccgtgatctttactacataatgacgcagggctgccaagaggcgggtcacatcctctttgtcacaatctcctgccagtttttctgccgaaagcccggctctttttaagattggggcgatcagtttgtcgtgcaagagtccctgtaaactctgctccaaggtcaggtttccttcccgcatctgcaaacgtctctgtaagagttcttccgcctctgtcttagcatactctggcaaaaagtccacttccagacagacatcttttttctccaagagtccatatgccgccagccggctggactgaaagactacaatgcctgacagcccataatcagtgatctgtaattctccctgccagaaagcggtcttcttatcgtcgatccaggtcgtgatcccggcatctgcccgaacacccgcagccatttttaccaaaggatccgccgcatgcagttgcacaagtgccggtaccggctctgcgatctcatgccccagacaggacgccagataataaccgtccccccggctgccacggatagcagatgccttgccgccacaggcaagaatgacgcttcctgccgtaaaggtctctttatccgccgtagtaacgagaaatcccggatctgtcatttcgatacgcttgacctgtttttccatgaccagcgtcacagacagcctttggatctcttgtaataaagcctcctgaacactctttgcctgcttgctccgcggatacaaaagcccctcctgttcatagggctcaatgccaagccctcgaaagaaatcttccgtatcctgctctgaaaaggcagcaaagacctgctctaagaaagccctgtcggctccataataattgtgcaggtctatagcccggttggtgtaattacacttgccgtttccggtcgccaaaatcttttttccaagtctatcattaaattcgatcacaaggacagatgcaccggctctggctgcaaaaatagccgccatcatacctgcggctccaccgcctgccacaatgacatcatatcccctactactagtattcttcataaaaatcaccacatgtcattgtagcataagccctgtcaattctcaacactggcgagacagttttataaaactaactgctgtaattttccaaaaaggcaaagagatctttttcgctggaaaaatccatgccgtctcttaagtcttcgaccacatcttccggcaggcgctcctttgcgatatccgtcgtcagatactttttccagtcaacgatctcataaactacgaccgtgtcattttctaagagcaccatatactttgcctggttttcactggcacttggtatgctggaattttcggtcagaagcatcctgtcttcttcctccgcctctctctggtctttttcacttgtttttgcaatggcaaaaaagatgagtgccagagccaccagtccaatacataaaaaaatacaaatactgtttgttcgtttcattttcatcaccacaaacagtatttgcatttcaaaaaattatattcatgattcctgcaacaagtgcattttctttgccagcgcaatgatagtattgccttttggcatacgcgccagttcggattctgtcagtcccttcatcagcaaaagcagaacaaagtagatcagaacaccgacacaaatactaagaatcgttgcaattgcattggaattgatgatcttgtgcaccagttcataggacaggaaaactccgattcccatcacgatggacgcaaacagcggaatgatataggtcttttgcagattcacccttgctccactataacggcgcagtgccagatcatttaagatgcagacacacagtccgtaaatattattagcgatcacgaccgcatagatattcagatcaaacagttccatcaaaaggaataaggctatgacatgtaccaacaaagagatcacagcattgatgaccggtgtcttcatgcggtcgatcccctgcaaaagtccattggtcagggtcgatagtccaaagagcgcaatggaaatggttcccagcagcatgatcatcatagtcgtcttgtctccatcatggaataaaagcaggttgagcggtctgcccaagattgccatgccgatcgttgacggaattgcaatgaccataataaaacgtgtcgccagagagatctgtcgatttaccgtatcaaaatctttggcatggtatgctgtagaaagactcggtacactggatgccgccaaagaagatgcaatggagatcggcacattggtcagaacaataaactgaccggaatatacaccccaccattccgaaatctgctttgcggaatagccttgtaaagatgcgatatttttaaatacaccctggtcaataagggtgctgacattgtaaacgatcgtgctgagcaggatcgggaaaatggtcagtaaaagcatctttaatacatgtccataggactcctgctcgcgatgatggtcgcgccgcatacgctttttaaagcgtttccgatagacaagataaacaaagagcacaaataggaaagccagaaaggcacctgccgccgtaccaagggttccacccgcagcaccataggctgccgcgtaagcatccgcatcacctaataccgctcctaccctctttccgtaggaataaagcatataagcggcaaccacactgacgatggcatttaagatctgctccgctacctgggaaaaggcactcggcatcatggtatttaagccctggaaaaatcctcggaatacaccgagcagagccacgacaaatacggtcggtgccagaaccttaagagcgattgcactcaaaggtgtctttagcagtgtcccggtaaagtaatcggcaccaaaatacaagagcaaagcaccaagcccgccactaacgatagcaaatccaagcgctcccttaaatacccggaaagcatcttttgctctgccatttcccattctggatgcgaccagtttggagaccgccagcggcagactgaatgatgacatgatcaatataatattgtatatactgtatgccgttccataataatcattacccgtctttccaatgatcgccgtcaacgggatacgataaataagtcccacgatacggctgataatggatgcaatggcaaggatggatccctgcataataaaactggcatcactgttctttgacttacccaatttttacctcttaactcttactgtgctgatgaaaattcctcttcggtcgcatagaatgcggagtcatctgcatactgactctggatgatgcatacccatgtcttaccctgatttaaaacgatctcattgccgtcgttgtcatagtaatgtgtgataccgtcatcgcccttgcgccatgtgatgtcgatcatcttaccctgggtaaagaacttaccttctccggaaccggaaacggtaatatttaagtactgggttccctcatagatactattattgacgttctggaaaataatattcgaaacctctacctgcttaccgtccacagcgtcgatctgctcagcgccaaactggtatctggcataggtctggctatccttattgtaaataaaatacggatggttgtagaaataatacggctttacaaccacacagtctgtgcctgcggataaggtattgggactgtcatcctctgcaaagatatagtgtccgtcataagatgcatcatactgtgtgtcgtatcccttctttgcaataccgctggcgataccctctgcactcgtatatgcgttgtgtggtgcagcatgttcgctggtacggtagaatgtatctcccaaagatccgtccaagccgctcagattatccacgataccggtagcaagcagctgctcgccctgtacgctctgtccgaaatgcacataaatggcatcaaactctgcagcaaactgggcataatacggacgacaactacgcacatttcccatctgtgtcagatcggcataatcttcgtagatcgccatcattctggtgatcgagccttcaaccggagcctcatacaaaacaccggcagaattgataccatactgtggcagagccgctttggtattctctgtcatgacggcaacggcacgactgcggccgatcgactgatctacccattctccggtcagataagatttgacctgtccgtcatggttgacttcttcctctttttcaacgacctctttggtctgcccatcatcttttttctgatgggtgacaacaaatgcagcagtgcctcctgcgagcgccactacaacggcacaaataatgccgatcaatgctttcttagacattcttttcttcctccctcgtaatatgtaataaatctaagatataagactgtttttcttccataagggttgcctcatccggggtcatatgatcatagcccatcagatgcagcatactgtgtgcgatcaaaaaagcatattccctcttccgggaatgtccgtattcttttgcctgcgccaaaacatgatctacagaaatcacaatatctcctaagatcagttcatcattttctgatgttgccgacagatcaagcaaagaaaagtctcccggtgccggataatccatcataggaaaagacaatacatccgtagaccggtccatttcccggaattgctggtttaattcatggatcgccgcgtcatcagtaagtaccaggctcacctcgacttcgtatggaaattcttccacttccaaagccttatcaatgacatcctctgccaccttgcggtagtcaaaggaaaatgggatatccacctcttcttctaataataatgtcataacaaagaatcctcccggactaatttctcacggatcttcaaaaactgattgatgctgagccccgactcgtcatagatccccttttgcgataattcattcaacgtctgatatattaccatatcttggttccatgtgctagacatagtatcctgatccaaaagttcgatcttggtcaccagagcatctaccatgtgcacgatcgccgattccggtgtctgtggcaggcgcaaaataccaccgtattcctccatgaccgccatgacatcagtcggaaaacaatggttgtttgccagccgcagtgcattgtcaatctccggctcgccttccatcttgcccagtcggtaataaaatcctgccatcatagcacagggtgcatctgcaccgatctcacccgcgcagctccccgccagacgcgaaacccgcctgccgtgattgtattctgccatagaaaaccgtcggatatccatgaccagcggataggtatcttccaaaaaaagccggtatgatccttccagttctgtctgatttttttgtagcagccagggaaccagggcaagaactacaaaagcgtaggctatgccatcccccaatccccacaagacctgtcggatccccagtgtgtgatgggaaagataataaaatacgatcggcagtaaaaatcccagaacaaaataaagcaaatgaatgccaaaaaacgacgtcttttccctgccctgcaaataaggggtcaataaaataccacagatgaccaaaaggctatagcagacgatctcatacaggctgagactttgtgtgatacctaagagtaagaccatataaagtccaagtcctaaggcaagcacatcatccattgccggaaacaaaagtatgccgatcagcaagaccggtgtaaaaaaatgcggacaaaaggatcctgcaagcaggactgcccacgccggcaagaccgataaaaataccttttgataagaagcggactgcttctggggaagttctcctaataagcggtgcttcatcagggcaagcacaaagatcagaaagaaactaatgtctaaagttacaaggcataaaagttgatccaaaaggatctcttgtcctaggcaaagcaagacctgccccgccaggaaaagaagtcccataccca

SEQ ID NO: 12552 - DNA, 12716 bp, Unknown
  gut microbiota DNA sequence
tttgctggaaatattattttcttccacggtcttttccatgtgtctttccaacctttttctttttgtttttcgtatcttctttcttctcgtagacctcgtatgcgtgtacgatcttttgtaccagaggatgtcggacaacatctgcaccgctcaatttacagatactgatctcatctacactgctaaggacatccacagccacatccagaccggatctggcacttgccggaagatccttttgtgtcgcatctcccgtaatgaccgccttggatccaaaaccgatacgggtcagaaacatcttcatctgcgccggtgtcgtattctgtgcctcgtctaggatgataaaggcattatccagagtcctgcctcgcatataggcaagcggtgccacctcaatcagacctttttccatattgcgtgcaaaactctctgcccccatgatctgataaagggcatcatacaaaggacgcagataaggatctaccttactctgcatatcccccggcaaaaagccaagtttctctccggcttcgatcgccggtcgtgtcaggatgatacggctgacttcttcccgctgaaaggccgtgatcgccattgccatggcaagatatgtcttaccggtacctgccggaccgataccaaaagtgatcatctgatcccggatcgcatccacataggctttttgtccgatcgtcttgggcttgatcggcttaccggaggtcgtatgacaaatacagtcgtctgccagatcttccaccgccttggtcggcagtttctgttcggtcagtcccagcagataattgacttcctgcttggtgatcgtctctcccttttttgaaagtgcataaagacgctgcatgatatcagctgcacttttgatcttgttttcctctccgattacctttaagcggtcgtcgcgtgcgataaaggtaaccgaaagtgtctgttcgatcagtttaatattggcatcaaactgcccaaagatattctccagatgttctactggtatatcaagaatacattctttttcactcataaatgctttcctttatatcggatatttccggcaggtccgtttgtttcttttcggtcgccggagattgcaaaagcaattctccgtgcatggtgcacaaatcattactgtattccataataacatttttatccattatttgaatacctttttcctcaaagtttttttgcaagtcgttaagatgtatttgcatgatttcctgcatttcttttttactatgtgacgttttctgcaatttataggatttttctgtcaaatagttgcaatagattggaagatcccaaacgcctcccagagagatcggatggatctctcttaaggtcgtatgctgtgtttttcccaacatatagggaacgacattaaaataagaaccattggtgccaaagacaaggtattccctacgctgccccatctcgatccttttctgataggtcatttcttccgcaaaggaaaaggcatagacgccctcgatcaaaacatccccgtccgcatttttgggagcatatgccaaagtctggtctccggcatcgttggtgatggcgatccagccatagatcaggacatccccctttttgacatcgcttcccttttccactgccgccgttccatcgcgtacataaagagacgtgaccttaccatcgcatggtgcaagcaggtccatgccgctttcttcttccgtctgcgcttcttcggctgccgccatcttttctttcatagcgatctgtaaggaggaacctttcatggaaaccgatacccagatgacctccggaaaatctgcaaggatttctttttccagaatctcgcaatccatgtctttctttttgctgccgattccctgtcctttccggctcagataggattccagcatttcctccgtcacaaaggaattgcccgacacccggatcatccagatatagcctgagacataaaaaagaagggcaagcatggcgaagatgcccaggacatagccagccttgtgacggtatctgtgcaaagaaaaaggcagaccgatcttcttttgtatccgcaccttagatttggtcttatgcagtatgtcatgcaatttccagacatcgtttccgtagagcatagcctgcatatgataaggatcctgactctttacatcccataaaaaaatcccccggctaatacatattctgatcagacggggaagatcatctcctgtaaatgctacgcacacatagcctttaagaaaacgaaataagatcaatgattcttttcctttacctctattttttcaatgtttccggcaatctgcatctcggtcctggtataatagcagatccgcagatgatctcccaaaatgctgacttcctcctccttggactgcacaatgatcagtttgtcatgatactcgatcagacccttgtaattttcgatcaaggcgctgcggtttcccagaagggtcaattggatcataccgatcatcaaaggattttccagcggttcctcccgctctaaaagattgccgatcgtcctcttatcatttttcatcataatgcagtatatgagtcatgccagaaacatatgcctcaaaaggtctttttacttgtgatatggctcgccacgcataatgcggtaagaccggtagatctgctccaaaagaatgacccgcatcaactggtgtggaaaggtcatctttgaaaaactcaaggcatagtcactgcgttttaaaacagcggtatccaaaccgatcgaaccaccgatcacaaagaccaggctggacttacccgccagtcccagacggtcgatttccttggataagccttccgatgtcagcatctttccatcgatttctaaggtgatgcaataatcgctgtctttgatgtgtttgagcagacgctcaccttcctttttgcggatcagatcgttttccgcctcggatgcattttccttggtcttttcatcggcaacttcgatcatctgcaatttgcagtagcggctcagacgcttttggtattctgcgatcgcatcacgaaaatatttttccttgatctgtccgacacacaagatggtaatattcataccttaatttcctccatataagcaaagcattaaagccacaggaaattcctgcggtcttaatgcttctttcttactattgtggtatatatttgtaattacactctaaaacgtcactggtcttgccatgcttatctacaaggatcagagataagatattgttgccctccatcatctcgatcggtcctgtgtacttggcagaagcctgtgtcggtgtcgtaccgtcccaggtataatagacacttgcaccttccggcacttccacagtgatcgtcgttggcgtcgtgaaactgccgccggatggggtgacaaccggataatccgggtcagcataggtgatcttataattcttttcaactacctgactggtcttgtcgtcattttcacataccgccttgaccgttgtcgtgccctcctctaaagtaaaggcttccgtataaagaatgccgccctcagtcggatcactgccatctaaggtataatagatcttgcctgtcttgcaggaaagttcgatggtaacatcatcatcatattttcctccgtctacggaaaagaccggtgcggacaagaggttgtcattaaagagatccagtagtttctggctggaaacctgtgtctgtaaattggtcaacttatcataatcgcctgtggccagatatagaacgatcagcgatttgtaggcagaaacgttatcatcatcttgagcgatcacctctaataataaactttccgctgtatcatattcttccaacttgatatagtcattggctgcaagtatcttcgcctttgtcttggtatcgttcttttctatggcacgattgtaatagaccaaagcacctgtataatcctcttttgtatccaaagtcttgcccttggcgacataatggtcgtaagatgtcatataaacggtcaaaaagaccagcacaagacacagggcaatgattccaccgatcaaaccaactcttgccttcttatttgcccaaagccccgcaaagccctttttcttttccggattttcttctactgcctttttagcggtagaagcactcttgccaccggcggaagtcttcttatccgactggacattttgtccaactgtctccggctgattttcttccgtttttccggctgatttttcttcttccagaagggatatcagaaaatcatcctctaagatattgtagtccggcaccatctgcaccggttccccacattttttacaaaaaacactgccggcatcaatctcggctccacatttactacatttcatagcaatctcctatttttgcagatcaacggattccagacaattatgcatgagcatagcgatcgtcatcggtccaacaccccccggaaccggtgtaatggcggaacaatgcgatgctacctcatcatatgccacatccccacacaaatggttggtctcatcccgatgcataccaacatcaatgacaacgactccctctttgacatagtctgccgtaataaactgcttcttgccgatcgcaacgatcaggatatctgcctgtctggtcacagaagcaagatctttggtcttggaatgggtcacagtgaccgtagcattttcgcgcagcatcaaaagtgccatcggttttccaacgatattgctgcgtcctacgatcacacaatgcttgccttccatgtcaatatgactgcgctttaacaactggataatgcctgccggtgtgcaggatacaaagcccggcagaccgatggaaagtgcaccgacattctgcggatgaaaaccatcgacatccttaagcggatcaatggctctggtgatcttgtcctcgtccatatgtttcgggagcggcagttgtaccaaaataccatttacatccttgtcgccatttaatttgtcaatgagcgccagcacctcttcttcgctggtatcctctgccagttcataggacaaagaacggatgccgatgtactcacaggctcttttcttattgcgcacataaacgcaggatgccggatcctgtcctaccagaaccactgctaaggtcacttcctgcccctgcgcatgcatagcggctactttttcctttaactcgtccttgatctcctgtgaaatcttctttccatcaatgatttctgccattgtatcttctcgctttccagtcttttttaaaataatccggtgatcacaccgtcatctgaaacatcaattccaaatgctgccggcttctttggcaagcccggcatagtcatgatggctcctgtaacaaccaccacaaagcctgcaccggcacttgcatagacttctcttacattcaaggtaaagccttccggtcttcccagtttctttgcatcatcagaaagggaatactgggtctttgccatacagacagggaaatctcccatccctagttccgtaatatgagccagttctttttccgcagccggtgcataagaaacatctgcggcaccatagatctccttggcgatcgtagcgatcttgtcctttaatgacatttcagacggatagatcggtgcgaaatgactttccttatgatctaggacatccaaaatggtctctgccaaggcaacgccgccctgaccgcctttttcccatacttcggataaagcgaaggcacagccgcgtttctcacagaagtcacggacaaaggctgtctcctcctcggtatctgtaataaaggaattgagggtcactacgaccggcacatcaaatttctgtaagttttcaatatgcttttccaaattgacaatgccctttttcaaagcatccatattttcctctgacaaggcatcctttgccacgccgccattgtatttgagggcacggatcgttgctaccagaacaacggcatccgggtgtaaacctgccatgcgggacttgatgtcaaagaacttctctgcgcccagatcagcaccaaaacctgcctctgtcacacagatatctcccattttcagtgccatctttgtcgcgcgcacactgttgcatccatgtgcgatattggcaaacggaccaccatgcaccagtgccggtgtatgttctaaagtctggatcatatttggcttcaaagcatcctttagcagggctgccatggaaccgactgcctgcaggtctgctgccgtaaccggttctcccttaaagttgtaagccacgataatgcggccgagtcttctctttaagtctgccatatcatctgacagacaaaggatcgccatgatctcagatgcaacggtaatgacaaaatgatcctctcttaccataccgtccatcttgctgcccaagccaacgacaatattacggagcactcggtcattcatgtccagacagcgtttccatttgatctgtcttggatcaatgccaagttcgtttccctgctggatatgattgtctaaaagggctgccagcaggttatttgcagaagtaatcgcatgaaaatctccagtgaaatgcagattgagatcttccataggaacgacctgggcatagccaccgcccgcagcaccacctttgataccaaagcaaggtcctaaggaaggctcacgaagtgcaaggactgccttttttcctaactttgcaaatgcctgtccaaggcctacactggtcgtcgtctttccctcgcctgccggtgtcggattgattgcagtgacaagtaccagtttgccatcttcttcctttgccaagcgctccatacactcatctgacaacttagccttgtattttccatacatttccaagtcatctggcgtaagtcctacctgttctgcaatctcggtgatcggaagcatggtcgcttcctgtgcgatttggatgtctgttttcatgttctctctccttacataagtaaaatgttgtctggtctctagtaacctctatcctaaaagtcatcgctgaccggatattcctcttccaccgctgaaactgctgatggatttaagaattgctcaaactgggtcggtgtcatatgtaccgttctaggtttggttcccatttccggtcccacgactccggcctcctccaactgatccataatgcgggctgctctgttaaagccgatcttgaagttgcgctgtaacatgccgatggagcccttttccttggatacgatcagacgacctgcctctgcaaaataggaatccctcgtatcttcaaaaccactgccgcctccgatagcggtagcaccatcactgccgtccgcgccggactcaatatgcttggtcacattttcatcataggaagcctcttcattgttacccttgatatagtcgactacatcctgcacttcctcatctgagacaaaggcaccctgcacacgcagcggcttggtatagccctgtggataataaagcatatctccgtttcctaagagtttttcagccccgaacatatccagaatggttctggaatccacaccactgttgaccgcaaatgcgatacgggacggcatattcgccttgatcagaccggtcacgacatcaacagatggtcgctgggttgctaagatcaaataaataccggcggctctggccttttgtgccagacgacagatggattcctcgacttccttggcggcaaccatcataaggtctgccaactcgtctacgatcacgaccatttccggcatcttttcaaaggtacccaattctccattggaattgatcggtaactgataattatgttcttccagttttttattgtaagatttgatgtcacgcacactggcatccgcaaatttctgatagcggtcatccatttccgtaaccgcccagtgcaatgccccagccgcctttttcggatcggtaacaaccgggatcaacagatggggtatgccattgtaaatactaagttcaacgacctttggatcgatcatgataaacttgacctcgtccggtcttgccttatataagatactcatgatgatcgtattgatgcagacggatttaccggaacctgtcgtaccggcgatcaaaaggtggggcatcttggcaatatttgccgtaatgacattgcccgcaatatcccgccctgcacagaaagtcaccttggactctgcctttttaaattctgcggaggaagccatttcctcaaaggataccatgactttatttttgtttggcacttcgataccaacggctgcctttcccgggatcggcgcttcgatacggatatccgtaaccgccagattcaacttgatgtcgtctgccagattggtgatacggttgacgcggacacccacttccggctgcaactcataacgggtaaccgtcggtccacaggtgacatctgtcacctctacattgatgccaaaattgcggagtgtctgttccagtttgtctgccgtggcttccaattctgccttggaatttccgtttccgctcgccgccttctttttcaaaagtgacagggttggaaatttataggctgccgccggctttgtctcctgcttgctcttggcgatctcatctgccacctgatctgcactcttttgggtctcctgcatgcttgccgctgtcttgcgtggacgtttttccgggggtgccacagcctcagccgctgtgggtgctgccgtctccttttcctcagccctgacaacttccggcgtagaaggcataactgcctgcctttgtggctgtaccggagaagtcggtcttaccggatcattttctgccttaggcgcttccgtggtcacatttgcgacagatggggtcgataaattaatgcgtcggcttggacgtaccgattctgccttaacaacttctaccggtttttcctcatccagaccaatgacagacgcagatccggtgcacttggaagataaaggcacacgcttaacattcttaacctcgacatccttttgcggtgccatatgtacctgttccacctcatccgaggatgcctgcaccgcctggatctccggttccatcttggtatcaaatgccacacctgagatcttccgatctctgcgcggcgcgttttcatctacctgaccggcagccgcctgccgtttcttatcggcccggatccttgccagtcttgcctcgcggtcttcatttggatctgcatagcgtcttttctttctacgtctgcgactgcctgcctgctgtagcaaagagcgttccgtaatgagaatcaggcaaacgatcatgatgacaaaggtaagcacataagcactgatcagcccaaaaccttccaccagcccggatgcaatcattcctcccaaaagcccgccgccagccttgctctctcgtccatagtaaaaagcacgcatggctgcataaggagcatccccgtgggcaaacaattccaccaaaacactaagaaaaaccgtaagcacgccaccggcgatcagtttgatcgtggcgatccggtttccctgattggaaatgccaaagaaagtagccaccagaagcaggatgggaaacagataggcaaccaagccgaaaatgccaaagaagaaactactgacagcattacctacgatcccaccgatccccagattactcaaaaacaagagaacacagaccgcaaggaagatccacaaaaagatctctttgatggcttctgcctttgcaacatcgaccacttccgcctcgactgtgacatttttggcagttgttttcggttttgtcccctttttcgtcgtctgtttctttgtggctgtagactttttgcttgcggaagtcttggtcgtattccgttttgcacttgtcgttttattagccataatttacgaatcccctaatcttataatcacatacatcctacgatcactgcaatcacaccaacgatcatgcaatatacagaaaagatggtaaatttcttcttgcggacaacaagaagcatggtcttgatacaaatatatcctacgacagcggcaaccaccataccgacaacataattgacgatctcagaagatgctgttgttgcaagactcaaatccttcagttccaaaacggctgccccaagcactgccggaatggacatgataaaggagtattttactgcgaaagtgcgatcgaagccgctcaaaagacatgccgtgatcgttgttcctgagcgggataagcccggaagtgtagcaaagccctgacatacgccgatcacaaccgcattgccataacttgcgttttcttcggtctttttaccggttttcacacgatcggaaataaagagcaaaatacttgtgatgatcagacagatgcccggaaccaataccgtcgcagatgctgcttcgatcaggttctgtcccagaacacccatgataccggtagggatagtcgagacaatgatcaacataacaaagcggcgatacggtgtatccaccatcttgcggtacttctttttcctggaagaagaaagattgccgatcgcgatgccaacattggcaagaaagtcgaccacaatagatacgccctcacagatcaactcccagatatctttatagtaaacagcaaaaatagcaaccagagtccctaaatgcagtaaaacgtcaaacataatcccagtatctgtctgcacatgaaacaatgccttaaaaagcgccagatgcccggaactgctgaccggcaggaactccgttaatccctgaatcagccccatgaaaatagattgcaataatgacataatgacctccatatatgtgattttaccaactttttaatattaccatattttccagaagctgtcattattacttttctacagattacacgcctttttgcgccgtctttttgcttgctatcattctttccaaggtcagcatggcatcccccagactgcctacatgagagagcaaaccttcattgactgcttcttcgcctaccagaatagttcccagatccttggccatggtatctttagcaagcatgagttcttccagacgtgtctttttgatcgccgcatgcctgcagatgaagccgatgatccgttcctgcatctggttgaattgataataggtctggggtgctcccagtacggttccgctcatccgtaccggatgtgccagcatagtcgcggacggcacgataaaagaacagtccgttgcgactgccagtgggatgccgatggaatggctgccgccgatcacaagagagaccgttggcttttgtatggcagcgatcaattctgccatcgccagaccgcactccacatccccgccaatggtatttaagacaaaaagaatgccgtctacagaggcatcattttccatgccgatcagaagcggtatcatatgttcatatttagttgtcttagcatttgcagccagaagcgtgtgtccttcgatctcacctatgatggtcacaattccgatcctgtgtcccttttctgttgtaatgacttcctgtccatattccttcacactatccattttaatcttcctttttctttttagtgtgcatcaaagaatataaaaaaatacaaaaagcgcccgttcctaagaactgacgcatctttttgtatctattacgactcgcccatcagataggagtaaagtccctcataattggatttagagtttttccatgaataatctttttgcatgccacggtctaccatcttgttccactctgccttcttttcaaagaaaacatacttggaataattgacagtgttcaaaagttcatccccattataattggcaaaggagaaaccatcaccggtatgctcatattcattgtaagggatgaccgtatcctttaagccgcctgtctcgcgcacgatcggcacggtaccatagcggaaagagatcaactgggtcagaccacacggttcaaagcgcgacggcatcaaaaaggcatctgccgctgcgtataacttgtgagccagatcctcggaataacagatgtttgcggatattcggtccgggtatttccatgcaaagtgacggaacatattctcgtactgggcttcgccggtaccgattacgaccagttgggtgttgtcatccaccagacgctcgatacagtaattgaccagatccagtcccttttggtctgtcagacgtgagatcagcccgatcatgtactttttcctgtctacgacaagcccaagcaactcctgtaacttctccttgttgacctttttgtttgttctaaaattggatgcactgtaatttttgaagatcaaatcatcctttgccggatcgtacatagcatagtcaataccattgacgataccgcgcatgtcaaaatgtctggctgacagaagtccgtccaagccctcgccataataaggggtctggatctcccctgcataggtatcactgacggtcgtaatatagtctgcatagaccagaccgccctttaacatattggcaccctttttgaactccaatttgtccggtgtaaagagttccatcggcagaccggagatcccctgaatggtctcgatatcccagacaccctggaacttgaggttatgtatagtcatgactgacttcatgccccagaagaaaggattaccggcaaattctgtctttaaataaacagggatcaatcctgtctgccaatcatggcagtggatgatatccggctgaaagtcaatgagcggtaacatggaaagtactgccttgtcaaagaaaataaatttctcgatatcgtagcgcgtatccccataaggataaaagcactcaaagtactccag

SEQ ID NO: 12553 - DNA, 5083 bp, Unknown
  gut microbiota DNA sequence
aaattgacaaaaatttctcattttttccacatatttacttatattttggcatatacaaaggtctgtctgtgtcataaaatttatacacatcccaccatgtgtctaaagtcagggacgttccttttgccacaaggagcgtcccctttggtcttttttactgacaggtagccagatctagcggctggcgatctcacgctgcaaggcgttccatacgcgcttcttgtccgcactccataaaggtgcaagcagggtcttcttatccccatcgcctgtcatgcggtggataaccatatcttttggcaaaagactgatacaatctgccactaaaccaacatactcttccatgctaaagaccgggcatcttcctgcctcatattctttttccagatctgtcccctttaatatatgaagtaactgtaacttgatcccatcagcgccagacactcccacataagagaccgtctccttcatcatatctgtggtctcgcccggcagtcctaagatcacatgcacgataacttccaatcctctcttttttagtcggccgaccgccgcatcatatacagaaagcggatagccgcgccggatgtattccgccgtcgccgggtggatggtctgcagtcccagttctacccataccggctttttcgcattaagttcttctaacagatccagcaccgcatcatccagacaatccggccgggtagccaccgatagggcaagtacatcttccggctctatggctgcctcaaagatcgggcgcaaataagaaacaggcgcatacgtgcctgtatacgcctgaaaataggcaatgtacttgcctgctttattctttttttccactctcgctttgcctgcgatcaactgcttttgcaccgcctgacgtaaggcactttggtctgcctctgtcagtatctctccccgtctggtcttttgcaggatcttttgcatgtccagatgctctgcgaaatcgccactcccggatgccgagcaaaagatacagcctctggtatccaaaagtccgtcacggttggggcaggaacagcctgcatccaaagagatcttgtatgcctttgtgccaaaggtatggcgcaggtactcattcagtgaataatatttcatcttacattctttccggtgcagaaaatcccagcagatcaatacagatttcaaggacttccttggtcagttccaacaagcggatgtagcctgcctgctttttctcatcttcctccgtcatgatcttggtctcatggtagaagtgattaaatgcattggcaagatcataaatgtatgcgcagatcctgtgtggtgcattttcttcgtatgcgccacgcatagcactgttgaacttggcaagttccagcatcaaagacttctcactctcggatgctgcggtcaggatctttgcatctgcaacctttttgccactctcctcatacttgtgcaaaatagacttcatacgaacgatcgtgtaaaggatgtatggacctgtgttaccctcgaaagaagtaaagcggtcaatatcgaaaatataatccttagatgcctggttggaaagatctccatacttgatcgcagaaagtgcaacgatctgggctgtctttctcgcctcgtcctcttccatggtcttgttatccatgatcttttcgtacatcttttcattgatctcagaaaccagagtctccagacgcataacgccgccttctcttgtcttgaaaggcttgccgtccttgccgttcatggtaccaaaaccgatgaacttgagttctgtcgtatccggtacgataccggtctttcttgcacagcggaatacctggacaaagtgtaactcctgacgcttgtctgccagatagatcacactcgccggatgataatcttccatacgccagatcaacgtagcaagatccgttgtatcataaagggatgccccgtctgattttaagatcatgcaaggcgggatttccttggtatcggtgtcttccttaacatcaacaaccagtgccccatcactgacataggcgtaaccatcttttttcatcttctctaccatgtcaggaatgtatggctgtgcatcggattcccctttccacaactcaaaggacacattcaggttctcataattctttttcagatcactgactgacacatctaaaatatgttttaaaagtgcctgatagccgcgatttccctgctgtaattcaaaggtagccgtcatggcttcctctttgtaagcagcatcttcttttgactttgcactggcggtcggatagatttcttccaactcgctaatcgtaaatggaggttcgctcggatactctcctgtataatccggatcaaaatagcaaagatccggctggcgcagacgaagttctgtgatgataagtcccatctgtaagccccagtctcctaaatgcacatcgccgatcatattatcacccatgaacttgccgatgcgcttcacgctctcaccgatcacggcagaacgaagatgtccgacatgcagtggctttgccacatttggtccgccgtaatcaacgatcacggtctttggctctgcaaccttatctacaccttttctgtcgtcttctgccatggcattgacatagcctgtcacatagacaggtgcaaggataagattcaaaaatcccggtgggcaggcgatgacactttcaaacatcgggttatcctgtagtttctcactgacctctgtagcgatcgcgatcggcgccttcttgtattccttggctgccgccatagcaccattacactggtattcacacagatccggtctgtttgacaaagatactctgccatatttttcatcgtagccacacgccacgaaagcatctgtaatttcttttcggatcaaatccaagatttctttcatattcttatcccttcctactaattataaatccatgtacgagacaggtgtcggattactcttctgtcttaaagatcttgaagcgatatttccataaggctttctttaggatcatgcccagaacacagatagaaagcacttcaccgatgccgactgtcagcatcagataccataccgcatcctctaagccgtacacattgcggagtacgagcggtacaatgatggtattagcgatcaccggcggcaaggtaaaggcaaacttggtctttcttaaaagataagtgccaatcgcaccgatcagggttgccagactgccaaatatcacgtcgagtgccatgcatccggtcaagatgttgctgagcaaacatccaacaaaaagtcccggaatcgctgccggcgtaaagatcggtaagatagtcagagcctctgagatccttacctggatcgcaccgtttgcgagtccaaaggcactgataaaataagtcagtaccacataaatagccgcaatcattgcggcctgggtcaatcgtaacgcacttgtttttttcatatgtaattctccttagttttgttttgcgtgtggatggtttcgaacacacgttgtaaatccttatgattttatcataatttgcggggtttggaaagatgataaatggtacaaagtaacaaacatcctagcagacatcccgcactatctaacatgacatccggcacttgcccgctccgtcccgggacaaatagctgatggatctcatcggttgccgcatagcctgtcccaaggagccagccccaaagtccataatgtcttttttcaaaggatgacaaagtggctgtaagtaaaataccaagaatggcatactccgtcgcatgggcggtctttcgcaccgggaattcgatgatctcggcatactttgtccggtcaatttctgacatggaagaaaaatccggtactaagacacttcctaccgtcatgccgacgcgtagacttgtcttggtcgattccgtcgccggctgcgccgagaaggaaaaaatcaggagcatccagaggatggaaaggatgaggtatgcagttggtttatatttgtgggattttcgtgggttggtattcatggtttgcttgtgatctctttcgattattttctattctaattatatttaagctgaagtgcaacttttatacaattaatgatagtgtaaatttgtactttttccattgcatttctgctctacatctgtcatactcaccttatagttatccgatctggatatctttctaacctgatgattcatcaggacgattccattttatgaatgcgatgcgatgagtttggggagttttgcacgcgattcttctctctcatcctttcgccaaacaacgatagaatgaggtgtctaatgaaaaaaattcaaatgaaacaacacaacaatcaaacaacaaatgcattcaacggttacgcaactgctagtggcgaaatcgactatggatttcgcaatgactacatgtttcgtgccatcttccaaacaaatgaaaccgctctaaaaggccttgtttgcgctctattgcacctaaaaccagaatccgtaaaatctatcaaaattctaaatccgattgaacttgggagagcgtatgatgacaaggagttcattctagatcttgccattttgctaaatgataatacctatatcaatcttgaactgcaaacaatagacttacatgattggccggagcgctctctcagttatctctgtcgttcctttgaccagttaaataagggacaggcatatatagatgctaagcctgtcatacatattggcattctgaattacaccctctttaaagatgcacctgaattctatgccaaatatgaacttcaaaatgtgaaaaatcagcttacttatactggaaaatttgctctgcatgtgttagacttgacacaaatagataaggcaactacagaagataaacactacgccattgacaaatgggctacactgtttaaagcaacgacttgggaggaacttcatatgattacaaagaatgacaaaaccatgaccgaagccagcaaaaccctctacgagatgaatgctgatcagaccatccgcgatatgtgttacttccgagaacacgccattattgaggagaattatcggaatgatttgataaagaggcaacaagccgaacttgccgagaaagac

SEQ ID NO: 12554 - DNA, 355 bp, Unknown
  gut microbiota DNA sequence
tgtcttgccatgcggcaatcttttccattcgggtaattacctttaatgaaggttctgttttctttaacttcatgtgcaatagtagatggatgtctgcgaagtctttttgctatttttttgaatgactccccgatgcatatcccagtttctattgctattcgatctgacaggtccatttgtccgctagcattgtaataattcatatctgctcctttcccagcagatagtaatcgatataaccaatatatcatgccttggaaagggctgtagaaaaagtaaactagaccttttatagccattttcagttgtcaaagtacaggtttaatttttcattttagggttatgctgggagaaa

SEQ ID NO: 12555 - DNA, 3387 bp, Unknown
  gut microbiota DNA sequence
gaactttactgtttttcaagagttgtcttctattccttagactcctttacaagtacaatggatatcatcttggaactatacataatgcttctggaataaaaggtaaaaaaaggaggagaaaaggatgtattattgcaatccgatcaatataccctatcgctatcagtatgtaaaaaaagacgatcgggcagtcatttatagagaggcggcagatccgtcactggtagtatttcatgaaaaatactatatgtttccatccatgacaaaaggatattttgtcagcgaggatatggtaaattggcaagtgaaaaaattgcagggattaccggtttatgattatgccccggatgtgcgcgtgatgggggaatacttgtatttcagtgcatcccgcagagatgccaattgtgatttttaccggacaaaagatccggaatcaggtgtctttgaaaaaatagaggggacttttgatttttgggatccgaatctctttgtggatgatgacggacgtgtctatttttactggggatgttcctctgtggaaccgatttacggtgtggaacttgatccaaagactatgaaacagattggccagccgatggctttatttgataaccataagaatgattatggctatgaacgtgtgggagaggatcataatgaacagaagcggagagatatggcatttgagcaaatgcttattcaggggttgagtgcacagttggggaaaaatccgagtgaggtagcagacgtatatgaactgatagaacttttgccagaggaaagacgcctttttatggaacgcttattaggtccaacaccgaatatggaaggggcgtggatgaccaaatatcaggggaaatactatctgcaatatgcagcagcaggaacagagtacaatatttacccggatggagtttatgaagcagaccacccattgggaccttttaccttggcaaaaaacaatccgtattcatatagcccgggagggtttatgccgggagcaggacatggatcaacaatgcaggatctaaaaaataattggtggcatacagcaacgatgcgcatttcctgcaatcatgaatttgaacgacgtcttggcctctggccggcaggatttgatagggatggagaacttttctgcaatcaacgttacggagattggccgattcttctggatgaaaataaggagcaagatccgtggagagaaccggattggatgcttttatcctatggaaagcaggttaaagcatcgagtcagaaagaagcagaaaaatctgccgccaatgtggttgacgaaaattgtcagacttggtggaaagccttggatgaagacagccaaccgtggattatggttgatctggggaaagcaatggatattcatgctatccaacttaattttatggatgatcataaggaagtggacatgccgcaagagaggatggagaaagagaatccggaggagttgaccgagcgtatcaagggaagtcgatatattgaagatgaactggatccgatcaattatctgttagagggctcagaagatggaaaaaactgggagacactggcagataaaaaacaggtaacaacaagtttgccacacgattttttggtatgggagcagggaattatgtatagatttatccgggttacggtcgtaagtcagccacatgaaccgagtgcctgcatggcagggatccgtatttttggacttggtaatgggcaagccccggcgccggttacggatgtaacggcggagagaataagcggcacagatatgaatctggcatggaaggggagtgcagttgggtatgagattctctggggacatgaaaaagataaattgtatcacagttatcgggtttttggagataaggaaaaaaccatacgtgcattagtttcgcagatgtcacagtattatgtgcgcattgatgcttttaacgaaaatggcatcacccatggtaaatgcctgcctgttaaaaataaaatgtaatcattaaaaatacccatcacagtttgtttttactgtgatgggtattcttatcataggcaccttttaggttattttgccttattcttttctaattcctgcatcttcatagcacgaaccttgagcggaagaccaaagagtgtgataaagccttcagcatcatggtgatcgtagagatctccggtcgtgaaacttgcaagtgactcactgtagagtgagtatggagaagtagtaccggctttgatgatgttgcccttgtataactggaacttgacttcgcctgttacgtattcctgggtagaagtaacgaaagcctggatggcttcgcgcagtggggtaaaccatttaccttcgtaaacgacctgtgctaatttgttgcccatgtctttcttgacttccatggtagcacggtcaagtaccagttcctctaactgagaatgtgcttccatgaggatggttccgcccggtgtttcatatacgccacggctcttcataccaacaacacggttttctacgatatctacgataccgataccatgtttgccgcccaggcggttcaattcacggatgatgtcggaaactttcatctttttaccattgacagaagtaggaatacccttttcaaaagtcatagtaacatattcgccctggtcaggagccttctgtggtgtaacgcccagaactaacatatgatcgtaatttggctctaaagaaggatcttcgagttccagaccttcgtgactgatatgccataagttacggtcacggctgtaagactggtcggtagagaatggaagatcaatgccgtgagccttgcagtattcgatctcggattcgcgggaatccatcttccacttgtcatcacgccaaggagcgataaccttgatgtcaggggcaagagccttgataccgagttcaaaacggatctggtcatttcccttaccggtagcaccgtgacagatggcaacggctccctctttgcgggcaacttccactaatttctttgcgatgcccggacgagccatggaagtaccgagcagatatttattctcataaaccgcacctgcctgcacacaaggaatgatataatcatcacaaaattcatccgtgatatcttcgatatataacttggaagcaccggataatctggcacgttcttccaatccgtccaattcttcgccctgaccgcagtcgatacagcaacatacgacatcgtatccgtaattctctttgagccatgggataatggctgtggtgtccagcccgcctgagtaggctaatactactttttctttcataatgaaatgttcctccttattgataggcacgcgatcgtgcaatttgtatctgaaatatcgtcttttctattacatcagacctagaaataatatacaacaaat

SEQ ID NO: 12556 - DNA, 29663 bp, Unknown
  gut microbiota DNA sequence
tgttggcaatattttaattctgatactgcgtataatatttttactaatcattattttttcaataattaattttgccaaatcatcttccactaaaacaaccatatcatttccatatccatcgtccccatataaatttcttgttgcatatgctggataacaaggatttgtaactacaatagaaccatcaagcatcttcgtaaggtaatatatattttgtgcctttatttctctgagcaattcaagcgaatgtgtggaaaagaaaattgacaagttaatttcgtctgcaacttcctttaaaaataaaatcaatctacgtaatgccgaagaatgaagtgcaagttcaatttcatcaagaaatacaatacaaggtcttccatcattatgctcttgctaggtcagacacgccgtaacaagcagacaagtaacatcaaaagttatctttacccttgcatatggcttttggatgatctctgccaaatctctcggaaacagatctgctggtatgactggaagtttacatctgtttgacaatgctatgccgatgcaaagtatcgattgtagtcccatttgtttaggatggcaagacaaaatcctcctcatgcgaatattttcctaaatgccgttcagaatcaatccttacctctccacttcatgcttccggctcagttcctctttcaacttcttccattcctcgcccaccagcggataggctttcatggcaatggcagaaatgataaagagcaatgccggcagtgccatccaggcaaccttaacaccaaactttgccatagcatcctgcgcccctgccttgacggcattgtcatagccaaaccatccaatgatcatgacaaatgctgcatttgcaaaactgatcgccggtttcgtgatcagactattcacacctgcatacatgccctctctacgaaatccggtcttggcttcatcataatcaatcacctcgccgttcatcagcggcaccagatacataccaccggaaaagcccaaaccaataataaagaaagcgatcatggcaggaatgacatattgtccggcaaaaataaccaaggttgcacctgccgcaaaggcaacactcatcacgataatacacttggcaacaccgatctttcccatgctcttgatccaaagaatgatgccgcacaccgcaccaacgccaagactggcataagccaaaggcatcggaaccgtgaactcatcaaaataatagaccacgccctgcatcaaaatggtctgcacaaaaataaccgtaaaactaatgacttcatacaccagaaatgccctgtttttaaagcactgacagatagactcccagagtcccggtgcttcctcagcatcagacgtatatttttctttataaaaaaatgtggaaaaaaagattaccagagtcgtaaccacgccaagcatgatcataatggtctgaaaacgacttgcgctctctcctacatccggtctgaccagaggaaagagtaccagcggtgctgccagcgacaagagcgtaaagaagatcttccagacaaagatcccactccttgcctgattactctctgccattgtataaggaagcacatacaaagaagttgcgattgccgtataaaacgtatcaaaaaagaaaagtgatactaacatctgcacaaagagagccgtctggctgccgcccagaggccacaagaaccaacttaagataaagatcacgccatagagtagcgcaccataacggatataagggatccgtcgtcccaattttgatttcgtccggtccgaaatatagccaaataaaggatcattcaaagcattccagacagcgaagatcatccagacgatacttgccagtccctcatccaatcccagatatttggtataaaaataggtcatgcctccccctgtgatcagaccggacagtgttccacacaaacagtctgcactgcacaaccaaaacttactgcttacgcttaccttctcttctttcatcattttacccccattttcttacaatacctttgctacaaaatccctcaaaatgtcctcataacgttctacatcggaatccagtgactgcgcatgatccgcttttggaaatgtatgcagttcactatagcctttatttatcttatgcattctttgactctggctgcacggaatgaaattatcatcttccccatggataaaacaaaccggaatctcattgtcatacaaggactcctccggactgacttttgccaaagaaaatccatacaagatcctgcacacccaggatgccggataagcaaaaaaccccggtaaatggaagatttctttgacctttccacacaagacctccaacaatctgccgtaaccgcagtccgctaccaaaaacttaactttcggcttgtactgcaaagccataagactcaaccctgagcccatagattcgccatgcagccccaaaagaatgtcatccccaaaccgcttgtaagtatcatcgatcattgctaaaagatctttggactcacggatgccaaacatgcagcgacacctcttgttctcgccatgccccctgtcatcatagataatgcagttgaatcccaacttctggaatagatagacatacttataagatccatatctggtataagtatagccatgactgataatcacaaatttttttgactgcgggtctgtctcaatatactccgcatgcaagacataatcatcataagaccgtaccgtgtaggtttcttttgccggaaaatccatcccctttaaatatggctttcccagttcaattttcctggtttcttccagaccaaaccttttcggaaaaactgcataggtacaaagaccgacagacaccaaaaacagcagtacgaccagcacgatcacaatgataagtaagatatgtaatgcccccattttatcccctccttctcgtaaagcggcatattctttcgtctattctcgcgccaaccaaaaatgacattagccggcacatgctaactaatgtcattttaacatacttttataagaaaaataacggattattttatgaaacgcttatgtccgtctcgaccggttccaagccctctccagaaactttcacatgaatacagcccgtttcatatccagcgcggataacagcaagggatttgccaaggaaagtcttgtgctgattggacacaaaatcatctgcaatatttggtctcgcagagccatatccctgcaagcaccctgcacctgtgacttccacctttaagacctgatcgacagatgatttggtaataccgttctcacccaccagatcaatgtttaaaaagcaaagatcctgtccgtttgcccgcaggctctgacattccggtcttaaagaaatctttgtctttccactggcagagaccagtttgctccttcccgtctccttgccggaggcatcgtatgccactgcctcgatctgcccctcttgataggtcactttcttaaacttcgccatatcctgcttggtctttttcttgcccagactctgaccgtttaccaaaagttctaccaccggcgcatcggaatagacggttgccagcgtgtgctttccctcacagccttcccaggaccaactctccacggcatccgtggtacgccacatggaaagcgactggaaatgatctgcatgggtcagcggatctaccccaatcgtcggcacatcctgcaagccccagatgatcttgccccagcccacttccggacgcatctttccgcagatatcaatgataccgggaccgcctgtcataataagacccggatcaatgttttcttttgtcttcttatcaacataacgcacggttcctataccggactcgcccagataatcccagcccgtccacatgaaatcgcctgtcatggttggcaatttctttaccagttgccagttttcatacaaagattgtggcagggtctcggatccggtcgttgcttggtttggacaatctctagcatctttttcatagcggctggtcgcataattatatcccggaatatcaaagatctcacgcatcttgacagccacggcatttgcctttttggaagacgcagccttagtcatcagttttcccatcttattcatgagcagattaaagaaatcagaggttggcatagcatccatgccaccagttccactgtccttgacctgtcccttgtcatccgttccgtaaatgctctttttgccgccagccatcatagcaagcatcaggttgatacctgcggtcaccggacgcgtcttatctttttcatggcaaaaatctaccatgactttcgcctgcttctgtccatcttccataccgagttctgtgatctcatttccgatcgaatacatgacaacggatggatggttgtagtctttggagatcatagcctccgtatccgctttccaccattccttgaatttatcacctgcatagtcatatggatttttgtggatcagccacatatcaaaagtctcatccatcacatacatacccataacatcgcaggcatctaacattgcctttgagatcgggttgtgtgcagaccggatggcattaaatcctgcttcttttaaaatgcgcacacgccgggtctcagcatctgcaaacccacaggcgcccagcacgccattgtcgtggtggatacatgcaccgcgaaagaggacttcttttccatttacaagaaatccctcttttccccatgcaagagtacgcataccaaaatgactttcatcacaatcaagcacactgccgtcctgcacaagttctgctcttacccggtaaagatgcggatcttcggcagaccatggtttcgcattcggtatcatgatcgtaataccctcggtttccaagtgtgtcagatcttccacgaccatatccgtcacgaccacattttgatccagaatcgtgatctttgcctgggcattttccgccacacaggcaaggcacaggcagatacattcctgatccaatacctgtaccttgattccttccggcttgatataagatgatcccgccgtataaagtgacaccgggcgataaataccactgccggaataccatctgctgtttggcacatctgcattatccgcgatcacctgaatctcattctgaccgaccgtcaaaagatctgtcagatctacataaaaattcgtataaccataaggtctttccgcgatctgctttccattgaggctgatgcgcgcattctggtaaactccctcaaactccaagatattggtctgctctgctgtctgggcatccacatcccaaatcttcttataaatgtacttgccaccctcaaaataagcactggcgctggctgtcttattttctttcgcccttttttcatagagcatggcatcatgcggcagattaacgtgttctaccctctcctgcccttctttttgcaccgtccagtcccggttaaaatcgatttttctcatagacgctcctcttttcctctgttttcacgctagtatattttcatatcttacaagtattatatctgttgtcttctatcgtgaaaatatcataaagcgtcctatttatgtcattttttatcatatccgatgattctatccccagaagtccccgctttttcatccagagtaaaatttatttctatatgcgataacggttaaagcaggcatagatctcctgttttcttgggattgccaagcctccggaaagcgtaccgcgccctgcggtaaattgcatgccctcctgctccagtttgacttgcagatattccacgacatccgcaatacttcttttcccgtccaccagattttctacggcatattttaagagttgtcccagcgccgctgtctgttcactgtcaatcagttgttctaaataacgcagatccacgttttgttttcccagtgcaaaaccatctacacccagtatctttaccttaagatgatcgccggcatctttgatcgcaccggtccgataatctctgcgcttgacggctccatttttatctttttccatgatacgatggaacaccggattttcaaaaggctttgccacatcctctgctatcggaaattccctgcacaaatcttttgccttttgggtgatatccaccggctcatactgatccatctggatcacggtgtccgcaatatggaaaaatgctcccgaactcccggcaaccagaatggtcgaaatatccatcttttcatagagttcccttgctcttgccaaaaatggcgtgatcggctcctgatccggactaacaaccttttgcataaaagcatcccgcaccataaaattcgttgcagaggtatcttcatccagcaaaaacagttgactgcctgcctcgattccttctacgattcctgccgcctgggatgtactgccgctggcgtcttttgtagaaaaatcatgggtatccctgccatttggcagatcattgataaacatagagatatctacatttttgatgaatcttccatcttcagcacgcagtttgagagccgtatcatctgcaatgacatactctctgccatcgcctgcaatatgatcgtagacgccaagttccaaagcatttaacagcgtggacttgccgtgataaccgccaccgacgatcagggtgattccctgtttcacgcccatgcccttgacctttcctttatgtggtaattccaaggtgacctgtaaagactccggcgatacaaatgctttagcccccttcatagggcgtgaagaaattccgctttctcttggcagaatagaaccattggcaacaaaggcaaccaatcccttttcttttaactgctggcggattgctctctggtcttctgccaggtcaatcgcttcttttatccgcgtcgcatccagattttcataatacagagccttttccacgcagaccggcagaaaatcaaagaggatcttatccagttctctggcattgatcgttctgccatttgccggaaaaccaatggaaaagcgcacgatgatctcattggtcctgacttggcatgccgtccgtcgcaaaacttcctgtcccgcatgagaaaccgagatcagcccactcttaccggatccttttgccttaaaagaaaaggcattgacctgtcttgcaaactcccgcactaaaagatctgccagccgatctctcgtcaagccatctttcatggcaaaatcgggaaatcctgcctttgttgcatcgatggtcacacgcacatcggacggtgccgcaaaagggtctccctgcacatgatcgatatgtagtatgtattttggaaatcgataactgccctttaaagacttatactgcggataggacttgtgatcgatatttcgtaattgctctcttagttctctgtctgactgcatggctgctccttactttacccgattgaatttatccatctcaacttccacttccgggatcttcttgacctgcggatggtcgtagataacgccatcttttactaccatctctacatgacgcagaacagaaagatcctccagcggattgcccttggtcacgatcatatctgcacatttgccgacctcaatagaacctgtgacatcaccaaccccggcaagtgtcgcattcaaaagtgttccggtataaagagcaaaggcattggataccccacaatattttccataaaaatccagttctctccacatatcatactgggtcacaaacgggcaagccgtgtccgtaccaagtcccaccggaaccccttgtgccagattttcttttgccatttcaatgacaccgtcaaagacaaccttaccatttgccttctgttccttggtcgcatgcgatacctggcaatcaaaaagaccatatggcagagccggacaaagtgttgccacctgaaaagcaccgttttctttaaataatactgcaatgtgcgcatccggttttgccccatgctcgatcgaatccacaccgttttccagtgctacggcaacgccctttggactctccacatgggcagccacctgaaagcccagttcatgtgcccggtcacaggcagcctttacatactccggtggcatacgaagtacacccggttctccgaccacttctgcatccatgacgccacctgtgatcatcagtttgatcagatccggtttatcctttgcaatcacatccacataatctcttgcctcctcggcactatgcgctatgtatgccagcgatcccgccatatgtccgcccggaaccgaaatcgccataccactggcaagaatacgcggtccgatacgtttacccgcattaatctcatcacggatccttgtatcaaaatcagcaatacctcccacggtacggatcgtcgtcgttccactcaagagttgggtcttggcaaaatttgccaccatagcatgaccgaccgcacgcataagccctgaggatgtgatctgcttgacagatttgaccgggtcgatcggcttctttttgggtttacctgttcctgctaaatgcacatgcagattgaccagtcccggcataagatatgcaccttgcagatcaatgatctgaaagtcctgatacgcttccttatcctctttatctacaattcctgtgatcttgccatcctccaccaagacaactcgatctttctgtggtgccatgtcctgtctgccatccaaaagaactccacctacaaatgcttctttcattatgctcacctcgtatttattaaatctaaagtttatttctttaaaccacacaaaatatatctgtcttatattgtagcacttttttgctaaaatctcatcctatttcacaatgactgtggtaagatagcctgcatcctcctccaagacatccagaccgatcatgaccttttcgttttccataccacaatttgccacggcatatacctccagagttttcccgctttccacttctctttgcagtcctgcctttaagtgggccagactttttcctgctttcatatagatgcgggtacccggataatcttttgcattttccgtatcataggatcccgggatcacatggatctgctgatcccggtctgccagtgagataccaagtcttgccgccactgccagaaaagaaggaatcccgctgatgatcttcgcctcatagccctgcgccaccacacgtctgtggatataatgataggtcgcataaatacttggatctccgatcgtgacaaagacaatattttcatttttctttaaccacgatataatttccttggtattttgatccatctgtgcatccagagccttctgatcttttatcataggaaaatccatataaagacaggctttctctgccagttgtggtactgcctgcactgcgatctgataggcatagcatttctcctttgtctttgctggcaaaaccaaaagatcacacgcttttaatgccctacatgcttttatcgttaacagttccggatctcccgggccgacgcccacgccaactaatattcctgccatgctttttcccttcgacactcttctataaaatgctgcacaaagaccggattggatggataatacaaatgtgcaaaacctaaaaactgcttttggttttcatgcacacattcccaggaacgaccgcccaccggtttttttgctatacaatcccttccattatcactgctatcataatagtgaaattcatgtccacggatctggtctgcttccgacaaaaaattggtctctttttctgtgatccccacatagccaaaccgtaccagatgccctgtataatggcagtcgccgtctacgactcctaccatcttgtatctttccccctccctggtttccaatgtcttatgcagatacataaatccaccacattctgccagaatcggcataccctgcgccactgcctgtcggatgtcctgacgcatagagaggttttccgataattccttagcataaagttccgggtagcctccccccaagagcagcccttggattccctttggcagatgcccatcatccattggagaaaaatagcaaagttctgcacccacggcttctaacaaacgcaggttgtcggcataataaaaacaaaacgccgcgtctcgggcaaccccgatctttacttttggaatagcagtatcttgtcctcccatgcagatatgtcctattttctctccctccagatcagcggcttgtcctgcgattcccagtaacgtctccagatcgatcgtctctttcatctggtctgcaatccgttctaagacctcttgcagatcccggatttcatccggcaactgtaagcccaggtgccggctctgaaattgcagatctttccgcacagggaagtatcccaataccgccagccccacttctttttcaatcatccctttcaactgctcataaaagtttgcagaacagcggtttaaaatgaatccttggatcaggtggtctgtatccattgccagaaaccccttcacttctgccagaacagacctccccatgccatgcacatcaatgactaaaacaatgggtgtctgcaagacctttgccagatgataggcgcttgctctttcctcaatgccacccagtccgtcatacagccccatgacaccttccaccacagagatctggctttcattttctgccagaaaaagcccccgtgttgtcttctcatccgtaaaatacagatccagatttttggatggcacacccaagacacgctcatgaaacaagggatcgatataatccggtccacacttaaaagccgccacgctcttgccgctatccaaaagcgcctgcaaaagtccacaggtgatcagggtcttaccactgccactgtgtggggctgcgatcataatacgattgtgaggattgttttgcatttctttcatatattaaaccatcctttaattactcgtaaattgaaaagatactatagtgaccggattctgtcccatcatcatatgatagtctcccagagtcttggctttgctgatctgtacctgggtaatgtccagatccgtcactttccatgtcttcagacagcccatgatctcactcaaggtctccagactgatagcattgatgacaacacgcatagatggattttttgtatacaagctttttaggatggctgccatatttccacgactgcccccgatgaaagcatgggtcggttccgggaaatcctccatcccttccggtgccataccctgcaccacctgcacgtttttcagtccaaaacgatccgcattcttcctcgtcaaagcaaccgcttcttccaccgaatctatggcatagacccggatccccggcgacaacattgccatttccacggaaatgctgccactgccacaaccgatatcgtagcagactgcctccggtgtcagacacaattttgccacggataaatgccggatctcctcctttgtcataggcaccttggtacgcagcatccactcatccgaaagacctgcgcccgaatagatcgtctgcggcatatcattataaagcatgcccacataaagtccctctttttccagaagcagacactctctcggtgtcagacataagacatcttcctctgcataggacaactgatagcccagatatatctttaactgcggtgcgtagcgcataaaaaggcttccgatctttctgacatcttccagtcccgaagtcagaaagaatacttttttctcgtgcagaccgctccataaaagacggctgatccatttatcttccgcgacaccatgggtagaaatgatcttggcatcctcccatgaagtcgggatcttggatgccagatagaccaaagaggaaatccccggaatgatctccacagaaagcccctctatattctgcaaagcctcatagagtttcttacagccactgtaaaatccggtatcaccggaaaataggatcgcaatatttcccctctttttttctgcaagaagttcctttattttcggcacaatgtccgcagccagataataaggatatttttccacgcctgccgaaaaaggctcgattatacggcttgcgccaaaaatataatctgcatttaaaattgcgtcttttccgcgacagatcagataatcttctgcccccatcccgatgccgacaagagccacatgcatttgcccgtatgccttatctgcttccgtcataacctctgcctcattttcctctgtcagaccatcatctgcttggagcctacagcccagcaaatcttccaaggctgctaagatttctttctcatcatagatctgccagttacctgtatcagttttcggacgcgcgatcacataagacctgatccccatttttctggcagccgaaagtttctctgccatgccaccaatagagccactctcctttgtcaccatatgttgaatgtcgtactgcctataaatggcagtattgatctcctcggaaaaaggtccctgcatggcgatgatctgattgccctccagaccattctcatagcagagggacagactctccatccccggcaggacacgcacgatcagacgttttctcagcctttcatcccggcaaaaaatatgcagttctttacttcctgtcgtaagcaaaatattcccttgcctagcaagcagcgcctgacagaccgcctgactgtccgcaaagacttcttcctttccaaagtcttcctccgcatccagccgtcgctccagacgcacataaggaatcccacggttttgcagactctctcttatgttttccgaaacaatctttgcaaaaggatgggtcgcatcgatcaccacatccggtctgatgtctgcgtataattccttcatggcatcgacatccaatcgccccatatgcacctgcataagttccgatgactccatggcctgtacgccatattcagtcgccacacagacatggcaaaaaatcccatttttcactaaagtttctgccaaccggcgtccttccgttgtcccggaaaaaatcaagacattcttcatagcctatatcctctcggtgtgaccaaatggtccccatctatccttgttttttcatttcccacaaagactgtggtaaacatattgacctgacactcccgcaattccgccagcgtacatacatgactctggcatccctctcgtccaatattttctacatagccacaagcgcgcataggatcggctccagccgccaacatgataccacaggcacgtttcagataatctttccgtttatgactggacggattgtagatggcaatggcaaaatccccctggatcgccgccaccagtcttgcctcgatcttttcccaaggtgttaaaagatcactcagactgatcacacaatagtcatggtttaagggtgctcccagtaccgccgccccactgtttgccgctgtcacgcccggaatgaccaccagttcaacctcaggatagccttctgccatttcaaacataggtgccgccatcccatagacaccggcatccccgctacagatcatagctacctgcttttcttccatggcatagtcgaaacatatgcgacagcgttcgatctcctgacgcataggggtcgtcttaaattccttatctgggaaatgctggcgcaccagatccacatagaccgtataaccgataatcatgtcgctcttgtgcaatgcctccacagcgtcaccactcatgccgctgatactgcccggtcccatacctacaatatagatcactttcttattctcgctcatggcttgcctttcttcttactttgatacgttcgtctgccaagtttggatccgcgggatctgctttgccaaagcaaaggtcataccatcctttgcctgcttttttaccaaaagccgtcccccctgccctgcacatgccagtgcagcccgctcacagacattggatacacctgtcacatgtgagacaaaggcagactcggaaaactgcccttccacctcttgtaagtcatctgccccatagatataaaagggcagatgataaaaacaagccaaggtctccaagcccatttctccctgctttaagtcaatacttgcaagggcagccacctgatccatggcaattccttccttttgcaattcttccaaggcaaacgtctgcaaggcttcaaaagactttcccttcttacagcccatgccaaggacatagggtttatggatcagttgcaggtctgtttcctggtccaaggggttgcatccgatccacagatcaacatttccatcacttgcctctaccagatgcagcccttccggcagatcctccttgaaaaaggtaatcgcaggatcaatggcaagccggattttttcaccttccagcagcctttgggagatcctgcggatgccagcccggtcacaaatgcaaaaaccgtttctccttgcaaagacatccacggcaaagagatcttccacgtcggtcgccgtcgtcaaaataacctctgccccaacccggtctgctaaattcctcgcgatctcattggcgccgcccatatgaccggacaagaggggaatgacgtgtctgcctctctgatccatgacgatcaccgcactgtcccgcaatttatcctcgacaaagggcgcgatcagacgcacggcaatccccgtggctcccacaaaaagaagcggtatgtgataggagaacttgtccctgatccatgcctcccgcggcatatccccatcataatacaaaggactgatctccttgcatttttcaaaaagatcttctgccgtcttttgcccccgcttagaaaaggtcattacccctaagatcattgttttttcctccgatattcggtttcaaagtccggcgcataaaggcgggatctggcataattgctgtgtgcaatgacctgtcccaccaataccatggcggtctttgagatatgattttcctttgctaccagtggcagggtatccacggtacagacaaaagatctttcctccggccaggtcgccttatagatcagcgccgcaggcgtatcggcagaatagccaccggcgatcagattttcccgcagagtatctaacataccggcactcagatagattgccatgctcgcctgatgcgccgcaagactccggatcttttctttgtccggcacgcctgtctttccctcctgccttgtgatgatgagggtctgagacacttccggcagggtaaattccagattcagacctgccgccgctccaaagcaggcactgactcccggacaggactcataggcaatccccagatcatccaatcgatccatctgctcccgcacagcgccgtaaatgctgggttctccggtgtgcagacgcaccgtgttaagcccctctttctcggcatcctcgatcacggcaagcacttcctctaaagtcatataggcgctgttatagacctttgcgtcttttccggcataacctaagagttccgggtttacaagcgatccggcataaatgatcacatctgcctgctccaatagatttttcccgcgcactgtgatcaggtccggtgcaccgcatcctgctcccacaaaataaaccattcttctatcctttcagttcctgtaaaagactctgtgctccgggactttctgccaagagcccataatctgtcgcatacatcatacattcgatctgcatcccatcaccggcacgctttctcaagtaaaataagatccgctccatggcacgctccatggtcgcctccaagatgcctgcctccgacaggagtttgacgccttcctccgtcgtgactgcatccagaagatcttttgccgtcttggcatgacagcccgcataaatggcagccgccgctaagagttccatacgacagtcgccctctttggaatgggtattcatcatgccgccggaaagtttaatgagtttgccgatgtgcccggtcaaaagcattgcctcaaatcccatctgctttgccatatctatagtatctccgataaaattcgagcacttgacactgcgatccagatcatagtcataggtctttttcataaaatccaagccgtaatttcccggcgagactgccacggctttttgtcccaaagcctttttctgccgcagttcgaccgcaatagtgtctttgagtgcctgcgcactcataggctctacgacaccgctggttcctaagatagatataccgcccaggatccccagtctgggattaaaggtggattctgccagtttctgaccctccggcacggagatttccaccgcaaggtcttcgtgataatccaaaacatgacagacctcacgcatttccctttcgatcatctctcttggcacatgattgatcgccgcatttccgaccggctgatccagtcccggcttggtcacacgaccgacgccgatcccgccatcgatcagtattctgccccctgtgcctgcctcttgcccctccaaaaaagaaacttttgccaccacatgtgccccggtcgtaatgtcgggatcatccccgccatcttttatgactgcacactgcactgccctctcaccgcgcaaaatatccacaatactcgcatgaaaggtaatgccctttggcgtaatgatatcgatcttttctttttttctcccggtcaaaagcatatagcaggccgccttcgccgcggctgccgcgcaggagcctgttgtaaatccgtttcgcagttttttttccaaagacctaccctctaatctctgatattgttgcttgccagataaagcaaggcattgcagatggcagccgcaatgttgcttccacccttgcgcccccggttaatgatatatggcacatcgccgtcaaggaacaattcttttgccgcctccacattgacgaagccgaccggaactccaatgataaatgccggaacataggctccctgctcaatcatctcgtgcagttcgatcaatgccgtcggcgcattgcctatagcaaaaatgacaggtccgggcagtcttgccgccgtctccatgctgacaaccgcgcgcgtcacgccgcgttcctttgcctcttttgccacggcttcatctgccataaagcagtgtacctgtccgcccaaacgagccagagtcttcttattgatgccagccttagccatattggtatcggtcacaatatgtgcaccacctttgatcagttccagcgcctgctcaatggcccccggcgagtaggtcatggtctcggcataggaaaaatcggcactggtatggataacacgtttggtgatcggcacttctttttccggcagaacgattccccgctccttcaattcttcctcaatgatctcaaaactccgcttctcgatctcctgcggttttacgatttctatttccatctgactttctctccctttttgactgcctgcatggtctccaccaggacctggttttcttcccgcctgcggatcgctatgcgataaaatcccttggagagcccggcataatcactgcaatcccggatcagtatcttttgttttaataaggcggcataccagtctatgctgtcttcataaaacaaaaggaaattggctgtccccggatagacttttgcgccgagttcctgcaaactctgtgtaagatacgctctttccctttccagaagctgccttgcctgcgacagataagttccatctgccaagacctgcatgcccgtaatgcccgccctctgcgcaataacagaaacattccattcactcacctgttcctgcaccttttttgcatcctgctccttaggacagaacagatagcccaaacggatacccgggatcgccatgctctttgtcagtgcctgtaaaataaagatattctttgtcccggaggatgtctttaagaaagaattgtctttaccttctccggtcagttcgataaagcactcatcgatcaaaagccgaattttcatgtgccggcagagccctgccacttttgttaaaaattcttgtgacagcagatgtccactgggattgccgggattggtcaggatcaccagatccggtgcttccgatctaatgcgatccaaaaagacctcggacagggcaaaatcctcgtcctctttggtatcaaataatgcaacatgacatccaatactttttagggcataggcatagcccgaaaatcccggtaccggcaggagtgccttctttggcataaaagcacgggcaaaagcaagcagcaggtcagatgccccattgccacagacaatacatgctgcgtccttttgatagactccgccgattgcctgacgcagtgcctgacactgaggatccggatagaccatggcttgcgtcagcgactgctgcatggcatctgctatctcctccggtatgcccagcggattgacattgattgaaaaatccatattcacttcattgcgataacaatctcctccgtgcatgccgttccttcctatcatctgctatgttcttaaaatgccaggatcagtcccatgatcccaaggcacaggagcaggcaaaaaacagccgccccatatgccagccggttcatgcgcagaatatcctcatagacgatcgcgcgtgtcgcatccccaagtgttggcttatttacgatttttccaaaataagaagcgtctcccgcaagccggataccaagggatcccgctgccatggcttctgtctgtgccgaattgggactggcgtgctggtaacggtctcgtcgatagatccgccatgccctttttgcatcatagtccttgcctaagaaaaccgatgccacccagaggcataaagcactgatccttgccggcagaaaattgaccagatcatccagttttgctgcgcatctgccaaaatctgaatagcggtcattcttataacccaccatggaatccatagtattgattgccttgtaggtaagtcccagaataggaccgcccaatgccagatatagcatcggtgcgatctctccatccgaagtattctccgcaaccgtctcaatggcagccttggcaaccccggtcgggcttaaattctgggtatccctgccaacgatcatagataccgcatatctggcatcttctaaggttttatcccgcaggcatatatatacttttttgctctccttgcaaagacagcggagtgccaatgtctgataggtcaaaaacatttccaccagacatcctgccataggatggatcccatatgccaaaagcagaacaaaagccgtcaccagaatggttgtcccacagactagtaggaccagtctgcgcccacatcttcttttttgctctcccgataaagccttggtatcttcctcgcccagatcatgcttttcgatggcagagatcaggcggccgatccagcggaccggatggggaaaattgtagggatctcccatgatcaggtcgaggaaaaagccacccacaaaggcaatcatatgatagatcaatcttccaactcctctaaggcatcctgcatgcagttatcttcttttaagagcggcttgagatccagcagtttgccgtcgtcatccagcgtcagacgaaatcctgcgccattgtttaccatatatttatagtagtcgtcatcagccagttgggaaacgatggacatgatcgtaccgccatgagccacgactgccgatcttttgatcccctctgcctgcatatcgccaagtacctgtgtgaaagcatccatggtacgttttccaaaatccttcatggactcgccccccggtatgctgatctttccgcgggtcgccacccataaaatataagatggtctgttctttaattcggcatggttctttccctcaaagacacccatatccatctcgcgcagaccgtcaacgagttccgatgcctgtcccggatagatcagttctgcggtctgtctggtgcgcttcattgggctggcatagaccttttccacggatggataccgccccaggttctctttgataccggcgattccctcctcggaaagcggctggtctgtcctgccgatatagcgcttctccttatttccttctgtttttccatgacggatcaatacgatctctacttgatttgttgtggtatctgacatatgattctatccaccctttctgctttacttgcaatcccgatcaaaagatttccgaccagatcccgataaatgcggtcttctttttgcaatggcacgacgccatttcccacctcatcgctgatgatgacaagatgcctgcatgccctgcagatcgcctctatcctatcctgcatctcatccatcgtcatgcccgcctgctgccagttcctgacacacagatgaaaatgatcccatagaatgatatcctgcgtctgatccccgaccggcagtctgccaccctctgtaagatccttttcatccagacagacggcgtgcgggtacttttttttgacatatgcactttttccctgcgccctgccaccaatgacaagttccagccttccttccattgcattctccttttactttaacacaagatagatgccgaccacaatcacggaccacagttctgccatacagacaaaatagcccgccagatctcccgtgatcccgccaaactggcgacggctcataagataataatataaaaacatcaatagacaggctgccgtgaccaaaatgccattcataccgctatagataaaaagtgcggtcacgacaagaagcatctgtatcaccagcccgatggatacgacctttgcaccggaggtatctgcctcggtataaaggctgccctccttttttgctcccggaaaatggataacggaaagcccactgagacaacggctgagaaaaaaggcagcactgactgcgaccacagcctttgtcccctcaatgacagaagcaaatccaagggcaagcaagagatatgatagcaagtggataacggcaaaggcaccgatatgaggatcttttaagatctccagttttttctctttgccctgataggaacttagagcatccttggtatccataaagccatccatatgaaagcccccggtcacaaagagcggcaaaaaaacagccagcgccacagaaaggatctttcccactcccagatagcctgccagatggtaccaggcgatctccagtcccccgatcacagcaccgatccaaggaaaaaagagcagatggtagcgcatatcttccgacgcccatacgaaatgcggcatgggtatcttggaatacatggaaaaggctacgcctatggcttttgctatttttcgcatatctgtccgccctcactttcctcatgctggctctttaatgtgaccggaataccgaccaccacttctatgacttcatctaccatggctgccaatgcctgattgataccccccagcgccttgatataagatgccatagcatcatcatagttttctccatcttcaaagatattattgctgacgatcacgccatctgcagtctgctctatcagactgcctatatcctttaaaatcttgtctaccgtttctttttcatcccttatgccatcttccgtaaacatttcatttgccagaagattggagacacattccagcatccaggcatcccccgcatccagagcaatctctcctaagtctatcggcttttctatggtaagaaagcccttttccctgcgcatggtccgatgcttttctacacgctttttcccttcttcgtcaaagacgcgcatcgtcgcaatataatgtttcttttctgcctccattgcaagcagacgcttttcggcatatgccgacttaccgcttccgcttccaccaatgacgaatacgatcatatcttatctccgtatctatgataggtctctacccctgcatccgaaaaagaattagtctcatcatagaccgcctttgccatggcaagcataggtaacagcatcatggctccggtgccctctcccagtgccatatccgcataaatgaccggtgccagggcaagttcttttataagcgctatcgttgccggctcccggctggcatgggacgcgatcaaaaagtctttacttccgggcaataacctttctgctgccagggcggctaccatgctgatcaaaccatctaagatcagcgggatctcatagatggctgcccccatacaggctcctgccatggctgcaatgtcaaatccgcccactttggctaagacttctgtagcagacgcctgataaagatcacatctttcgatggtctcctgaatgacccggatctttttttgtaactttacatcatccagccctgccccgcgacctgtcacctcctctgcctttttctgtaaaagggcggctgcgaccgcactggaagtcgtcgtattgccgatgcccatttccccgatgcagacatagtcaagattatcgcacttgcaggcatagaccgcatccaatccgcattgcagagcctgccgcatctgcgtctcatccatcgccggctctttgtaaaagtctcttgtgccgtgggctactttttcatcaatgacattgcaaagcgtctcccttgtattgatcccaacatcatagacccggatctgacagcccgcaaggcttgccatacgaccgaccgccgtctgccctgcggcaatatttttagcgcaggtcgccgtcacttcctgtggggactggctgatcccctccgcaacaacgccgttatccgcgcaaaagacaagtaagcgtcccacgtcaaaccttggctcaagcgtcttttgtatagcgcctatctttgcaagcatgggttcaaactgacccatgccatccaaaggctttgcaatgccatcccaatgctccatgaccttatgaaagatgtcatgatcccaagacgtcaatttatactctttttctaagacctcatcgatccttaccttttctgtctgcatcttttctttctctctaaatagcggcatcctgtaacatggcatagacggcatccatatccatgctctttcttatgccctctgccagcagatcatactgactctccttaaatgactgataatccgtgtcagcttctgcctgaagggtcaatccctttttctctgccaaaagcctgcacaaatcatatgccacatccttatcatcaaaaataccatgcacatatgtgccgtagacattgtctctctgcccgccgtctctttcctggcagaccacatcattcttctgatccagatggcataaaggcttgatggcatcgactgccatggtctctcccatatggatctcatagccatggatccggtgagaagaaaatcccgccagcgcgccttccgtgatctccatactgccgctggtctgtgtgcggactttttccggctttaagactgtctccatcggaagcagttccaagccccgcagtccttctgatccgtctgctttgatgacattctcaatcccctccggatcagcgatcctttgtcccagcatctgataaccgccgcagatgccaaagaccggtccgtactgggcaaatttcttgaccgcactttccatgccgctttcccgcatccatgccagatctcccatagtattcttggttcccggcaaaatgaccatatccatcttctcgatctcatacggatctcgcacataatgaacgctgacgcctgcgatctggtctaaggctgaaaaatctgtaaaattggacaggcgtggcaggcgtacaaccccgatattgatcagatccatgtcctttggtaaaaggctctctgcaaggctgtcctcgtcatccaaggtcactgacatataaggaacgacaccgaccaccggcacttctgctttttcttccagcatagtaatgcccggctccagaatcgtgacatccccgcgaaatttattgatgaccagtcccttgacccgcttcttttctttctcagtcaaaagcatcatcgtgccaagcaactgggcaaagacaccaccccggtcgatatctcccaccaaaagtaccggagcatccaccagatgtgccagtcccatattgacgatatcgttttctttcaaattgatctccgccggacttccggcaccctcgatcacgatgatatccgccttttcttccaaacgtccaaaggctgccacgatatccggcaccagattttttttgtaagaaaaatagtctctcgcttccatattgccaaggacttttcccgccacgatgacttgtgagccatggtcgttggtcggctttaggaggataggattcatgtctacgctcggctctatgcctgctgcctccgcctgcatgacctgggcgcgccccatctccagtccctccttggtaataaaggaattgagtgccatattctgtgacttaaagggagctacccggtagccatcctgggcaaagacacggcaaagtcctgcgaccagtaaactttttcccgcatttgacatggttccctgcaccataattacttttgccatggtttttctccctctctgatccatttgccctgctcttttgcataggaaagcagctccttatttgcctgattgagtggtccaaaagcatccagcgtacagatgcaatagtcgcagtcatcgatccatttgcgcgcctgcgccatctgccggatctcgatcggataaaaggcaggcgttgtcacaagcgcacttgccagtgcctttgccgccttatactcgacatccccctcggataagatgcctgccgcaaaggggatctggtctcgctgtaaggtatagtaggctgcaatcccactgccgccgcccccgatcacaaagacctttggctctccttttgccttctgcaaaaacatactgccggatacgacatcataagcctgagagctgaccccatataggcatgcaatggtatctccgcaaaagatctcctccggtctgccgatctttgctattgtctctccatccacacaggcaaccagatctgaaactttttgtgccagatccagttcatgcaaagacataacgaccgccaggttttcttcttttaccatatttcgtatggactgcaggatctctaatttataatgcatatccagataagacgtaggctcgtccaaaatcaatatctttggttcctgacagatcgccctggcaagcatgacgcgctgtctttgtccgtcgctgaccttggcaaaaagccggtctgccacctcaagtgcatgcagactttccaaagctttctggactttttcctcgtcttcctttcccaataccccaaatctgccggtatagggatagcgtccggttgcaaccacatcacgacaggtcatcagttccggcgagatccgctctgtggtcaccatggccatctgttttgccagcgcggcatctgtataggcatccatcgtgccttctgccagatagacctgacctgcgatcgtctttaattgtctcgtgatactttttaaaagggtcgatttgccggatccattgggtccgatcaaagtcaggatctgccccgggcgcacccaaaagtttacatcttttaagacactctttccctcataaccgacaaccagatcactggcccggatgccttgcattttttcttccatatatacctcgtttctatgcccgcgcatcctctcttttgaccatcatgacgatgacgaccggcaccaaaagcacagccgtcaccgaactgatactgatctctgtcggggcgaacaggcttctggcaatgccatcacaaaaaagggtcacgaccgctcctcccaaaaaacaacccgggatcagataaagcggtcttgccgttttcatcgcctgcttgaccagatgcggaacggcaatccccacaaaggagataggtcccgcaaaggctgtcacacagccggacaaaaggctggataaaagaatcaaaaggatgcggagcagacgaatgttgacgcccatgtttctggcgtatgcttctcccatctgatatgctccgatcggttttgccataaaaaaggtggctaagaccgtaagtgtgactaagacgacgatcatgcctacatccttccagtccgtaccggaaaaactgcccatagaccagttgtggaggttgacgatattggaatctgacgcgaaagtcaccataaagtctgtgatagcggaacagatatagccgatcataataccacacacgaccaaaagcgacatcttctgtacgcgcatggataagagcaggacaaagcccatggcaagcaaggagccgataaaggctgccgccaccatgccaagggaggatatctgcatgcctctttccaaacacaggatcattgccacggcgaccaacattttcgctccggaagaaataccaagcacataaggacctgcaataggattttggaaaaaggtctggagcaggaagccggataccgccaaggctcctcccaaaaagagagccgccagaaggcggggcatgcgaatatcccacacaatatgataaaaggtgccttctcttgtctggcggagcaatacctgccacatctgcatgccatccaccgacacactgccggaagtgacattccagatcaccagcaaaagcaaggctatgataagacctgtcattgtcacgataaatcgtttcatctgtcttttcctcagttcaatttctttaaataggtcaggtctgcatccgcatccccaaggacattatgcatgtcctccacaaactctgccataccggtcgactcttggaaaaagttcttgccggtgcaatagacattgcctttttttacggcgtcaaactgcgcaaacaggctgttttttgccaaaagttcgtctatgcttgtgatctctccttcgatcgcactgttgtagatcagaatatctgcactctgtgcggcattataaaaatcttccatctgcatattcatggtcgaaagtgcattttcttcctcgggaaccacatctgccaaagcataattgccgcccgccatggtgatcatctgggtaatgtaatctccgggctttctgacattgatggctccactggaattgaccgagaaaaaggcgactgtcttaccggtatttgcctgatcaagcagtggcgtgatctgttccacctggctgtcaaaataagcgtttgcctcatccagagcatcaaacaaaagaccatagagtttgatccactccaaccttcccaaaggatgcgtttcataggacgaccgctcgaccagcaccggaatgcccagttcttccagtttttcttttacttccggtgtgtgatagatcatggtattttcgatggcaagattgcagccttcatttaagatgcactcataatccggggcactgtacttgccggcatagatcatattgcctgcctcgattgcctcttttgcctctgtgatataccagtcctttgccttggagccggacaagcggatataagatatgcagtctaactgacggatcagatccatgaccgaggtcgacaccagataggtcttatccagtggctgctgcaaagccacgacatcttccggcagattctttggtaggtctttgccctccggcaccaacagaaagcgctggtcctctcctatggtgatcagggaataatctccataatattccacctgatactgggtcgcatacgccagcgtcatctgacctgttttctctaaactatcaaaggctatcttgtccgtagtatcagactgactctgcacgccacatgcgcccagagtcagcatcataaccacagcaagcagcaaactgatccatcttttatatctcaatctcatcttgcaacggttcctattcttcaatgtctattaacgaaaaattcaaggtatattcaatctcgtgtggctggctcatagccgtcgtatcgcccacaacagataatggctgatccagatcgtctaccggtatcgtaaaggttgaaccctctccgtctgccgcctcgtttaaatacttttctccaccgaccagcatatagtcataatgactgctgctccagatgatcgttgcggtgatcttaccgttcttgaccgtgatctgtgtcggggaaacgaccgttgcccgtccagtgccgccttctaatgtcacttccacattgtaagtgccatccgccaggctatcgtctttttttgtgccacatccccataaggaaagcagtaaaaagacagataagagagagactgccagtccttgttttatatgtccttgttttctctgtacttccatgatgtcttacttccttatatcaagtaatgtctactgtggacttgcaacgctgactttgtgatcgtaccaggtacccttggttccaagaagtgccagatcaaattccttgtccagatatggtaccggaacatcaaatccattaacttcttcggtagatccgtcgctataagtaacggtatcacttgttggctgcaatacgttcttgctgtctttttcggcatctgctgccagaccttcatacaggttgacaatcttctttgatgtcaaagaaatgtgaatggtcatcttgccattttttacggtaagttctcccataccattgtttgcttcatttacatgaaacatactgctgtcggttgtaaactttacctgataagtaccgtcagcaagttttgttgtaccttctgcgtttgctgcaaggtctacaataaggccagtagatgcaatagcatcctttgtatggtgtacataaagcttttgaattgcttcgatttcgccaagtcctgaaatctgacattctacagaatcaaacgccttagaagcctcaaactggctcttccaagaatcatcatcatcccctgccatatcgttatttgcatgatctccggctaccaccatcagtgggcgaaggataactttcttgtaacctgcttcctttacagcctcgatcacgctttcacaagcggtctcttccggctcgccctctacggttccgataaatacattatcataaccaaggtctgccatctgagaagccatctgggaataagagatctttgctgtatgagaagtaccatgtcccataaatacaaatgcaacgccgtcttcctttgcagcctctaaagaatcatactcagccgtctttacagcctctgctgtgattgcttctgcaactgccttcttgtcagcattgacagttgctgtatcctctccaacctcaccaagaagtggctctgcaaccgttacggaatcaaacttatccttgtattcattgactgcttctactaactcatcatactctgcaccatgcataaggtgtgtcggctgaacaactaagttcttaacgccattgtctacagcacgctctaatgcctgatccatattgtcgatcttttcgccatctcttgcctgcacatggttgatgatgatctgtgctgtaaaggcacgtcttactgaccagcccgtatttgcctctgcgatcgccttttctacaccaccgatgtctgcgacacggctatcgttaaaggatgtaccaaaacttacaacgaggatttcattcgcgccgatgtcatcctggttcaaaggatcatccttagatgcatccccggtatctcttccaaaataatccggatctgcattctcaccactgacaagttctttctgtgcatctgtcaaagcatcccatgccttcttggcagcctcgcactgctcgtctgtcttgtctgttctctcctgcacataaatggcatcgatcagatctgcaaccctatctgctgcttcctgatcgcttgtggtattgtctgtctttgcggtatctttgttaccacagccagtcatcatactaaaggccagcatacataccatcacgagtgatactacttttttcttcattgtcttcc

SEQ ID NO: 12557 - DNA, 7440 bp, Unknown
  gut microbiota DNA sequence
agaacagagtaatcatcaaatattatgtaaacaaataaatctgcacacaaaaagatatgcaacttgcttgcgttacataaaacagtacgaccaattactcgtgatccggaatgactcctgtaccaaacaactggcaggtttcctggctgaaagatcatcacacggcttttaccttcccaatgcaaggcatcagtggcataaacaaaagccgcactccctaatcacagtgacgagatcgtacaggaatcacacctgtttcccttttaaccctttctcaagcataaagatccttggaagggcaccaattatttctctatgaaattcgatttattctatcacattctaccctgtatttcaatccaaaagtcacgagccgtctccatcgcctgccccatagccggtaaagtcaatcagaccatcagagatcttcttgaggctgtccggtgcctgatactcgctgtcttcgtaaagttcctgatgcagtagcacgacattggactctaaactgcaaggaacaactgcatcccctatgctgtcgccaaagcggtctgtagtcttggaaaatgggaatcccttggtctcgcccagatcgtaatccatcatattcttagcaagataaaggagttgatccatgtctatgctggtatcgacatccgggaagacacccgtgatcaaagatgccagttgtgtcggactggcgctctttgccttggcaatgatctgggtcaaaacagtacgctgccgctccgtacgcctaaagtcatcgcctgcggtagaacggatcctgcaatatgctgtcgcctgcacaccatctaaatgctggcttccggcagagaccggattggcgtcctttcccacgatggctccgacttctccgatatagccaccgttcatggcttccgcttctgcatcggtcagttcgatatcaatgccatccaccgcatcgaccgcggctaccagcgccataaaatcgactgctacataatccgtgatgttcagatccagattgcggtttaacatggcaagagcactgtcaatgccgccatgattgaaagcataattacatttgcggaaggtctcctcgccatcaacatccatcaaggtgtcgcgatatactgagaccagttccacctgcttggtataattattgatgttgcaaagcatgatcgtatcgctgttgccgctgtcaaaattgccgttggaacggttgtccacgccgaaaaaggcaatggtcgtatagccgtctaacatggcatccgttttttcatcctttccgctgttgccaagaaaaagataggcgatcaaaagagtgatcgctgctaagagggcgaccacaatgatcgtgatccgctttttgtaggacattttcttctttttctttttgttttttctctcttccatccaaacctcccgtatcctgcaatttttttctatagtttatcacatctactatggaaaaaaaatgaaaaagtgtataaaatataagcgttacatatagaaaaggagttcttgatttaccatgaaacacaaaatacaaagccttatcatgatcaccctgagtacctttatcatggcggtcggcgtttacttttttaaattcccggacaatttctgttttggcggtatcacaggttttgctaccgtggtcgccaaggtcacgcccatcagcgcatccaattttacctttatcgccaataccatcctgttagtcatcggctttatctttttgggaaaatcctttgccctaaagacgacctatgccagtatgctcttatccgtcttattggtcttttttgaaaaatggatgcctctgacaaagcccttatccaatgagcctatgctggatctgatctttgcccttgcccttcccgccatcgcatctgcccttctctttaatatcggcgcttccagcggtggaacggatgtgatcgccatgcttttgaaaaagtataccgatatgaaagacatcggtatcgccctttttgccacagacctcgtcatgatcctggttgcctgctttgtctttgatctaaagaccgccctttactcttttgtcggtcttgccgtcaagtccttcatgatcgatgacatcatcaccacgatcaacctgcgcaaatccattaccatcgtctgtgatgacaaggagccgatctgtagtttcatcaccgctaaactcaaccgcagtgccaccatcacagaaggcgtcggtgcttataccaatggaaaaaaatatatcatctttacttccctctcccgcacccaggctgtggaactgcgaaatttcatccacgatcaggatctgcaggcatttatgtctgtttccagcaccagtgaagtatttggaaagggtttccattctctttaagcatctgcacgtaaaaacagattgttttttacgtgcatttttcttgattttgtgagggattattgtataatatgatgagggtactttgaaatgtctattttttaacaaagtacatctactattttcaaatcatacagaaaagaggttaaaagaaatggcagaaatcaatttaagcaagtatggtatttccggaaccacagaaatcgttcacaacccttcttatgaagaattattcaaagaagagaccaagccggaattggaaggttacgaaaagggtcaggtcagcgaacttggcgctgtaaacgtaatgacaggtgtttacaccggacgttctcctaaagacaaatatatcgttgttgatgagaactctaaggacactgtatggtggacaagcgatgagtacaagaacgacaaccatccaatggatgaaaagacatgggaagctgttaaagatatcgctaagaaggaactttgcaacaagagattatttgttgtagatgcattctgcggtgccaacaaggacacccgtatggctatccgtttcatcgttgaggttgcttggcaggctcactttgttacaaatatgttcatcaagccaaccgctgaagaattagaaaacttcgagcctgatttcgttgtttacaacgcttctaaggctaaggttacaaactacgaagaattaggactcaactctgagacatgtgtagccttcaacatcacaagccgtgagcaggttatcatcaacacatggtacggcggagaaatgaagaagggtatgttctctatgatgaactactatcttccacttaagggcatggcttctatgcattgctcagcaaacaccgacttaaatggtgaaaacactgctatcttcttcggtctttccggaacaggtaagacaacactttctaccgatcctaagcgtcttttgatcggtgatgatgagcacggttgggatgacaacggtgtattcaactttgaaggcggatgctatgcaaaagttatcaacctcgacaaggaatctgagccggacatctacaatgcgatcaagcgtaacgctcttcttgagaacgtaacactggatgcggatggaaagatcgatttcgcagacaagagcgttacagagaacactcgtgtttcttatccgatcaaccacattgagaacattgtacgtcctatctcttctgctcctgcagcaaagaatgttatcttcctgtcagcagatgcatttggcgtacttcctccagtatctatcctgactccggagcagacacagtactacttcttatcaggatttactgcaaaacttgccggtacagagcgtggtatcacagagcctactcctacattctcagcttgcttcggacaggctttcttggagttacacccaaccaagtatgcagaagaacttgttaagaagatggaaaagagcggcgctaaggcttatcttgtaaatacaggatggaacggcacaggcaagagaatctctatcaaggatactcgtggtatcatcgatgctatcttaaacggtgacatcaaggatgctcctacaaagacaattccttacttcaactttgaagtacctacagaacttccgggtgttgatccagcgatcttagatcctagagacacatacgctgatgcttctgaatgggaagaaaaggcaaaagaccttgctacaagatttaacaagaactttgctaaatatgaaggtaacgatgctggtaaggcacttgtttctgcaggtcctcagttataatttctttaaccgatcaaatacagcaaaaaggatgtaagcgaaatgcttacatccttttttatatgagggacgttccttttgccataaggagtgtccccactgtgaaatttattcgtatctgagtgcatcgatcggcgacatgtttgctgccctctttgccggataatagccaaagactacaccgatcagcatagagaatacaaccgatatgataatggctgtgatcgatggactgaccgtcacatgcagcatgctgcccaattcctgctcgtaagaagataccagcatagctgccacctgcgacaaaagaaatccgtttaaaataccgatcacgataccaatgacaccgcccataaggcagatcacgaccgcttccgtcataaactgtctgcggatgctcttattcttggcgcccagcgcctttcggataccgatctctctggttctttccaccacgctgaccagcatgatattcataacaccgacaccgccaacgataagggatatggcagcgataacagaaatggcgatcgtcagtacatttaagacctgatcgatctgtcccagttccgatgccatgtcgtagcattgcagttcaaaggtaccattggcgctgaaatacttctggtcgaaataagttgcgatatcctgtgacaaggctgttgcatctacaccatcttttgccatgatattaaaagattgcagatcattctccataccattcgcctgatttgtctgggctgcataggtataagggactaaaataggcgtgaccgtatccttttccggtgtcttggtatcgattccactgccctgctttctggcatcataatgataaacgccaacaacgtagaacttctgtaccgtaccatcctcatcggactgcaccaagatctgtctgccgatgggattctgtccgccccaggcatacttgacatagagatctgatacaagagcagttgcttttgcctgtttattatccgcgtcactgatatcacgtccggcaatcaaagtcaacttggaggatgaaagatagcccggtgtcactccgttgacggatactttcgcactgctcttatcccctgtactgctggcagcagaaatcagcatttcctccacaaccacagcctctaccctatcagcaaagtccgtctgaaactctgacaatctttcatatgtcaactgctcatctttcgtcatttccggatattgccaggcttcccactctgcatccgtttcaaattccggcgtgatcgcattgacatatgcatagatcagattcgtaccaccaagttcgcgcatcgttgacgcaatcgttttttgcaaagagtttccgatcgttgtaatcgtaatcacggcactgatgccaataatgatacccagcatagtcaaaaaggaacgcagtttgttggatttcaaactttcaaaggaaagacgtatactttctgttatattcattccatctcacctcccagttccttatctgcgataatgcggccatctgaaatcgtaatcatccgctctgtttcatgtgccagttcctgactgtgcgtaatgagcacgatcgtcttatcctgttcctcatgcagacgatggaaaatatccatgaccagatgtccggtcttggaatccagcgctcccgtcggttcatctgctaaaagtatatggggatcatttgccatagcacgtgcgattgccacacgctggttctgtccaccggacaattcattgggtttgtgatccgctctttcttccataccaaccagtgccaaaagttccatcgcacgctctctgcgctgctttggcggcatgttggcatacatgagcggaatctctacattgcgcaccgcgctcatgcggggaatcaggcaaaagttctgaaagacaaagccgatctcctgattgcggatatcgctcagttcttcatcctgtaacttgctgatatcccgtccgcccagaaaatactgtccttccgtcggtcgatccaaagcaccgatcatgttcatcagagtggatttaccggaaccggattccccgacgatcgatacaaattcgccctgaaagactttcagatcgatcccatgcagaatctccaactcattgggctccccctcataataacgtttcacgatgccttgcatatcaatgacgtttgttctttccataaatacgccagcccctttctaatttgatgtagagaacgtcgtcactgcgtcatcatcggaaattccaagatctgtctgttcctccgggaaatacagatcataagattctccttccgatacatcatatggataattgataatgctgtctccttcctttaggtcatcggaagaaacagccgtataataatcattggagataccggttgtcacgatcactttcttgatcttatattttccgtcttttccttctttaccaacgaatacataagaattcccgtcatcgtctgttgcgatagaatcataaggaaccgccaactgctctccttcttcattcagcatgatctccacattgactgacattccaagtaaaagtggtgttccaggctccagcgtgatcgtcgcactgtagccgccggaagatgatgaagatccatcgcttcctgcattcttggaggcaaaattgacgaccttatctactgtaccgctaaagacctgatcgctgccgatcgcatccgaagtgatagatgccttctgaccctgtgccagtttcaaaatgtctttttccttgatattgacattgaccatcaaagaactgtcatcctcaatccgcatcaaagatccgttggtcggaatacttcccttggatacatttaactgggtgatgacacctgactgctctgccactacggtcagattgttcaactgctgatataacttggtcaggtcggaagatccggtgtctgctgttgtgccagccgcgtcctccaaagcctcttgtgcagatgccacggctgactgtgcggcatcatattcactctgggcgctttgtaagtttgcctgtgcctgtgctaaggcacttgccttttcctcggctgactgatccgaagttcccaaaagattctggatggtctgataatcgttttgtgctgctgcgaccgctgctgcctttgcatttgcctgtgcctgcgcagtctctacggcacgctgtgctttttgctttgtgctgtcactggctttttttgcagcggaattctgcttttccaagtctgcaatctgctggcggatctgctcatcatcaaaggtgcagagcacctgtcccttttccacatgatctcccagagatacgttaagttccttgatggcactggaaa

SEQ ID NO: 12558 - DNA, 2461 bp, Unknown
  gut microbiota DNA sequence
cgtaacctctgtcacgttgctgctctccaccgttccactggtacttacggaacttgacatgtcctgcttttgcagggtaaatgcctgtatgccactgtctacctgtgtgatctcactagcactctgtctcatacggtgcacaagaatcccaaccacgatggcaataatcacgatcactacaatcgcaatcattagtttcttatgctttttgatcttctctaacatagcccactccttatgtatgaatctaattttgaaaatgcacctgcatttcctattcttgtttttcattataacgttttagaagtacaaacgaaatatagaaatcctttattatttcttaaattttcttaagaaatgggcaaaccaaaagggacgctccttgtgtcaaaaggaacgtccctcaaatcatctgctatgctatttgccggcggtcgctttcagacgagccatggctcttgccaaagatgcgcgtgagtgataatactcatggatgctctgcttctgacgaagctgctcctcggctctttccttggcttctctggctcttgccacgtcgatctcctccggtctttctgctgtctccaccaaaagggtcacacggttgttgacgatctcaacaaagcccatgccgacaactgcatattcccagttctcactgccctccggctgaaaacgcatctcgccatcatcgatcgcgatgaccatgtcctcatgatgggctaagatttccttttgtccatcatattccggcacgatcaaagagcgacatctgcccgaataaaaaacacggtttgcagatatgatctttaaataaaatgtattacttgcagccataacatttcacctttctgccagcagaaaaactactgcattgtctttgctttctcaatgacatcctcgatcgtaccgacattgaagaatgcattctccggatactcatccatctcgccatcaatgatcgccttaaagccacgaacggtctctttcaaaggcacataaacacccttgacaccggtaaagttctctgctacatggaatggctgagataagaacttctgaatctttctggcacggaataccgtaagtttatcctcgtctgccagttcttccataccaaggatcgcgatgatatcctgcaattccttgtacttctgtaagatctcctgtacctttcttgctacctcataatgctcctcaccgacaatatccggctccagaatacgagaggtagattccaatggatctacggcaggataaataccctgctctacgatctttctggaaagtacggtcgttgcatccaagtgtgcgaatgtagttgcaggtgccgggtctgtcaagtcatctgccggtacatagaccgcctgcacggatgtaacggaaccattcttggtagatgcgattctttcctgtaattcacccatttctgtagccaatgtcggctgataacctacggctgacggcatacgtcctaagagggcggatacctcagatccagcctgtgtgaaacggaagatattatcaatgaacaaaagcacattctgatgcttttcatcacggaaatactctgccatggtaagtcctgtctctgcaactctcatacgtgctccaggtggttcgttcatctgtccgaacactagggctgtcttttccagaacaccagattccttcatttctgtccaaagatcgttaccttcacgggaacgctctccaacaccggtaaagatagaatatccgccatgctcggttgcgatattgctgatcaactcctggatcagtaccgtcttacctacaccggcgccaccgaacagaccgatcttaccaccctttgcataaggagcaagcaggtcaatgaccttgataccggtctctaagatctcctctgccgggttctgttcttcaaatgttggcggctctctgtggatctcccatttttcgccaccatctaactgctcgccaccgtcgatcgtctcgcccaagacattgaacaaacgtcccaaggtctgctcgccaaccggtgtcttaatgccactgcctgtagcaataacctccatatcacgggaaagtccctcgctggatgctagcataatacagcggacagttttattgccaatatgctgtgcgacttccatcacacacttcttgtcaccattttgtacttcaagtgcgtctctgattgccggcagatcttcatcctgaaattctacatcgacaacaggtcccatcacctgaacgatttttcctgtcttcatcaaaaagcctccttaatcttagcttttcccttattttttacgttttcgcttctgtgactttgcaccagcgatcacttctgtaatttcttgtgtaattgcagcctgtcttgctctgttgtaaaggatatccaattcatgcagcatatcctttgcactcttagatgctgcttccatcgccatcatacgggcattctgctcgcaggaat

SEQ ID NO: 12559 - DNA, 3933 bp, Unknown
  gut microbiota DNA sequence
aaaaagacatatataatttccacataaactttaaataatctttttataaacttcttataaagggctatgcataagtaaagtaagggagacagcaaatgaatacagacaagattgatgccaagatccttgccgttgccggtaagggtggcgttggtaagacctcgcttgcagcagttatggtcaaactcttggtggcagcctatccggataagcggatccttgccattgatgcagacccggctgttggcttgtctaccgccttgggtgtggacgtgaaactcacggtagacgatatccgcaaagaggtggttgcaaacgcagaggacggcaacgctaaggcggcaattgaattattaggagaagccagataccgtattttcgacgcgctcgtcgagatggatggcttttcttttattgctatcggaagaccggaggcagcaggctgctattgcaagatcaatagttacctgaaagaagttattggtcttttggcagagaattatgattatatcgtgatcgacggcgaggcggggatcgagcagatcaaccgtcgtgtcatggaaaaggtgacacacctcatgctgatcacagactcttccaagaaggggacacaggtcgtaaagaccatcaagcaggtagcagacgaactcgttatgtacgacaaggtcggcgtgatcgcaaaccgccttccgaatttagacgtcaaacagtacatggacgtgggcgatatcccggtactttcctacatattatcggatgcctctttggcagagttcgatctcaagggagagagcgtattttatttggatgatgatgcggcaatcgtcaggggagccaaggaagctctgatcggtataggaatcttagaagcgtaaaggagggcaagcgtgaaagacttaaagcacttatattattttgaaaagttattggaagatgccaataacgaacttgtgcgtcaggcacaggacgagggtcttaagtgtatcgcaacgacttgtgagaatgtaccggaaccactcttaaatcttccgggcacattttcggtaagacttcgtgcaccgcgtacaggctctatggagatggctacttactacatgacaagtttcttgtgcgagtacagtagagcacttttggagagagccattgagggcggctacaacttcgtagatggtatcgtgacaccggacggctgtaccatgatgaatcgttgcgtagagaacatggaactgcttaagaccatgggtcagggcaaggacggatttttctgggaatacatggagattccacagaaaaacgatgacaatgcgctggaaatgtataccttacagtgccgcaaccatatcttaaagcctctggcagaaaaatatggtatcgacacatccgatgaggcgatccgtgcagcagtagatcagcataatgaagtatgccgtctgatccgtcagatcggagacttccgtaaggaagccaatccgcgcgtgacaggctatgagttccacatccttaccatggcaagttacgtggcaccaaagcatctgatcctagacaaactccgcgagaccttggaggagatcaagaccagggagccggatgcggctgacaagtaccgtgctcgtgttgtttttgtcggctctgaggtggatgatgttgatgtcatcaaactggtagaagaatccggcgcttatgtatgtgcagaccgtttctgctacggatctttgccgggacgtgatgagatcatcctaaatgacgaggaagacgtggtaaaacagatctgccgtcaggtgcagggcagagcacagtgcccgcgttattgggatatggcaaagatgactggcagacgtgattacgttgcagatcttgccaaggaatacggcgcagacggtattatctacgaacagatgaagttctgtgatccatgggcttatgagcgtatgatcggtacgatcgtgctccgtgatgagcacggctatccggtacttgccgtggatcgtccatattccattggctcttccggtcagatgcgcacacgtgtgcaggcattcgtagagagcattgagatcaagaagattcaaggaggtaagaaataatggcaaaagaagtaggcgcagaagcgctgggtagattttttaccgatggaaaagtacgaagcagacgtgagtggcgtggattcaaagataccttttatgattacacacgttggctttatattatgaagcagttggcaggctttatcatcaaacctagaaatatcaaagccatgttccgttaccgctggatggcaaactatctggcagtaccgatgatggtagataagcatacacagggactgcgtggaccataccttcgtatgtgccatttagagcaggatctggtcgtttatgacgtagcaaaacttctcgacaatcttttccgcggcgaccgccgcatcggcaatgatgaggagttttccaagaaggtcgttttggtagatgagaacgaaatgacagccgttatgatgggatttcctaccttgaagggactttcccgtgagacgccgtccacctatgtatccgttcttctgaaccaaacagcagcccttcattatattgatgtggcacaggaatacggacttgccggtgatgtttgtccgatgccggaggcagaacttggcgtttccattgatgatgatgcaccgatccttggtgcctgcgccgtacagtgtaatacgacctgtgacggttcccttatgagtaacggtggtattgctaagcgtctggaattagaagacggtatcccgatctttcagttggcagccccgatgcgccacagagaggacgacgtacaggattacgcagcacaggagatcaagaattgtatcgcctttatcgaagaaaagacaggcgagaaatgggattggtcttactactttgagtgtgcaaagcgtgtcaatgagtctaccagacaccgtatggagtggctggacatgaacaagaccgattatccacaggtctttggttccaaccttgcgctttatacagagaccaactacatggctatctgtggtaaggtaccggagttcgtcaatgtagaccgcaaactgaccgcacttgccaatcaggcatacaaagacaagatgatgatggcaagagagtatcgtcaccgtgctatcgtatggggcgtacagtcacacttttatatggactttttgctctggatcttaaactgctggggcatcgttccgctgaccgatatgctttccatggtcaataccgaaatgatcgcagaggaagatacaccggagaaccgcgaaaaggcatattatgatatggcttggctgacagagaatatgatcatgagaaaccgtacccacggtggttacaaggttctcttagacgaactctgggagttctgtgaagagttcaatgccgatgtggtcatcctctgggagcacatggcatgtaaggcactggatggtatgcatggacagttcgaggaaaaggcaagagaaaaaggtattcatctgatctgggtaacccacgatctgttcgatcctcgtatcgtatcccgtcagggtgttcgtgatcaggtcaatcgttatatgagaactgtatttaaggaagaaccactggatccgtcgctggaagtattgcacgacgagcattcatggtaaaaaggaggaacaagatgaaatattatggcggatgtgattccggatcaacttatacaaaatgtgtcatcatcgatgagacaggaaagatggtagcagatgtaacactacgcagccgtatcaatgcggtactttcctgtgaagaatccattgaaaaggcagttgcccaggtgccggacttaaagtcagcagatgatctggcttatctggtaggtaccggatacggacgtaacaaggtaccttccgcagacgagaatatctcagaaatctcctgtcatgccatgggcgtg

SEQ ID NO: 12560 - DNA, 3402 bp, Unknown
  gut microbiota DNA sequence
gggaatgttttgcaaggttttattgtagtggtggatgtgcagccaattcttacaacttccatggcgatatccataatgcatacgatataggatgtgcacttcagaaaaaacgtgttgaatgtgccattatgataaaagcggcattggctgcaaaagaaggagaagaagtatgaaacgattaaagaaagggcagggagtagcgtggcttgtagtcctgcttgcctgcattgtcggatttggttatctggcatggaatattgtgacagcgaccgtttccggcaaagatgattttgacatccgtctggggcttgaccttgcaggtggtgtcagcattacttatcaggttgtgggagataccccgtccagcgaagacttaaacgatacggtcaccaagttacagaagcgtatcgaaaatgaactgggatccgactcctctacaacagaggcgagtgtttatccggtcggtgatgacagaatcactgttgagattccaggtgttaaggatgctaatgcacttttagcagaactgggaacgccgggctctatttatttcatcgcgcagacagatgctgatggaaaccagaactattcttatgacagcacgaccggtggttataagttgaattatgacctgaatgatctgatcgcaaatggttccgttattttgcagggttctgatgtaaaaaatgctacggctaccaatcagcagaaccagacaacaggagcaacagagccggtggtatctattagcttgacagatgccggaacaaaggcatttgcggctgcaaccacaacggcttacgcaagaggtgaatctatcggtatctactatgacggacagtttgtcagtgtaccaaaggtaaatgcagccatcacagatggcaagtgtgttatcgagggtatgagtgattttgatgaggcagacagccttgcttcttatatccgtattggtggtctgaatctggaactggaagagttgcagtcagaagtcgtaggcgcacaactgggaagcagcgcattatctaccagtttgcttgcagcagccatcggtctgatcattgtcatgatcttccttatgatcatgtaccgtgtgccgggtgtggcagcgtcccttgctttagcactttacacaggacttatgttatttatcctgtgggcatttgatattacccttacattgccgggtatcgccggtatcatcctttccatcggtatggcggtggatgccaacgttatcatttttgcccgcatccgtgaagagattgcggcaggcaagagtgtgatcgcagcaattgagattggatttaagaaagcactttctgccattgttgatggtaatgtgacaacattgatcgcagcagcggttcttggggttttaggttccggtacggtaaagggatttgccattaccttagcgcttggtgttgttctttctatgtttaccgccttggtcatcacaagaattttgatgaacgctctgtatgcagtaggactccgtgaccagaagttctatggcaaggcaaaggcaatgaagaatatcaacttcatgagcaagaaggcagtcttctttgcctgctctatcctggtgatctgtgtcggctttgtcggcatgggcgtacatggtgcaaagggagataaggcattaaattatagtctggaatttttgggcggtacttcaacaaccgtagaatttaacgaagcctacactttggcacaggcagatgatgagatcgtgccaaagatcgctgaggtcatcggcaataatgacgtccagacacaggttgttgataataccaatcagatcatctttaagaccagaagtctggatctggagcagagagaagcactcaataccatgttagaaaatgattatggtgtagacgagagcgcgatcacttcttccaatattggttctaccatcagtggagagatgcgttcacagtctttgattgctgttatcgtagcagcattctttatgcttctttacatctggttccgctttaaagatatccggtttgcaagtagtgccatcattgccctgatccatgatgtgcttgtggtactggcactttatgcagttgcacgtatttctgtgggcagcgcatttattgcatgtatgcttacggttatcggttattctgtcaatgatacgatcgttatctttgaccgtatccgtgaaaataaaaaagtacttcgtgatgagacaccggagagtctgcagacactggcaaatgagagtatcacgcagacactttccagatccatcagtacctcctttacgacagttgttatggtacttatgcttctgattcttggtgtaacaagtatccgcgaatttgcattgccacttttggttggtattgtatgcggtacttattcttctatctgcatcgctacagacttatggtatgtgatgaaggtacatattaagggaaaaaagaaggcaaactaagataggttacttgtaaacatgcacatcataaggaggaaaggatgtacacattagaagatatcaaagcagtagatccacagattgcagatgccattacggcagagtttggcagacagtccagccatatcgaactgatcgcttcggaaaactgggtgagtccggccgtgatgtcggcaatgggcagtgtactgaccaacaagtacgcagagggttatcccggaaagcggtactatggcggatgtgagtgtgttgatgtggtagaagaattggcaagagagcgtgctaaaaaattatttggatgcgactatgtcaatgtacagccacattccggggctcaggcaaacatggcagtgcagtttgccgtactaaagccgggagatactgtgatgggtatgaatttggatcacggcggtcatctgacccatggatcaccagtcaacttctcaggtacttatttccatattgttccttatggtgtgaatgatgaggggtttattgattatgatgaggtggagcgccttgcaaaagaatgtcatcctaagatgatcattgcaggtgcatctgcttatgcaagagccattgatttcaagcgtttccgtcagatcgccgatatggtagacgcggtgctcatggttgatatggcacatattgccggtcttgttgcagcaggtttgcatgaaagtccggttccttatgcggatgttgttacgacaacaacccataagactttacgtggtccgcgtggtggtatgatcatggctaccgcagaggcgaatgaaaaatataacttcaataaggctgtattccctggaacacagggcggtccgctcatgcatgtgatcgcagccaaggcagtctgcttccaggaagccttgcagccggagtttaaggtctacatgaaacaggtggctgacaatgcacaggcacttgcaaaaggcttgcaggataga

SEQ ID NO: 12561 - DNA, 2557 bp, Unknown
  gut microbiota DNA sequence
acaggaaaggcagttgaaaagtggctggatgatgcacacatcaccgccaataaaaataccattccgaacgatccgaagagcccatttgttacaagcggtatccgtcttggtacaccggcagctacaagcagaggcttgaaggaagacgactttgatcgtgttgcagaggcaatcgccagcgtgatcagggaaggcgaagatggcgtggcaaaggcgcgcaagattgtggacgaactcacagataaatatccgttgaagtaataactttgctgcgaagcagtgggattaccaatagatttttgataatggaaggaaaacaaaatgatcgatattaagtttttaagagaaaatcctgaaattgtaaaacagaacatcaagaataagtttcaggagcacaaacttcatctggtagatgaggttatcgagttagatgcgcaggcgagagctgcacagcaggaagcagatgaactccgttccaagaagaacaagatcgctaagcagatcggtgctttgatgggacagggcaagaaggaagaggcagaagcagtcaaggctgaggttgccggtatttctgcgagacttgcggagttagagccggaagaaaaagcattacaggaaaaggttacacagatcatgatgaacattccaaacatcattgatccatccgtaccgatcggcaaggacgattcctgcaatgtcgagatcgagaagtttggcgagccggtcgttcctgattttgaggttccatatcatacagatatcatggaacgctttgacggcattgatcttgagagcgctggaaaggttgctggaaacggcttctactatctgatgggagacattgcaagactgcattctgcagtgatctcttatgcaagagacttcatgattgaccgtggatttacctactgtgtaccaccgtttatgatccgttctaacgtggttaccggtgttatgagttttgaagaaatggatgccatgatgtataagatcgagggtgaagacctctatctgatcggtacatccgagcattctatgatcggtaagttcattgatactttgaatgatgaagaaaaattaccatataccctgacttcttattctccttgcttccgtaaggaaaaaggtgcccatggcatcgaggaacgtggtgtttatcgtatccatcagtttgaaaagcaggagatggtcgttgtatgtaagccggaagattccaaggcttggtatgacaagttgtggcagaacaccgttgatctcttccgcagtctggatatcccggttcgtaccctggagtgctgttccggagatcttgcagatctgaaagtaaaatcatgtgatgtagaggcatggtcacctagacagaagaaatatttcgaggtaggctcctgctcaaatcttggggatgcacaggctcgccgtttaaagatccgtgtaaagggtaaggatggtaagtattttgcccataccttgaataacacggttgttgcaccaccaagaatgttgatcgcattcttagagaacaacttaaatgcagatggttctgttaatattccagtggctttacagccatacatgggcggcaagacagtgcttgttccaaagcattagtgtgtcaaaaagaaacatatcgaagcacagtgagccaatcgctgtgcttcttcttgtttatgggacaaatatctgccaactaatgtacaagcgataaaaaaacagaaaattctgaaaaaagagtggtaatatgccatccaccttgctacaatagcagtaagagaaaacgaagcgaggaggacatgtgacatgaaggtttttacaacggacaaaattcgtaatgtggttgttctggggcacagtggggcaggcaaaaccagtctggtgtccgcgatgaatggtattgcaaccgcatccaagcaacgcatgacagaaccggcggcaacaacgcagatgcttgtgcagccgattttgtgggacgatcacaagatcaacattctggatgtgccgggagcattcgatttcgtgggggagattgaagaagccgtaggcgttgcagatgctgccatcatcgttatttccggtaagaatggtgtggagaacggaacgcgcaaggcatgggctatgtgcgaaaaataccatttaccgcgtatcgtttatgtaagcgacatggatattgatgatgtctcttttaaaaatgttgtactgggtttacaggaattgtatggcaagtgtattgcaccttttcattttccgctgcgtgaaaatgaggaatttgtgggttatgtcaatgtgatccaagagcgggcaaagcgttggcaatccgatggaacggttgtaaagtcagaagtgccggaatattctatggaaaatctctctatctatcgggaagccctgatggaggcggtagcagagaccagtgaagaatttctggaccgctattttgcaggcgagactttctcggagaacgagatccgacaggcactccgcgtcaatgtatccgagggaacaatcgtaccggtcatgatggggtccaataccatggaaagaggtatgtatacactattgg

SEQ ID NO: 12562 - DNA, 1179 bp, Unknown
  gut microbiota DNA sequence
aaactggaatttgttgatccggtcgatctctatggtattcttggcaatgccgtggataatgccatggaggcggtggaaaagatctcggatgccagaatgcgtctgattgatattgccatctttaccagagaccgttttctggttatcaatatcaccaatcctatgaccggtcaggtgaaattaaagaatggactgccggtctctaccaagcctcacaatggctatcacggctatgggctgcgcagtatccggcatagtttgggacgctatgacggcacgatgagcgtgaacgtatctgaccatacctttgaactgaaaatgctcctgcctttgccgtaaaaggtggggcagaccacttagggaagtctgactaccacttacgataagtatgttgttatttgttttaggagcgtttaaaatgcacatatacaagcatgttttataaaggaggaagtatgagaaatagcatttccctgaacccaaattggaatttttctataaaagatcagcctgctattgatgtcaacattccacatacttggaatgccatagatggacaggatggtggcaacgattattaccgtggtatcggcacttacgaaaagacttttgcaaagcctgactttgatgccaatacacaggatgtttatttggaattctgtggtgtcaatgcgacggctacagtcttattgaacggtcaaaaagtcgcttctcatgacggcggctattctacttttcgtgccaatgtgacagcgcttttgcaggaagaaaatgatcttcgcattgcagtggacaacacagtcaacacgagagtctatccacagaaagcagatttcaccttttatggtggtatctatcgtgatgtcaatctgctggtggtatccaagaatcattttgaattagattattacggtatgtctggtatgcagatcacgccggaggtaaagggcgatgccgcagacatcaacatggaatcctatgtgtatctggaggagggcgcagatgcctctgtttacactgtagaactttccattttagaccatgaaggacaggtcgttttaaaagaagaagtatcgcttgctgattttacctttgaccagcctcgctttggcgctatcacagacgaaaactggctcaagggcaaggggcgtgctgctgaccttgtggcggatgtcagag

SEQ ID NO: 12563 - DNA, 145 bp, Unknown
  gut microbiota DNA sequence
aatgggacctatagggctcgaacctatgaccctctgcttgtaaggcagatgctctcccagctgagctaagatcccataacgacccaagcgggactcgaacccgcgacctccgccgtgacagggcggcgctctaaccaactgagcc

SEQ ID NO: 12564 - DNA, 148 bp, Unknown
  gut microbiota DNA sequence
aacgacccaagcgggactcgaacccgcgacctccgccgtgacagggcggcgctctaaccaactgagccattgggcctgattaacaccttcaaaatttcatacagattctttgaatcaaaccttcttggttaagccttcgatctattag

SEQ ID NO: 12565 - DNA, 11296 bp, Unknown
  gut microbiota DNA sequence
agcatatgaaaatttttgattatgtcatttttttcttgttgttgataattttttatgttatattccaagaaaaagcgctatggaaagaaggcacccatatgttagaaaatttgaccagacaggaattagatgaatatacgcttgccaccggcatccccatccatatcttttatgagcaggagatccgctacagttccaatattgccgcacagatccagttatataatcttcctctctatcttttgtccagtctgccaaaggaactcccggatacctggattactacaacaagagaaaatctttattttggaggactgcgaattcaagaaaccggtgaaattctactttttggtcccttcctgcttacagattgcaccctaaaacaggcaaaagccatcttggcgcgcttaggacaagaaaaaagagatgccatggacttccgtcagcaattgaacttgatccaacatattgacgtgccacaactgcggcaccatgtatctcttttgtatttgctgctaaaccattgtactgcgccggaaatttccagcatttcttttacttgggaacatctcgtcccagcacaactcccggtaattttaaacgacgaagatcaagacaaaaatgcagcacaatctgcctatgtagaagaccatattgtagattgtgtaagacatggcaagacagatgaactggttggtttttttaatgctatcctgttggactcctccggcaatgaaccggataactttgacctggaactccgccggggttacatctttggtgccaacaccatgttatcccgcgttgcccgcgctgagggatcagatcttgcaactgtcaataccatatccgactactatattgatcaactgcttcacgcaaagaatgtcaatgagttgaactatctcttttaccagttttccactcactacacggaagaagtacgtaaattaaagaccctgcacaccaattccatgatcgccaatcaggtcaacgcctatatccaatcacatatttacgaaaaactgtccaccacgcgaattgcagatgcccttggctttagtaattcttatgtctgcagcgaattcaaaaaagccaccggcaccaccattaccaagcatctgaccgcttgcaagataaatgaagctaaatatctcttggaacgcggagaatactctgcaacggagatttcggatatgctacagttttcatccgttacctatttttgtaatacttttaaaaaatacagtggcatgacacccttggagtggaagaataagcaggaggctatctaagaaactcatttttactggatacaaaaagtgcaccctgatatggatgcacttttttatggaagattataattttttactgttatatagatttctatgctgtcttatcccttctcggttttctcatgcgctcataggcgatatggatatcactttcggacattgccttttgtgcggcttcttcctccgcctgatctacttgctcttgcaaattctcctcggcttcatcaaaacggtcgatggtctgatcccactctttttgcgtataagcctttccaccgatcatgatggagtctgcttcttcgatctcacccttggtttccttaatctttctttccatcataagggcatttaagatcaggaactggtctttggcattaaacatgccgatcacatcagacaactgccctaaattatctttattaacaaccaaatatcccccaccagataattggatatttaaacacttagacttatccgacgtatctcccagatgcaactggttctgcttcgtatccagacggaagataacgccattgtaattgatttctccatcttttgccagataatcatatggcgcatgtccgccgctcatatcgcggttcggcaactggatcgtatctgcgaaactgtcgtcctgccgctttgcgctctttaaattttgaatgttttgcgtatttctgatgtcgttgattcctaattccataccttctcctttttgccgattatagtgtcattaccttttatatcggcagaaagcatgaaaaatgtagtttaccgtccgttttaccctgcagttactataactttcttcccagaaaaagcaattcctaatttcatcagttccttcgttccctcatttctcatttcatccgcataatgtttcgaatcaatctgtactaatgccttttccgaaagactttgtaattccctctctgaaagatctcttgcccatttgagttccatgataatgcccggatactttttctcttttggaatcaacccgatatcataacgaccttcacccgcttcccggttggaacgtatcttgtattgattgtctaataaagccatcaaacctaataataagccatgatagaacccttctgcccctgcatcatagaaactgatcgtttttttcatgtattccataattgcggtttgcagtttcgccatatcatttacatacagactttctgcgattttatttgctgtagactgtgtaataagtcccacttgtagcaaatgtgaaagaacctctcctttatataccgctgcaatttccttattgggaatcgaaatctgacacataaatgctccgtccggttgtaattcctttttgaccgcctttaaatatccggcaaccatcaacaggctatagacattcgccggctcttccgttagtgaacgatagacaacattttgattgatacatgccaataccgtttctccttgcaaaagtgcaaacaatctttccgtaatatcatctgttgcttcccgcaaaacatccgcaagtatctcattcttacctgtatttgcccaatatgcctgtggtctgcatccctttgcaatataattaatgaccgaccatggattgtagatttctgtatcaccaaacagatagccgtcataccattcctgtaactcagtctttttctccgccacatcataatatgacagcatcttgtcaacctcactttccgtaaagccgaagaacctatcatattctgtatccatcacagaattgactgtcagattattgagtccgctaaagatactctcctgcgcaatccgtaaaattcctgtcaaaaatccgtatgaaagattcctgttgtccttaaaagccccagagaagaaattgcgcataaagccaacaatatcttcataaaaatccttagcatagccctcttggatcgggatatcatattcgtcaataataatgattggggcaatgccataatgcttatgcaacattctggaaagattctccaatgctgcggtcaattccacgcttcctgctgtcccctgtaaaactgcccgaaaataatcacgttcatattcctctagtttttcacttgtcagaagttgactatgtcttccaaactcatcctgtaaaagtccgcggatcttatccatcgtggcatcccatgaatcaaatttaacatctttaaaggtcagaaaaatcaccggatatttcccttgatacttggtataatcttctcctgcctgccagatttccttgtccctgaaataaatgcttgtatcctcctctgatatttcaaagaaaacacgaagcatatccatattcaaggtctttccgaatctccttggtctggtaaacaacgaaacaagtggcttacgatcaataaattctttaatcagcatggtcttatcgacataataatattctgcctgtgctcttacataatcagaaatgccgataggaagaggtttcttcctgtaagatttgccattattttctactgttgtttcccttcgacgcaagtctacaggtcgaaccacatcatctggaatctgccaacttttaccgacttttgcagcaccagcaatacgtccctgtttacataaatttgctatgctacgctccgacatcttccattcttttgcaatttccttgcaggttttcataatgctcactccgtctcaatcttatataacactagtttatatccttatatcgcaaattatacctcactttccgcaatatatcaatttacagtttgcggaataatcattatagtttgcggtttgcgaaatataacatcatgatcgccaaaaaaggagagcaattctctttgccctcctctcattccattttggaatacgttatacaatcaaatctacgtgattaacggtgcctacctcgccactgctttcgtggaggtaaattcccgtctttttgatctcgccatttaacttatggtcttcatcctttaaagaaaactgtgtatccgcatttccaagatatatggcaccaacatctgcatcctttaaactgatcagtttgtccttgccgtcctcatcttttgtccagatctttaactgggagaaaatggcatcattttcatcgatccagccattgccatcctcatcataggctgccagatccttgaagccatctccgctcttggttccaaataattcggatccgtcattgatctttccatcgccgttgcggtccaatgccagaaatccgctgcccttgcccgcaaaagaaatctcgtcttctttgccatccgcatccagatcaaagaagaatttctgatcggacacactgccgatatccgtatccagattgatcatcagaggatctgtcttgatgtaagactccacttccagactgttgatacttgccgtaaatgcccgcgacatggagacctccatattaaaattgatgtccctgccgtctactgtacgcacgattccgctggttgcaaaggtcgtagactctgcctcggtatagaaaccggaagtcgccgtcaccctctgccagatggtgccgctgcccgtcgtcccgatcaccggaagttctgatcccatactgctaccatcactgccgcttgaactccaggaactttccgtatcctgattgcggtaaaatggagaacgcagatccaatacattgttggaatccgaagtggcaagcccggaatccataaggctcttgccctgacgcaaaagttcaaacatccgcttgatcatctccagtttgatcttgtactgatcagacatttccaagcgtccgcttccgttggtcctatttgtgctcttggtccgctccagcatctcctttgcggaacgttcttcattttctttgcgcttttgcgcggcttcctgctcctgctgctttttatattccagcatactggtccggtaatctgccccgtccatttcctcggattttgtaaaaattgcccctgcaagatttttggatgctgccgcctccatcgtcatagactgtttgtaggaaaattttgtttcctgatggctggatgacatcgccacattgctacttgctatcctcatattttcgcaccgcctttccgctccctctctctgtaacatacatatcggcggatggtgcgatttcattaacccgggatccttgcaagttctttccgtctgcttctatcccaaccatggcatgttgtctatgtcctttttatcctaaatgcttaagcatagcgtttcgccttcttcaaggaaacaatccccacaatgagcaggatcgggaagatgatccccgccagaattccttttttcagatcatccgaagccagacctgtgacaaaaccgacgagtgtcggaccaccggagcagccgacatcacccgctaacgccagtagggcaaacatggcagttccgccatttcgcaatgccgcggatgccttgctgaaagtccccggccacatgataccgacagacagtccacacaaggaacagccgatcagagaaaagagtggcgacggtgagagcgaaatgcacaagtaggaaacaatgcaaagcagactgctcgcctgcataaatttatccagatcgatccggtcaccaaacttgccgtaaaatgctctggcacttcccatcaggatggcaaatgacatcggacctgccagatctccgatcgtcttgctcacgcccaagccctgctccgcaaaggtggatgcccactgactgaccgcctgctcactggccccggcacacatcatcataagcatcaagatccagaagatacgatttttacacagttcccacagggacatacctgtttccccttcttcgatcaatggcgcgatcggcaccttgcaaaaaaggatgccattgcagaccggaataatgacccataaaagggctaagatcttccagtctgcaatgccgaaaaaccagaaaaagagggtggatagcagtaccacgccgacatgcccccagcaataaaaggaatgtaaaagactcattgccttttccttattttcactcggacaggactccatgatcgggctgatcagaacctcgatcagaccgccgccgatcgcataaatgaccacggcgatcaaaagcccggcaaaggcatttggcaaaagatccggcaataccaccagtcctgccagaccaagcgcagcaaaaatatgagccattacgatcgacacccgatatcctatcttgtcgacaaactttgccgataaaagatccaccaagagttggatgccgaaattgaaggtgatcagcatagtgatctggctcaaaggtattccataagaactttcaaaagttaaaaataataggggaacgaagttatttacgatcgcctgcacgatatatcccacaaagcaggcatacattgtattttgatatttgtctttcatttctgttttctcctcgcaaacatcctatcattttaaaataagaaccgcaatttaaaattaacaacagaatctgtcgtcagtccgttcatgtatgcgcgctgccctttccagcgacccggaacacccactggactccatccggcacatattccctatataatataagcattttttgacatttgggaaaaactatgctacttttagttagtaatgactaaccaaaaaatgcataaggagatggtctgatgacaccggaagaatataagaaactttccatcaaagaatttactgaggcagccaaagtctatgacagcggacacgccggtatttatgaaatgtgcaaggatgattatcctccgatcctggcagaactggaaaaggaggcatttacagatgtcctcgattgcggttgcggcaccggtcccatgctcgaactgctccatgacaaatacccggacaaacactatgtcggactggatcttacgcctgagatgatccatgtcgcacaggcaaaaaatctctccaacacggagtttctggtcggcgacagtgaaaatctgccttttgatgaaggaacttttgatgcgatcatctgctccaacagcttccatcattacccgaacccgcagaactttttcaacagcgcctaccgcgtcctgcgcaggggcggtcgcctgatcttgcgggactatacttcctctgattttgtggtctggctcatgaaccatatcgaaatgcctttggcaaatctgtgcggacatggcgatgtgaaaatcctcaaggctgccgaatttaccgctatggctgaaaacgccggttttacggttcttaccatggaaaaacaaaaaggcttccgcgctcacttagtcgcacgcaaaatgaaacgcattgactttgaaacggaaccataactgggaaccgcgggctttatcaccatgctctgtaccgtgttaccggaactcaaaaagatggaaaaatcacaaaggcagttctaaatactttcttccgctatcataggctgcccccagtttctcataaaaagcgagcgatggcgcgttccaatccagacaggaccactccatcctgctatagccttccgcctttgctctctttgcgaccgcatcaaaaaaggatctgccaaatccatgcttacggtattctgccttgatataaagatcttctaaatgtatgccgccacaggcagcaaaggatccaaagaccggataataaatggcatagccgatgacctttttctcatattccaagagcaggatcgtcgcgatctttcgctcaaaaagccagtaagacaaggcttcctgtgtccccgtcatatcttccgggcgcttttcatattttgccatctcccggatcagttcctgcaccagagcgatctcatccgcccgtgcttcacggatttccagtgtatcattcatgttaattctccttaaacctcttcatcatttcattagtcaggctgaactcgcccggctgcaagacaatgtcctctctttgcacccactcggcgtactttaattcctcaggatccatggtgattctgtcgtctccgtccacatcacagtaaaagccaagcaggatatcattggcggttccccacggctgcgacttatagtagcggatatttttgacctggatgcctgcttcttccatcacttctctttgcacggtttcctccatggtctcgccgatctccgtaaagcccgcgatcagggcattgtagcgaaagccggtgcggtagcgggtaatgagcaatttgtctccattggtcaccccaacgatcaccgccggcataatgcgcggataggcggtgtagtggcaggcaggacagaccatggctctctccgttttggaatgttgcatctcatgcccgcatcttccacaaaatttcgtgtcccgataccagtctgccagatgcttgccggtcactgctgcaaaaagcgcctcgtccggtcctatgccctcttttcgcagactcttttcatccacataggcatagccctccggtatgtctttttgctccaaaagatggtcgcacagaaaatacctgctatcatctatggcaaagagatagcgaatgtcagcaacatactcgtctgccagatccttgactcttggaaaccgcaactcgttttcctcaaaacaagtctcctccactaagatcctgccatttacaatgcaaagcagcgtatcttcctttttcgcctgtacgcccggatcataatggttgtttaattgatgtgggtaaatatcctgtatcataaattctccgatcttatgctattttaaatacctgcaagagcaaaagccatgccaaaccatagtaagtcaccactgccaccaggtcattgaccgtcgtgatgagcggaccggatgccactgccggatccactttgatcttgtgaaaaaggatcggcaccagcgttcccaccagactggaaatcacgatcgctacgatcagtgcgataccaacacagccggaaatgagcattgccatcgcaaacggatagcctttaaacaggctgatgtaaattcccagacaaaccagagccatgatccccagcaaagacccattgcagaatccgactttcatttccttgccgatcaggcggatcttatctttgccgctcaactgttcatccatcaggacacgaatcgtaaccgcaagcgactgcgtgccgacatttcccgccatgtcaaggatcagggactgaaagcagatcacgaccggcaggacggcgacgacaccctcaaaggatccgacaactgtggatacacccataccaagaaacaaaaggatgatcaaccatggcagacgttttttaatactctctttggtgctctcgtttaagtcttcctctgcggacagaccagccagttttgcatagtcctcgcccaactcgtcatccacagcctcgactacatcctgcgccgtgatgataccaatgatcttcttatccttatttaagaccggcagggaatcctccgcataatctttgatcttttcgatactatcggagatcttttcatggtccagcagatagggataagcataactgatcagtgaatccagcgccacgttttcccgcgcaacgataaggtctttgaggtcgatcgcaccacagaaacgcccccggtcatctaccacataaagggtcgtgatattatcattttcccctgcctgctgcaccaattcgtgcatagcctgacggatactgagattttgtttgatgcggatataattggtcgtgatcaggcttccgatctcatcctcatcataggaattgatgagaaggatatccattgtcttctcatcatccagcataggacggagtttgacctttacgctctcgtcaatgtcttcccagagatcaacggcatcatccgcctccatctcattgatgatctccgccagtttgtctatgccgatctcctcgatataaggtgccggatcatccacataggacatgatctctgccagccacttggcatccagcccgctgtataaaagattgcgctctgcgcggtttaggtatttcagactctgcgctatatcattatcatgataagccctgagttgttcccgcatttcatccatagacttggatacccggatcataacggcaatctctttttcaaaagttggttcttttaatacttcttttctcatcataagcctccttcttcccctaaaaaagggcataaaaaatccatcgtaactcagacgttacacaaactaaagttgtgatttcgttctgacgatggatcaaggcttatcttgtatttcaaaaatggcgcacctacagacatttgaaatagcgtgtaagtccagatccatcattatatgtacttgaacttcgactatcacaactgtccatatgtttcgcctcctttaactcataaacttttccgcgctgattatagcaccatcccggacccagttcaagttatttttcctttagatgaataagattgatttgtttattccttttttcataaataagaatctcctccaagttccgattttaaattactttaggctatcgggattgcacttctttatcatttggccatgctctccgaagagccacataggatatcaaaaaatttgcaaaccaacctgctggtacagcaagccagacaaatacaataccaaaacgaggtgcacaaatcaaagcaaccgacaagcggatcgccaggttcaccatatttgcaataaggaacgggcgcatgattccaagaccacgaagaaccccatcggttgccattttgattcccataaagatgaagaagtaaccgagccatctcatataaccctcagatacctgataagccagggcagttccatctttaccaaggaatagcgaggaaatctgcgtatgcaatgtttcaatgactataaaagcaagaactgcaaaacatacatctaacaccagtgcagcgtgatatccttttttgatccgttccattttctttgcaccaagattctgggaaacatatggggaaaccgcattgccaatggatacaaatatcaatgaaaaaacattctctacccgcatcgtcgccgcataccccgcaagtgcctgtgtaccgaaaggatttacgacc

SEQ ID NO: 12566 - DNA, 6960 bp, Unknown
  gut microbiota DNA sequence
ccgcatactgcaccagcccatcccctgcccccctgccagccatctgctcccgcgaagtttgctgtcgcattgcctagccacggcaaaaatcaagaaagcaggacaacgcatcgttttgcagatgcgtctttttgtaggcaaagccgacatcacgcttatggatggggatgtcaagcggaatctgctgtaactgtccgtctgccagttcctcctgcacaaagtttttgatgacacaggcaacaccgacaccgatcttggcaaactcgatcaaaagatccatattggagatctcgatatagtccttggtctggatctggttcttggcgaggtaatcgtcaatgtactgacgggtcatattatttttatcaaggagcataagggtggatgcttccaagatctcccgcgtggaagtcatatcctgcggaagatgcgacatataggcggaagtcgccacaaagatgtcctcgatctccactaaattttcatagatgaagccagtcttatgctccggcatgccgacaagcccgatgtcaatggcatcatcggctaacatcttgagggtctcattggaggactgacagcggatgcggatattgatctgtgggtgttcccggataaaggcggccaggtagggaagcaggagatatttgcagagggtcgtgctgaccccgatatgcagggtgccgccatcggtccgggtcagtgtctccaacttggtctctgcacttgtgattgccgagaaggcggtatctaaatgctgaaagaggagttgcccttccggtgtcagccgaacacccttggaattgcgcaaaaagaggcgggtatggagagcgtcttccaacttctggatggatttgctgatggcaggctggctgatatataattggttggttgccttggaaaaacttccggctttggcaacttcataaaaaatgtgataagcagacagtggattgttcatggtatttcctttctgatgatatataacctatagttatagtaaatatatttaatatgtatttctattatatatactttcatggtaaaatcaatattgaacaaaagaaaactgcctgagatatggggtatggctgcaaacgtatccggtgtcacaggcaggaaaatcagacataagaagcacataagtatagatcaggagaaaaaggaggaacatgtcatgggaatgacaatgacacagaaaattcttgcggcacatgccggattggattccgtagtggcaggacagttgatcgaggcagatctggatctggtactgggcaatgatatcacttcaccggtagccattcatgagattgaaaaaatgaaggtagacggcgttttccacaaggacaagattgcacttgtcatggatcactttgtaccaaataaggacatcaaatccgcagagcattgcaaatgtgtccgtgagtttgcgtgcagaaatgagatcaccaattattttgatgtgggagagatgggaatcgaacatgcccttttgccggaaaaaggtttgaccgtagccggtgatgtcatcatcggagcagactcacacacctgtacctacggtgcgctcggagcattttctaccggcgtgggaagtacggatatggcagcaggcatggcaaccggtaaggcatggttcaaagtaccgtccgctatcaagttcaatctggttggcaagccgaataaatacatcagcggtaaagacgtgatcttgcacatcatcggtatgatcggtgtggatggcgcactttacaagtccatggaatttgtcggcgaaggcatccaatacttatccatggatgatcgttttaccattgcaaatatggccatcgaagccggtggaaagaacggtatcttcccggttgacgatctggctaagcagtatatggcagaacattccaagagagattacaaggtatatgaggcagatgcggacgctgtttatgatgaagaatatacgatcgatctttcaaccttaaagtcaacgatcgcatttccacatttaccggaaaatacaaagaccattgacgaggtcggcgatatcaagatcgatcaggttgtgatcggctcttgcaccaacggcagatttgaggacttaaagacagcggcagagatcttaaagggcaagaaagtcaagaagggcttacgtgttatcgtgatcccggcaacccagcagatctatctggatgccatggaagcaggtttcatccgtacctttattgaggctggtgccattgttagtacaccgacctgtggtccgtgtctgggcggttatatgggaattttggcagcaggcgaacgatgcgtttcgacaactaaccgaaactttgtcggacgtatgggacatgtagattccgaagtatatctggcaagcccggcagtggcagcagcaagtgctttgacaggtaagatcagcggaccggaaaacgtataagaggtgagaatatgaaagcagcagaaggaaaagtatttaagtttggcgataatgtagataccgatgttattattccggcgagatatctgaattcatcagatccaaaggaactggcaacacactgtatggaagatatcgatgcagattttgtaaaaaaagtaacgccgggagacatcattgtggcaaccaagaattttggatgcggatcatccagagaacatgcaccgatcgcgattaaggcagccggcgtatcttgtgtgatcgcagagacctttgcgagaattttttaccgcaatgccatcaatatcggacttccgatcgtagagtgcccggaggcggcaaaagatatttcggatggagacgaggtatatgttgattttgacagtggtctgatcaccaataagacgaccaataagacctatcaggggcaggcgttcccgccatttatgcaaaagatcattgactgcgaaggacttgtcaattatatcaatcagaaataaaagaatgtgaaaagacccggtctgtttgacagatcgggtcaagttatatgacaaaggaatcgatataatccagataagtctgggagagttttagtgccgaataaatatcggcatattcccgggcagacaggtctgcgatatagttctggataaaatttttctggatgccgtgatctctggcgtagtcgaccgccttgttgtaggcgatggcagccttgatctccgttgtatattttccaatgatgacatcaccattgaggtggagcctggcaacaaagaggcgtttgccctttttctcggtctgggtgatgccgtgataggcgttgatgatgcggatattggcatagcggtaatcggtcggatccccgttgacaaagacataatcccgtccggctacaccgtaattcttgatgccatagcgttgggcgatattgtattgcatgccatagtcattgacaaagaggtgattgccgcgccgcatgatcttatggctggaatagtagaaaagatcgtcattgtcaaatttgagatcataatctgcctccagataataggaaaaaaatcccttttgcaggtagatcggtgttttgatatacatgccgtgatcccggaaattcaaaaggctgatggctttttcaaaagacaggtggcggatgcgggaagtgtagttttccggcgtaatcgcagggctggataagatgtccatggcttctcgatagatggcgtgggcgatggcagtatcagaagaagaaccaaggctgatatgcttggcatgataagtcaggctggcacgataataaagagagccatctttttttgaggtttgatatacgccggttgacataaattccttcctttcattatttatatggcatttattatagcatttattatagcataagggtctggatttgagaaatcctacgttgacacggcttttgggtataacgtataatggaaatcagcgtagtgacgtgtcaaagttacaaacgaagtgagtgaagaaaaaggaagaggtaagaaaatggaattacagtatgtaagcacaagagatgcatctgaagtggtgagcgcatcacaggcgatcttaaaaggattggcaaatggtggcggattgtttgtcccaacctttattccaaaattggatgtgagtttggaagacttgagcaagatgacttatcagcagacagcctatgaagtcatgaaactctttttgacagattttaccaaggaagagttggaaaactgtatcaaccgcgcttatgatgccaagtttgacaccgaggagatcgcacctttggtatatgcagacggcgcttactatctggaactgttccatggatctaccattgcctttaaagatatggcattatctatcctgccgcatttgatgatcacatcagccagaaagaaccagatcaaaaatgatattgtcattcttactgcgaccagcggagataccggaaaggctgcccttgccggatttgcaggcgtagagggcaccaagatcattgtcttttatccaaaggacggtgtcagcccgatccaaaagcagcagatggtgacccagacaggggacaacacactggttgttgggatcgacggcaatttcgatcaggcacagaccggtgtgaaaaagatgtttgctgacgaagatctgaaaaaggaactggacgcagcaggctatcagttctcatctgccaattccatcaatatcggacgtctggtaccgcagatcgtatattatgtctatgcatacagccgtctgcttgccaacgacaagatcaaggcgggagaatcgatcaatgtggttgtgccgacaggaaattttggaaatatcttagccgcattttatgcaaaaaatatggggttgccgatcgcgaaactgatctgtgcatccaatgaaaataaagtattatttgatttcttccgtaccggtgtctatgacaagaaccgagaatttatccttaccaactcaccgtctatggatattctgatctccagcaacttggagcgcctgatctatcgcattgcaggtgaggacgcaaaggcaaatgcagcattgatgcagagccttacgacagaaggacgctatgagatcacgccacagatgcgtcaggctttgcaggatttctatggcaattacagcagcgaggaagagaccggacagaccattcatgatctctatgaaaagacaggctatgtgatcgatacccataccgcggttgctgccggtgtttacggaaaatataaggcagagacaggggatgagacaacgacggtcatcgcttctaccgcaagtcctttcaagtttgccaagagcgtcatgactgccattgatgcttcctatgcaaaggaagatgatttcgcattgatcgataaattgagcgagatctcccgtgtcgaggtgccaagagccgtagaagagatccgcagtgctccggtacgtcacaagaccatttgtgccgtggatcagatgccacaggtagtaagagatttcctgaaataaaaaatatacaagatacaaaaaagagggtttcccaagcggaagccctctttttaaaatatggattttcatactaagcatataaactgatgatcaaatgaatagcaccaaacggatagatgaccggcagaatgaaagtcgtagaagaaagcgacagtgcttctgtggtatctacggaaggtggatccaaggataattcgatggagtgttcattggacatattgaccataaagagtccgttgtgcagattgataaagtcctcaatagatgcctgcacatattcgtcaaactcggtaaaagttgtcttggcatagcgcgatgcgaaagcaatagcaacatcttcttccatgtccacacgggaaatgcagtttaccttgccgtggatacgctgggagacgcagtagttgaccgggaactcatcacaaggaatcggtgtgagaggagtgaagtcatccccgataaaacgcaccagattattgaacatgagttccatatacatgatgctgtattccgtgatcggaacctctgccaccaaaaagaaacgttcgatcaactgggtgatcttttctttgctttcgatattcagatcgatgtcatacatctcattttcggcttcgtagtccaagaccagcgtttgcagttcctcataggaaatggcaccatcatcgaccagacattgtccaaagaggagaaagtccgggatctgtgtctttaaaagttcgcgtacctggtcttcagtaagataaccgcgctctatggcaatctcgccaaatctgcggtcttctctggtctgcagaaagcatacttcgtccacttcggaggcaaccatatagcccttgtgcatggcaagggtacctaacttgatgtgcgcggcagacaactgtgagatcgcgtgtgtcaactgttcaggcgtaatggcatcgcgcctgagcagataagagccaaaaaactgtgaatacatactttattttccccctaagtgtacctcaatcaatcgatcaacctgtggctgactgatcggcttctgaatgaaatcttttgctccggcttcgatcgccttctttaactgcatctgtgtgccgacagaggagacaatgatgatcgttgcgtcaggatctgcagcgatgatctccttggtcgcagcgatgccgtctttgagcggcatgacaatgtcaagaaataccatgtccggatgatattttttgaactgctcaacggcctgctcgccgttgacagcatcataataggtagccccggatgcgtattcgctgatggcatcctttaggttttttctggctaatattgagtcgtcgcatatcagtatgcttttgttcgataaatccatatctataactccttgcaattatttcttcctaacttatctaaatatacttataatactacatcaaatgacataattattcaaacaaattgtgtaaaaccttagacttttattgaaagaaaaaaatcttaccgttataatgattacaaataaatgagagaggtgtaaaaatgac

SEQ ID NO: 12567 - DNA, 984 bp, Unknown
  gut microbiota DNA sequence
atgtgatcatcacgattatgggatcttatattatcttttctacgataaagatgaaaaaggatggcatggtgccgaatttatttgtgccggtagaggaaatgaccaaatgtaaggatcagccgggctttattgcctttcttttcccgcgggcgatcatctttgggattgtgtctgctatctttggcatcgagggcgtgtgcaatgatatgttcttgaatctgggacagatcgtcaatgtcatcatgatcgtggtctttatcgtcgcatgggtatggttttccatgcaacttcgcaagggaaaggagaaattcttttgagtggcagaattcttgtagtagatgacgaggagaagatccgtctgatcatccgcaagtatggtgaatttgaaggttatgagatcgatgaggctgccaatggtatggaagccgtagaaaagtgccagaagcaggactatgaccttttggtcatggatgtgatgaatgccggaactggacggtttttctacctgtgccgccatcaaaaagacaaaagatattccggtgatcatgatttctgccaggggcgaggaatatgaccggatccatggctttgagtgtggcgtggatgactatgtggtaaagcctttttctccaaaagagttgatgatgcgtcaaggtggtcatgagccggcagaaaacgacggaagaaaaaatggatatctatacctatgagggactggaagtcaattctggtaagtgcggaggatagtgacgatctgtcggaggctttggagacactggcgctggataatggcgtatcacttttggtcacagatgcagacggtacttcgctttacagtgcacagtacaatccgcggggaactatgaataccctgccgcaggataccttcaaagaactgtatgcccaggcacaggcatccggcggagaaacacagatcgaatatatgggcagtatgcagttagaagatggcatgccggggcaaat

SEQ ID NO: 12568 - DNA, 10211 bp, Unknown
  gut microbiota DNA sequence
agggcatcccgcaggacatcaaaaggcgcaggtccggtctgtaatatctttttatgaaattccatataagaaaaatcatctttttttgcatccttatagtctttctgtagggatgcaaaattcatatagcctacataataatgcaggtaatttgcaggatcttccacgatcaactggtagatctgatcgacgacatcttgatctttgatcccataattttctaaaaattccaaaagactggcacgatcccagccataataatggatgccaatgtcggcagaggcatagagacttaggacaatgctctcattgagggctaggacggacgcaagttgatccggcagtccggcgtattgataagacatatattccacataggtagcccagccctcggtatatgccggaaaggataaaagggcgcgcaccggttccaatccgtactgataggacatggcggtctggtaaagatgaccgggaaaaccctcatgtgccatggtggtaaagagggaagtcgtgtcggcattgctgtctggattgtaaaaaatattgtgatagccaccagaatccaaaggcgcgatcagatagtaggcgggcgcactggtctgtcgcaattgtggcgcaatttcatggatggtgacggtaacattttcataagcaggaaagtcattttgtatagaatcctgtaaatgctcgatcatgtcatcggctgtttttagggggcaggtataagagcccagcatggacgctaaggcaggattgtgggcaaagaggtcagccatttggaacaggtcttcctgacgtttggcagcgatttcttggaaaaccgtatagggactttcctttgtgccggtgttctttctgaccagaagggcgtagtatgtacgtcctttttctttgacagaaagacttccattatcgtctgttttgtcaataatcgacgataattgattagaaagcgacaaataagacggtaaaacgacatcataaatgatcgactgattccgggagatataggacgctttttctgcttcatctaaaaaggcagcgttttttatgcggtcgtcaaaagaagtcagaagcaggtggtccgcctgcacctgtgaaaaagaggcacaaaaatcaatggtctgttgcaacgagtctgtgttttccataagccccaatttggactgttccgtagcaaaggcatagatctgtccgaagtagatatccatttcttctaagagggacaggtaacattcaatatcctcggtatcgtgaaaggaaaaagaggacaaaagaaccggcagggaagaaggaataccggcggtcggcgagagcagattttgatagtagtagtagtcgcccagtttttcctccagaccatagtaatccttcataaggtcatagaccagcctttgccgggcagtcagattattgcggtcaatgtcctttaaacggtcaagcagatctttgatcgcatccatttcctggatatgttcttccatggtcagtgtgcagagcgtctggtccgaaaaagtgatatgataggcatccgggttttctaaagtaaagtggcaggacataggatcggcttccatctgcctgcaaaaccaatcgtctgtcagatcctcaaaagtatctgcatcgctggtctgacccgcatcaaaaagccttgcatttcccagatcctctttgctgcagcctaccgctgaaaaggcgatcaggatagcaaggatcagacaaagaaatcgttttcccataatgcctcccaaagaaataccatagttacagtgtatgtacaatgaaaaaaaatatgatttccggcatagattttccttaaaattcatacatatgaaaaaaagtcttggagtgcctatgaattatctttgggcaggcatgctcttacttggcatcgtctatggaggctttcggggagagatggcggcaatcacggaagcggcactttcctctgcaaaggaagccgtttctctttgtatcacattgcttggtgtcatgtgtttttgggtaggtatgatgaacattgcgcaaaagagcggactattgcgtactctggcagaaaaactggatcccctgctgaactttttatttcctacattaaaaaaggagaccaaggcaaaagaatatatcgcgaccaatgtcatcgccaatatctttggacttggctgggcggcaacaccggcaggactttctgccatgcaggaattaaagaaggtcagccggcagaaagagggcgtggcaagccgggaaatgtgtacttttctggtactcaatatttcttccctgcaactgatcccggtcaatatgatcgcctatcgcagtcagtacggatcggcaaatccatccatgatcacgggtcctgccattcttgcgaccgctatcagcactttggttgccgtgatcttttgtaaactggcatgtatggggcgggaggatcggctatgaaattgcttctatatatatccgatgccatcatccccattctcttgtttatcatcctttttcacgccctgcttggcaagggaagggtctatgaggattttctggagggggcgaaagacggctttcacaccgtgatcggcattatgccgacgctgatcgggcctatgtgtgcggtcggtgtcctgcgtgcttccggctttctgacggatctggcagtctggttgggaaagatcatacccgaggaagtctttccctccgtgcttcttccagcggctatcgtaaaaatgttttcctcctcggcggcgaccggactggtcttagatatttttaaagaatatggaccggacagcagcaatgggctgattgtatctttgatgggatcttgcacggagaccatcttttataccatgtcggtctattttatgagtgttggcatccgaaagaccagatggacgctggcgggcgcgctggtagcgactttggcggggctgatcgccagtgtgatcctggggcggatgctataggaactgtacaaattttcaaattcgtagtaatatagggaaacttggtgacatatattatagaagataaggaagaaaacaaatgaacatgctcatggatctcatcacaaaccgtatatttgtggcaacggcggctgcctggctggtggcgcaagtcttaaaggttatcattgacgcggcaaaaaatggtttttccgcggaacgtctcacgggaagcggcggtatgccaagttcacattcagccacagttacgggtctggtcgtttcgactgctatcgtggagggactgggaggatttccttttgttatggctttgttttttgctattatcgtgatctacgatgcagcaggcgtgcgcatggagacagggcgcgaggcgcagttgctcaaccgtcttttggagcgggataaagccgagggcagagagcctttgtacgaaggaaacttaagagaaaagatggggcataccataccggagatcatcgtcggtatgatcttaggcgcggtcgtggcagtcattgtctgtagtatcatgcaggggctgatcgcatactgatgtcagatcttgtcgatgacaaaaatttgacaatccgggataagaagcctataataaataacgttgacgcgggatggagcagtctggaagctcgccgggctcataacccggaggtcataggttcaaatcctattcccgcaatttttttaggagatgtccgataggatgtctcttttttacatcacaaaccaaaggaaaagcgtatggagaacaagtgggattttcaggtaaatgatattgtaaccatgaaaaagaagcacccttgtgggagcgaccagtttcgcatcctgcgtgtgggagccgattttcgtctggcatgtctgggatgtgggcatcagatgatgctgccgcgcacaaaagtgaccaaggcatgcaaaaatgttttgcacgaaaatgtaaaaaaggcttgaaaaagagggaaaatcatggtatcatatcaactcgtggtatattaaaatatccttgctttgccgtatattggcaaggccaaaagaccaaaaggaggtaaaatcgcatgaacaagtatgaattagcactcgttgttaatgctaagatcgaagatgatgcgagagcagcagtcgttgagaaggcacagggttacattacccgtttcggcggcgttgtcagtgaagtagaagattggggtaagaagaagttagcttacgacatccagaagatgagcgaaggttactactacttcatccagttcgaagcagaagctgatgcacctgctcagatcgaagaaaacgttcgtattatggataatgttcttcgtttcttatgcgtcagaaaagacgaggcatagatagtagataaggagtaggaatgaatagactgattatgatgggtcgcttggtagcagatccggaagtaagatatggggcagccaatggttctgctgtagcaaattttagaattgccgtagatagaagattcaagagagatggagatccggatgcagatttcttccgtatcactgcttttggacgtcaggcagagtttgctgagaaatatcttagaaaaggtaccaagatcttattagaaggtgaaatcagaaacaacaattacaccggaaaagatgggaacatggtatattccgatcagatcattgcgaattccattgagtttgcagagagcaagaatgctcagtcaaacaatggatttggcggcgacatgggaactccggcaccgaatacaaacgctggagacggttttatgaacattccggatggtattgaagaagaattgccattcaattagcattgattaggaggtagcgtcatggcttacaataagacagcagatggttcaagaagaagaccaatgcacagaagaaagaaagtctgtgtattctgtggtaaggacaacgtgattgattacaaggatacagcaaagttaaagagatacatctcagagagaggtaagatccttcctcgtcgtattaccggtaactgtgcaaagcatcagagagctttaactgtagcaatcaagagagctcgtcacgtagcacttatgccatatgtttgcgaataagattcgtagataagatatagtattccaaaaggagcatttccgtagagatatgggaatgctccttttttgtatataagaaaataggtggtttattcccgtaaaaaggacgccttgtaggcggtgccccattctgccattgccgtgatgatggggcgcatggactcgcccagatcgctgagggcatattctacacggggtggaacttccgcatagacggtgcgggtgatgataccgtcttcctccatggatctgagggaatcggtcaggactttctggctgatgccctccagatccctttttaattcattgaaacgccaagggcgtgacatgaggtttcgaatgatcagtatcttccatttacttccgatcagttgcaatgtggttgcaaccggacaagccggtaattcttctttggtcagcataaaatctccttttctccttacgggatcacaacagttcaaattagaatgctacattagaaataaatcttatatcaaattatagtatgcccttaggatctgcgcaatagttaccttttggtaactaagtaatagatttgtgcgtactttttttctggcgctttccatcataaaatcataagcaggaacaggaaatgttcaaaaaaagaaaaatggaggaaaatttcatggaaaaagtagtagaatttttacaggaaaatcctgtacagtatttagcaaccgtaggtcgtgacggaaaggcaaagtgccgtccttttatgtttgcgggtcagatggatggcaaactttggttctgcaccaacaacacaaaggatgtctacaaggatctgcaggaaaatccgcagattgagatctccgtatccagcccaacttatgcatggatccgtctgcatggaaaagcagtttttgaggacaacatgcaggcaaaagaaatgtgcatcgccaatcctattgtcaagagccagtatgggaccgcggataacccaatttttgaagtattttatttggaagatgcgcatggtgtgatcgcggacttttcaggaaatccaccatatgaattttaaaacagtgatgagataaacaggaggagcagccatatgaaccagagtgagcgacgtatgtatttgatcaaagaattgttaaaagaacagccgggctatagagatatggagattccggcaaatgcttctgagcaaagacgtctgctgcgttcacttatgaatgtgcgtatggcggctcctgtggatgatggatttttgcagatccaggatgcatatctccaggaggagaaccggaaaaagggttttgtgactctggcggatatggaagaattgcaggaagatctctatctttggcggggagacatcacaagacttgccgtgggtgcaatcgtcaatgcggcaaacagcggcatgacaggctgttatcaaccctgccataactgcattgataattgtatccacacctatgcggggatgcagctacgatccttttgtagtgaaatgatggaagaacaaggctatgctgaaccgaccgggcaggcgaagatcacacctgcgtataatctgccctgccaatacgtgatccatacagttggaccgatcgtgcagggaaaactgacgcagaaagaccaggatctcttgcgctcctgctaccagtcctgtctggatctggcagaggaaaagggaattgaaagtatcgccttttgttgtatttcgaccggtgttttttgttttccgaatgcgcgtgcggcagagatcgctgttgagactgtgaaagagcataaggcgcagaccggatcggatattaaggtggtttttaacgtctttaaagaggaagacgaagggatttaccgtagattattaggctaggtttttggaataaggcatgagatagcaagcagagaaagaagtatggaacagatgaaagagcaagcggacaagatagaacttatcagacataaaattgaggatgcggatgctattgtgatcggtgccggtgcgggactttccacggcggcaggatttacctatagtggcgatcgctttgaaaagtatttttcagattttgggagagcgtgtggcttttccgacatgtattccggtggcttttatgattatgccacgcttgaggagtattgggcgtattggagccgctatatttatatcaaccgttatcaggatgtggagaatggcacatatcggaatttatatgcgctggtaaaggataaggactacttcgtgctgacgaccaatgtggatcatcagttccaaaaggcgggatttgcaaaggaaagactcttttatacccagggcgactatggactttttcagtgcggcagaccctgtcatgctaagacatatgataatgaaaaaactgtgcgggatatggttctggcgcaggggtatgccattgcggaggatggggctttgtatctgccggagggcgtaatgcctaagatgagcgttcccgctgaacttgttccgcgctgtcctaagtgcggcagacctatgagcatgaacctgcgcgcagacaatacctttgtggaagatgcgggctggaaagcggcgtccgcatcttatgtgcgctttatggaagaccatatgcgaaaaaagatcgtttttttggaactcggcgtaggttataacacgccaggtatcatcaagtataatttctggcaatatgcggcaaactggcagaatgccttttatatctgtatcaatcaggggcaggcatacctgccggaagatatcgaggacaaagggctggcggtcaatgcggatattatgcaaatacttgaggggctattatgatgctacaatcatagtcccatttttttctggaaaagatcgccgatgatctgggcagtttctgccacaccaaaatcgtcggatttgatacaaagatcgtaattctttacattgccccaatctgtcttgataaagtgtctgcaatggatggcacgctcatggttgacctttttcacctttgcagcagcagattgcggagaaatattgtcacgtgctgagactctggtagcctcggcatccagatctgcactgatgaaaacatggtaggctgtcggcatatcttttaatatgtagtttgccaaacgacctacgatgatgcaggaacccttctgggaaagttcgtggatcagagcagattcttttgcaaaaagttggtcgaccattggcaggtcagtctgttctaaaggtccggcataccaggcaaagaaatcatgcagaagcgggtttttcaaagtctgttcattctgctctatatattccggtgagaaaccacttttttctgcggcaaggcggatcagttcggaatcatagtaatgaaaaccgaaacgctcagccagaagttttccgatctcacgtccgccactaccaaattcacgggaaatggtgatgacataactggaggaagtttcttctgagacagcagtctcatcctcttttccaagtaacttatcgcgctgcttgccaaatgcccggttgaggataccgaccagcgtgccgactaagacagcggcaataatggtaccggcaccaacacttcccagtgtgtgcaataaactaagacaggtgacggctgagatcaggaccatggtacagtcaaagccgatcttaaccttggaaaattcaacatgggttacagaggataccgcctgcatacagccttctccggcgagtgggatcaggtttgccggcaggtataaaaagatacccagtgcgacaaacaccgtgctggcaagtaccatgacgatacggatgcccagattttccggcgttggcaggaaggataccagatagttacaaaacgtcgtgaagtaaccgaatacgacaccgatcagaacctgtaaccactgaacgggtttgaaattttttcgcaataagaggatctggatcagaaccagtacgatatggaaaaggatggttgccttgcccatctcaatgccccagacgcaggtcatggtgtaagggatggaactgacgggtgatacacccagatttgattttacggaaagcgcaatgccgatggtcattacgaaaagtccgataaaatacatagggattctagtttttaaatgtttcatttatttgtgccttctttcttataagtagttaccatgttgtcatatacgcgactgagcaagtcctgtaattgttgcttttctgccggggtaaagccctctaaagcctgggattcgatccgggcaaattccagattgagacggtcagcatacttttttccgctttccgtgagatagacatggagagagcggcgattgctgtcggcagtctttcgtttgatataacctttgttttccatgccatttaagatggcggtcaaagacgccggctcaatgtggcagaatatggcgatttctttttggattgccccatcatggcggagcagataatcgagaacttttggttgtcctgaggtcaatccggtatctttgacactggagatcagggctttttgtatcatcagatgatcagacatcaaaagataatggaatgtttcctgcatgattgcctccttagttagatttctaattgttagaaacctaactaaatatatacgaaggaagggagattgtcaaatgaaatggaaaaaacattggaaatatagtaatatggggaaaagaaattttccaaaagtgtaaggggtaaaaatgctggagacagaaagattattattgcgaaaatggacagaggcagacgcggacagtttatatacatatgcaaaagatccggaggtgggtccggttgcgggatggccgccacataaaaacgtggaggaaagcaaagaggtgatccgaaatgtctttaacggaccggagtgctacgcgatctgtgaaaaggaaaacaacattgcgatcggggctgtcgaactgaaactgaagggacatacagacatgacagaccgggacgatgaatgtgaactgggatactggctgggacaaaaattctggggcaggggttatatgccggaagccgcaagagaacttttgcgccatggatttgaagatcttggaatgaaaaagatctggtgtggctattatgacggcaacgataagtccaaacgtgtgcaggaaaaattgggctttgtttatcatcatacctgcgaggatgtgccggtgcctcttttacatgaggttcgcat

SEQ ID NO: 12569 - DNA, 1860 bp, Unknown
  gut microbiota DNA sequence
catcggacagatcgatccccaggatctcatggtcgatcagggtatcatgataggtcatgccgttaaaaggctttgtcatcgccttagcattagcgatgatctcatccacataacgcactccatccgtatggctgaagaactcgaaccacaaaaagagggcagaacatccgatcaggctgaccagaagaatgatgccataataaatgcgtgcctttttttccttttccgacaaaagccgataaaccaaaagggcaagcaggatattgtaaaacataaagacatagccctgatggtacatgacactgatcatggaaagcggcacgatcagccattctgcttttttcgcgatcagacacatggttccgatgacggtaagagccatgagatacagatccagacgtccaaagttgcgcttgtaagcaaacatggaaaccacaaaaacagcgtaaaagaggatcagatacaaaaacctgcccagatattcttcctgacaccgcttcatgcactgatagcaaaaagcaaagaatagcacataaaaagcaagcgtcacgatcagcgtaaagcggagtaccatagcataatcgatcatattaaccggcaggatgctgtcgatccactgatagatcgtgcccgcaaggcctcgcgatataaaaccatatttgtaagaaaatgccaggatcgtcgaattgtaaggcagaactctctcatcatagtccaaaaagaaaatggcgcatgacaacaagatcaaaagccacataaaacggctgatctgcttcttttttggcatttggctcattgttttttctattcccatgctacaaactccatacacgcatactttttcatatctttcacacttctacccctgcaatcacgaacaccttagtgcctttgatggaacaggcaatctccctcattcatgatccatacgaccaacagagaaatgacaaggtgcatgctccataccgtcagactgctgtaatttaagtccagatgacacaggcggttgatgagttccatcccaagatcaatcgccatattccacaaaaagatcggcatacagacatttcccagccagacaaaaggttttgccccaaagatctttcgcaggatatccacctgacatgccagatagatcagacttgtccacacaaaagcgctgacataccacaaagtccgcaggctctcgtgtctttctgccagaaccagactgccgatcaataccacacttgccaatatacaagaaaacgtcttgccccgctccttggtcttttctatgatctgtgccagtataatgccggcaaaaaaactaaaataacctctgccactggtacagtataaaagaggcagtcccaagggatgaatcatgaggaaaatccccaatgccatcatacccatataggatacattctgccacaaacgtcctctgacatagcgcgtcagcagatagtaaatggcatagcagacaaagaaaacactgacaaaccaactcggtccgttgaccgccagcgtatcattgtcagaaatccatcctgtctgcaaacccagcagcgataccaggagtgccttgagggaatttcgcaccccggctccatccggatgcaggatatagacaccatagatagcatagccgactttctgcaaaagccaagtcaccaaagcagatgccatcatcataggatagatctttttcatctttggcaggataaaactacccagccgcaattcgccctcggacagacgtttctgataggaccagtacaaaagcagaccactgagcataaaaaagatctcagacatgcagacaccatagcgtgccaaaaatcccatgactgccgcctgtatggggaaacgttccgg

SEQ ID NO: 12570 - DNA, 117799 bp, Unknown
  gut microbiota DNA sequence
agcagaactcaagactgctaccggtcagaagcgcgccagagtcatcaagagactggaagttgtagaagcattccgcgagtcaggcaacaagccggagtggatgatccttaccgttatcccggttatcccaccggatcttcgtccgatggtacagttggatggtggacgtttcgcgacatccgatctgaacgacttgtatcgtcgtatcattaaccgtaacaaccgtttgagaagactgcttgaactgggcgcaccagacatcatcgttcgtaatgaaaagcgtatgttacaggaagcggttgacggactgatcgacaatggtcgtagaggccgtccggttacaggccctggaaacagagccctcaagtctttgtcagatatgttaaagggtaaatcaggacgtttccgtcagaacctgctcggaaagcgtgttgactattctggacgttccgttatcgtcgtaggaccggaacttaagatttatcagtgtggtcttccgaaagagatggcgatcgaacttttcaagcctttcgttatgaaagagttggttgctaacggaactgcacacaacatcaagaatgcaaagaagatggtcgagaagttacagccagaggtctgggatgtactcgaggaagtgatcaaagagcacccggttatgttaaaccgtgctcctacactgcatagacttggtattcaggcgtttgagccaatccttgtagaaggcaaggcaatcaagttacatccactggtatgtactgcatttaacgccgatttcgatggtgaccagatggctgtccatcttccacttactgcagaggcacaggcagaatgtcgtttcatgctcctgtctccgaacaacctgctgaaaccatctgatggtggtccggtagccgttccttcacaggatatggtacttggtatctactatctgaccatggatcgtctggcagatcattccaaggaagagggcattacgactgtttctgataaggtatatactgacgcagaggacatcaaggcagacattaatgcagatgtcatcgacattgatgatatgatccattttgaggatgtgacagacggtaaccgtcatgtcatctgtagagcaagagacatacttggacattattacccaagtatgaaccaggcactgttggcatatgaaaataaagagatcacattgcatcaggtcatttacgttcataagagcgtgacacttgcagacggaagcgttgtagaaggcaatgtaaagacaaccttggggcgtttgatctttaatgagatcattccacaggatctgggatttgttgaccgcagcaagccggaaaatgcactccgttatgagattgagttccatgttggtaagaagggattaaagcagatcctggaaaaggttatcaatacacatggagcaaccaagacggcagaagtattggatgatatcaaggctatgggttacaagtactctacaagagcagccatgaccgtatctatttccgatatgaccgtgccgccacagaagccacagatgatcgctgatacagaaaagacagttgaccgtatcacgatgaaatataagagaggtcttttgacagaagaagaacgttacagagacgttgttgagacatggaaaaggactgatgatgagttgacagaagccctgctttccggattggataagtacaacaacatctttatgatggctgattccggagcccgtggttctgacaagcagatcaaacagcttgccggtatgcgtggtttgatggctgatacaaccggtcgtacgatcgaacttcctatcaagtcaaacttccgtgaaggtctggacgtattggagtacttcatgtcagcgcatggtgctagaaagggtatgtccgatacagcccttcgtaccgccgattccggatacctgaccagacgtatggttgatgtatcacaggaacttatcgttcgtgaatctgattgtaatgccggaaaagatcgtgagatccctggtacttacatcacagcattcatggatggtcgtgaagagatcgagagtctggaagaacgtatcacaggcagattttcgtgcgagacgatctgcgatgctgatggcaatgtgatcgttaaggcaaaccacatgatcacaccaaagcgtgcacatgcgatcgttacagttggtgtggatgagaacggaaaagagatcacacgcgtgaagatccgtaacatccttacctgccgttcacatgtcggcgtttgtgctaagtgttacggtgccaacatggcaaccggtcaggcagtacaggtcggtgaggcaatcggtatcatcgcagcacagtctatcggtgaacctggtacacagcttaccatgagaaccttccatagtggtggtgttgccggaaacgatatcacacagggtcttcctcgtgtcgaagaattgtttgaggcaagaaagccaaagggacttgcaatcatcacagaatttgccggtacagcagagatcaaagatacgaagaagaagcgtgaagttatcgttaccaataaggagaccggagaaagcaaggcttatctgatcccttatggttcacgtatcaagatcgtagacggacaggaactggaagccggtgacgaactgacagaaggttctatcaacccacatgatctcttaaagatcaagggcgtgcgtgccgttcaggattacatgcttcaggaagtacagcgtgtatatcgcttacagggtgttgaaatcagtgataagcatatcgaagttatcgtgcgtcagatgttaaagaaggtacgcatcgagaacaacggtgattctgagttcttaccgggaacacttgttgatgttcttgactttgaagaaatgaatgagaaacttgcagaagaaggcaaggaagtggcagaaggaaagcaggtactgctcggtatcacaaaggcttcccttgcaaccaactccttcttgtcagcagcatccttccaggagacaacaaaggttctgacagaagcagccatcaagggcaagatcgacccattgatcggtctgaaggaaaatgtcatccttggtaagttgatcccagccggaacaggtatgaaacgttatggcaacatcaagttgaataccgattacaatcaggagatcgaagaacagacagaagacttcggagatctttatgatgatacgccggtcgaagaagccgaggcagaaacagaagcagaagatactgtttctatcgactaaggataataaatcataatacaaggcaccacggaaaacagatcatgctttccgtggtgctttttgcttgagaaatctcttgacagatgacgagaatgtttatataatattttagcgtgcataaaactgtgcacacttataaactatactacaggaggtgaaaataatgccaacatttaaccagttagtaagaaagggacgtcagacatctgtaaagaagtctacagcaccagctcttcagagaggttacaattctcttaagaagaagcctactgagacatcttctccacagaagcgtggtgtatgtacagctgttaagacagctacccctaagaagcctaactcagcgctgagaaagatcgccagagttcgtctttcaaacggaatcgaagtaacatcttacattccgggtgaaggtcacaacttgcaggagcatagcgttgtattgattcgtggtggtagagtaaaggatttacctggtactcgttatcacgtaatcagaggtacacttgatacagcaggtgtagctaacagaaagcagggtcgttctaagtatggtgctaagagaccaaaggacgctaaataagacctagcagacaattgtattttcacaaagaaatatggttagtgttgaaatttattttcatttgtcagaataaatttagcacgaacacataacatgtgagtaccgttgaattaatcgaaaaaataatatgattaaggagggaagtaacgtgccacgtaaaggacatactcaaaaaagagacgttttggcggatccaatttacaatagcaaggtagtaaccaagcttgtcaataacgtcatgttagatggtaagaaaggtgttgcccagaagattgtatacggcgcatttgccagagtagaagaaaaagcaggaaagcctgctcttgaggtattcgaagaagccatgaataacgttatgcctgtacttgaggtaaaggctagacgtattggtggtgcaacataccaggtaccgatcgaagtaagaccagaccgtcgtcaggcgctcggacttcgttggttgactatgttctctcgtaagagaagcgagaagactatggaagaaagactcgcaaacgagatcttagatgcagcaaacaatactggtgcatctgttaagagaaaagaagatatgcacaagatggcagaagcaaacaaggctttcgcacactacagattctagtagttacttattacttgtgtacaataatattaggaggaaaaaatcttggctggaagacaatatccactggatagaaccagaaatattggtatcatggctcatatcgatgctggtaagaccacattgacagagcgtatcctttattatactggtgtaaactacaagattggtgagactcatgacggtgcatctacgatggactggatggagcaggaaaaagaacgtggtatcacgatcacatctgctgcaaccacatgtcactggacacttgaggatcatcataagccaaaggctggtgcattggagcatcgtatcaatatcatcgataccccgggacacgttgactttactgtagaagtagagcgttcacttcgtgtactggacggtgccgtaggtgtatttgatgctaaggccggtgttgagccacagtcagaaaacgtatggcgtcaggctgacacttacaacgtacctcgtatggcatttatcaacaagatggataagatgggtgcagacttcttcatgtcagtacagactatcattgatcgtcttggcaagaatgcgatcccggtacagattccaatcggagcagaggatgacttcaagggtctgatcgatctgttcgagatggatgcttactattacaatgacgacaagggtgaagacattgaaatcaaagagatcccggatgatttgaaggatcttgctgatgaatggcataccaaccttgttgaaaagatctgtgaccttgatgatgatctgatgatgatctacttagagggtgaagaaccatctgtagaagatatgaagaaggcacttcgtaaggctacgatcgcatgtgaagcagtacctgtttactgtggatcagcatacaagaacaagggtgttcagaagttattggacggcgttattgagtacatgccggctccaacagacattcctgacatcaagggtactgacttagaaggcaacgagatcacaaagccatcatctgatgatgagccatttgctgctcttgcattcaagatcatgacagacccattcgtaggaaaacttgcattcttccgtgtttactcaggaacattgaactcaggttcttatatcctgaatgcaacaaaggataagaaggaacgtgttggacgtatccttcagatgcacgctaacagcagaactgagattgacaaggtttactccggagatatcgcagcagctgttggtcttaagatcacaacaacaggtgatacaatctgtgatgaacagcatccggttattctggagtccatggaattcccagaacctgttattgagttggctattgagcctaagacaaagaatgatcagggtaagatgggcgaagctcttgcaaaacttgcagaagaagatcctactttccgtgctcatacaaaccaggaaacaggacagacaatcatcgccggaatgggcgaacttcacttggaagttatcgtagatcgtctgcttcgtgaattcaaggtagaagcaaatgttggtgcacctcaggtagcatacaaggaaacaatcaccaagcctgttgatatcgacagcaagtacgctaagcagtccggtggtcgtggacagtatggtcactgtaaggttaagttcgagccaatggatccaaacggagaagaaacattcaagttcgaatctaccgttgttggtggtgctattcctaaggaatacatcccggcagttggagaaggtatcgaagaagcagcacaggctggtatcttagcaggattccctgtaatcggtatttctgctaacgtatacgatggttcttaccatgaagtcgattcttccgaaatggcattccacatcgctggttctatggcattcaaggatgctatgaagcagggcggtgcagttcttcttgagccgattatgaaggttgaagttactatgccggaagaatacatgggtgatgttatcggaagtctgaacgctaagcgtggtcagatcgaaggtatggatgacctcggcggcggtaagatcgtacgtgcatttgttccgctttcagagatgttcggttactctacagaacttcgttcttctactcagggacgtggaaattactctatgttctttgatagatatgagccggctccaaagagcgttatggacaaggttatcagcgagcatgctaactaatattatttcttcggaaatagttgaaaaaaccatcatttccatatataattggaaatagttgaattaagaaatgacatcccaaaggatgtaaatttaaggaggaaattaaaatggcaaaggctaaatttgacagaagcaaaccacattgtaacatcggtacaatcggacacgttgaccacggtaaaacaactcttaccgctgcaatcacaaaggttctttctgaaagagtagaaggtaacgcaaaggttgacttcgagaacatcgataaggctccagaagagagagaaagaggtatcactatctctactgctcacgttgagtatcagacagagaagagacattatgcacacgttgactgcccaggacatgctgactacgttaagaacatgatcactggtgctgctcagatggacggcgctatccttgtagtagctgctactgatggtgttatggctcagacaaaggagcatatccttctttctcgtcaggtaggtgtaccttacatcgtagtattcatgaacaagtgcgatatggtagacgacgaagaattattagagttagttgagatggaaatcacagagcagttagaggaatatgacttcacagactgcccaatcgttaagggttctgctcttaaggctcttgaagatccaatgggaccttggggcgacaagatcatggaacttatggatactgttgattcttatatcccagatccacagcgtgatacagacaagccattccttatgccagtagaggacgtattcacaatcacaggtcgtggtactgttgcaactggtagagtagagcgtggtacacttcatcttaacgacgaagttgaaatcatcggtatcaaggaagacgttcagaagactgttattactggtatcgaaatgttccgtaagcttcttgatgaggctcaggctggtgataacatcggtgccctccttcgtggtattaaccgtgaccagatccagagaggacaggttcttgctaagccaggttctgtaacttgccatacaaagttcacagcacaggtttacgttttgacaaaggatgaaggtggtcgtcatacacctttcttcaacaactatcgtccacagttctacttcagaacaactgacgtaactggtgtatgtaaccttccagaaggaacagaaatgtgtatgcctggagataacgtagagatgacaatcgaattgattcatccaatcgctatggagcagggtcttacattcgctatccgtgaaggtggacgtactgtaggatcaggacgtgttgctacaatcattgagtaatcaaatactttaagagtatcaattgacttgattggctcaaccctttgttgacaaggggttgagcctttttatgtgcgttcggcgaagccgacgcatgggcttaagtcattcttgtggacttgctgtgggcttattgtatcctttggacttacgactttgaaccttgtgttctgtggttgtgggtccttttctggcttatctgaggtttcagatgcaccggcagttactgtttccaacttgtgctggctctgcatcatatccaccacttcctgatgcttgtttggatacaggtgggagtaggtgcttaaagtagtttgtaccttttcgtgtcctaaccgttccgatatgagcagtgctgcgcatcccaagttgataagatagctggcgtgagtttcacgttctaaaggatacttctagaacacacaacagtttatcaatacaaccggcttatctgtaaaaacgatgaaaggacaaaaatgctatgaaacttatatatgctacatataatcaatactgcaatagtattgatataaccacctttgataatatgattttacgcattgactgtaataaggcagaggatggtttaaagaccacaccaaattcacaatgtgcattgaatgcacttgctattgacaatcctgtggaatatgctcgattggctttagcgggtgagttgcaggcatgggtggatgctgaggattgtttagatgtgtggtaaattaacagtgaaaatttcagatgaattaaggatgaatatgtggtagaataacgcatatggtagccttgttcaaaagaccatgtggagtgtatttctgtggagaaaacgattgaacggatgaaggagtaagtacagaatggaagaggttattagaaaatattttcagtgctggctggataaagatattgatgctgtaaaggggatttttagcgacgatattatttacagcgagtgttatggtccggtgtataaaggaattggacagataatcagatggtttgaggattggaaccggaaaggtactgttttgcagtgggatataaaacgtgtggttgtttctgggaatacggctgttgtggaatggtttttccagtgtgactacgagggcaatgtggatggctttgatggagtgaccgttgctgagtttgatgcggatatgaagatttgtgatttgaaggagtttcagtcgaagacagagcattattatccgtatgagaatgagtaaattcctatgtaaaagggagcgagaatgtgaaagaatttgagaatttagttagtattaaggagttacagcaacagattaatgcgtctaagttttttagcatgtttttaagcaaagagcagcgaaaacaaaagatattgaagagcaattgaacagtttgcttaaccaaatgaggttgttttctgaaagattttcgccattgggatggtgtatgtatgatagtatgagtatgcctctgattgaaaaaactaatcaggtttatgagacagagggagcagaagctgctgagtgtgttttaatagactattacaaaggggaagcaaaagataggatacaccaaatacaccataagtcaaaagagttgctgttacgttacgaacagattaaaaatgcattactactgtatattttcattcaaatgatgcgaagaatgagcaaattgcaaagttgagattgtttgggttatgataaaatttatagtatgcagttgacacagccagttaattgtcatattatgataatagagaggtctccattaaccttatggtcttgaaccatagaagagatgaacattaaagaaggtctccattaaccttcggtaatcaatccgtaaagagatgaacattaacgagtgggaagtttagtcttcccacattttttaactcaaaatacaaaggattagtattatgtttaccctagagggaaagttgacatttatcaacattgacccgagttacctcaaaaagctgcatgatgcatgctcagaggtgtattacaagccaagcggttacgagaataagccatccgcttacaactatatggagtactgaatttagaaaggttccaaactatcctccgcatccacccatgcctgcatctctccatccagtgtaagccgggcatattccagtggattgtcaatcgcaagagcattcaggcaccgctgtgaattaggagtggtccgtatcccggattctgccaggttgcagtcaatccggaggatgtagccgtcatagtggttaatggcgatactgttgtgcatcgggttatattccgcgtgtatcaatttcattgttatcagtcctttcatttgaattggaggtaaaaagcccatgggcttatttgggacttgaaaaactttcgaaatagatataataatcacaaaatgtaccattatataaaacaaaatatcattaaaaatatttagaacaatacaagttgtgatattaacagtcgtgttgctacaatcattgagtaatcataactgattatttaaaaatgcaataaaatcaaggctctcgagattttttctcgggagcctttttgcatgtgtgaatagaaagaatgttgaacaaaaatctaatgccattaatatgtccttaaaataggaattatttttctaccagaataaagcgatgtattcgacatttcataaaaaccttcccaatacacatttttatgtcatggcgggaatattgatgctcggaagaaatgaatccaaccgatcgttttaaaggtcaataatatatgagagaccattgtgacattgttctgggcgaatgaaaaaaattctatatatttcccttattgcagaggcagttctattctagtaccatatagaaaaactgttttatatgaaaaaacagtagatatgtcgtaaaaatgaaaaaaatatagaaaaagacttgaccttccactgggtggaagttgtataaagaggtcaccagacaggaagggcggaaacatgaagattaaacaagtggaagagttggttggaattgccagcaaaaatatccggttttatgaggaacagggcttgttgcaaccgagaagaacagaaaatggatatcgcgattaccgaacagaggatgtggaactgttgaaaaagataaaattgttccgcaaactgggcgttccggtggaacaaattcatagactttttcagggacagatctcggtggacgaatgccttgaaaatcagaaagcagtattgcaaaaagagcaggacaacatcgaaaagatgtgtacgctgtcgcaggccatgcttgccggatctctttccattgaaaaacttgattctgattactggctggacgaagtagaaaaaatggagaaggagggaatagattttgtgaatgtaagcaaagtcgatattcatatgaagaagaaactgggtgtatttggtggcgcaggtattatgctcatccttatgttacttgtgattggggtgttgatttatggatatgtggtagatgctgatatgccattatgggcattgacactcgtcatagtgccgatcgtggccgtcatagtaggaacgattgtcgcgatggtaagcagaataaaagaaattgacaaaggagaagaagatgaagctgctaagtattaactatattcctggctgtgaaatagaagccttggggatggtaaaaggaacgattgtacaaacgaagaatattggacgtgattttatggcaggcatgaaaactcttgtgggtggtgagattgtcggctatacggaaatgttaaatgaagcaagacagatcgcagttaagcgcatggtggatgaagctaaggaactgggcgccgatgcagtgatcgatgtaaaatatggttcatctcaggttatgcagggagcagccgaggtgatcgcctatggcactgcagtaaaaatcattgaaaaatgatgcgggaaatatggggagtaattatgtgtaaatgtccttctattgacaaacttttatctccatattaaactatatgtatatagttagtaacaactaaccacgcgagaaaatgtaatttacaagttatacaaaacactaagtatcagcctacatatagaaagcgcaaacatatgaacacaaatcttatcacaggtatactaataccatttgcaggcacatcgcttggtgcagcatgtgttctgttcatgaaaaaaggtctgaatgaacgaattcagcgtgtgttgacgggatttgccgcaggtgtcatggttgcagcctcaatctggagtctgctgcttccggcaatcgagcaatcagaaagcatgggaaaattgtccttttttccggcggtagtcggtttctggatcggtattctgtttctattgcttttagatcacatcatcccacatctgcacatgaatagcacaagtgcagaaggcccccaaacaaaccttggtaaaagtgccatgatggttctggcagtcgtattacataacattccggaaggcatggcagtaggcgtcgtttatgccggttggaatgcaggaaacagcggcatcacattgactggcgcactggcattgtctatcggcattgcgatacaaaatttaccggaaggagcaatcatttccatgccccttcatgcagaggggatgagtaaaagaaaagcttttatctacggtgttttgtctggtcttgtggaaccgatcggcgcgatcatcacgattttagccgcaggtgttattataccggtactaccatatttattgagtttcgcggccggagccatgatatatgttgtcgtggaagaactgattccggaaatgtctgctggcgaacattccaacataggaacgattatgtttgcggtcggttttacggtgatgatgatgcttgacgttgcgctggggtagaaaaatcgttgatgagtgcaacaaatatgaagtgagaaaagaaccataaaagatgaagtacagggcaaggaatttgccccttttttcgttgacataaagtgtatttgagcgtatcattatatacaagatctagtatgattatttgtgcagtcatatataatatttcattcacgacaaggggaaaagtatgttagagaaactagagaaaatgaggattcaaaaaaggttgacagtgagttcgctgatcactgttttgattgccagtgtggcagcgatcatcgcagcgattctcttatttgtggttgcatcgcagtacaataaagtattgacgaattatgcattccctcagggagatatcggacaggcgatggcagatctggcagatgttcgaagtgcaacacgaggcgcgatcggttacagcgaccagagtcagattgatcagatggtagagattcatgatcaggcagtggaggacttacaggccgcattgccggaaatcaagaaatcaattgttgccaaggctggcgagaaagattacaataatattgtcgcaacattggataattacttagaagtggatgccaagattctgaaaatgggtgcaacaactgacgcagaacagtcaaagaaggcacaggatgctgcttttgatgaactggcacctgcatatgcaacagcctcagaggcatttcagggtttgatggatgataacatcagtttaggtgataagacacattcatctttgcaaaagatggaacttatcatgttgttgctgatcattgtgatcattgttgcagcatgtatccttgcaaccaagatcggcggcaagattgccaaggatatcgcacagccgatggatgatctggcaaggagattagagacattcgcacagggtgatctgacatccccattcccagagtatcacaacgatgatgaactgggcgaaatggtacagtctgttacagatacaacgactaagttgtctgttatcttcgcagatatggagaacttgctgggacaaatgagcaatggtaacttcaatatccaaacttcctgcgaagaagaatataccggagacttccgtccacttctggattctatccgtgagatgaagatccagatcgatggaactttgaaggaagtccgtgaggcttctgaaatggtatctgccggagcattgaacctggcagaggcatcacaggctttggctgaaggtgctacagatcaggctgcttctgcacagcagatgcaggctaccattgatgagattaccaatggattgaacaatacagtagatcagaccaatgacgcatatgcagaagcagagcgtgttgccggtgaggcagagagcagtcgcaacgaaatgagcgtcatggtagaggctatgaaccgcatcagtgagacatctgagaagattggttctgtcattacagaaatcgaagatatagcaagccagacaaaccttctgtctttgaatgcttctattgaggctgcaagagcaggtgaagcaggtaaaggatttgcagtcgttgcagatcagattcgtaccttggctgagcagagtgctaagtccgctgtcaataccagagaactgatcgaggaatctatccgtgagatcgaagttggtaacaaggcagcagagagaacagaaaaagtcttggttgaagtagtagaggctattcatcaattggcagataactctaagggcatcagtgagacatccgtacagcaggctgagtcaatgggacaggcagatgcaggtgttacacgtattgcagatattatccagtccaactcagcaaccgcagaagagacttctgcaaccagtgaggagttgtcagcacaggcaaccagcatggatgagattgttgcaagatttagtttgacagaagaataaaagagttactataataactgttggtgcataagcgccagcagttatttttttgtgcgcaaaactgcacatactatatctatgaagtataaggaagaagaaatgaaatttttaaaacaatttttgatcatcttagtgatcacttttatgggggaaggtctcaagtatctcttgcccctgccaatcccggcaagtatctatggcatggttctcctgtttcttgctttgatgacgagaatcgtcaaattggaatcggtgcgtgacgcaggcaagttcctgattgaaatcatgccggtcatgtttatcccggcgggagtcggattgatggtgtcctggggtgtgctcaagcctatgttgctcccggtcagcctgattacagtcgtcagtctgatcactgctgctgcggcgacaggattggtatcacaaactgtgatccgaaaagagcagaaaaagaccgaaaaagcagaaggaaaggagcaggcagatgaatagtttttttcaggaatctttatttgcgggcgtgactatcagcctgcttgcttatctggcaggatcctttttaaagaaaaagtttaaactcggcattctaaatccactcttgatctccattgtgatcacgatcttggtcttggtggtcgcggatgtagactatgacacttatgatgcaggtgccaaatatctgagttggtttttgaccccggcaacagtctgtcttgctattcctttatatgagcagtggcagcttttaaaaaggcattggcgggcagtacttctgggtatcctggcaggtgtttttaccagcatgggaaccgtatttgtcctgtctcttttgcttgggttgtcccaccaggaatatgttacactcttgccaaagtcgatcacgacagcgatcggtatgggactatcggaggagttgggcggctatgtgacgatcacggttgctgttatcgtggtgaccggagtcttgggaaatatcatgggcgaagccatttgcaagatctttcgcattacagatcctatcgcaaagggattgtcctttggagcatctgcgcatgccattggtacagccaaggcaatggaactcggagaggtcgaaggtgccatgagcagtcttgccattgcagtcacaggtctgcttaccgtggtattttcatcggtatttgccggattattataggagggaaaacgtatgattataacattagcgcgcgagtgcggctgtcagggagatttgatcggacaggaacttgcaaaaatgtatcaactcccgttttatgatcggaaaaaagtgagcgatttgatccgtagcaagggtacacttgatcgtttcccggatttctatggtgaaaatccggtggataccttgtcgtatagtattttgttggctgaggatgatcaggcactttacaaacgaccaaagcaggcgctgggtgagattatgcctgaggacgactttattttgttggggagatgtggcaactatgcctattgtgatagagaggatgcgcttcgcattttcctgatggggcaagtcgagcaacgtgtagaaaccattgcaaaaaaacacggtgtttctgtgcgcaaggcaaaagaaacggtcaaagaaacggatgagagaagacgtgcatatcatttgcgctataccggacaagattggggatacgccggtaactacgacctgtgcttaaatgttagtcgccttggcacccagggggtaatggaagccatccagacggcagttaggacgatcacagatcattaggatagaggcgcacttgtgcgattatgaagtctgtcacaaacgatcgcatctgacataagcatgtgtctggggtcattctttatttttgtgcttgctgacaaagtaggcgccaagccctgcggcgatcacaatgatggcaaaactaataaccgcgatatggtactgggcattgctcagagcatgtccgctgaggacggacaggataatggcgggcagtctgccgacaaaacaaataaagagccagtgggaaacggagatatccgtaagccctacaaagtaggagagcagatctttgggcgttcctggaatgaggaacaagagaaagaggatgctctccatttttttgtgatcttttaagaaagtcaatttttccaattctgtatcttcaacgaacagatgcaggaatttgtgtccgaaacggcggacgaggaaaaagacaaccatactgccaagggtggtaccgatggcgcagatcagacttccttttacaatgccgaaagcatagcctgctgcgatctcaaaaggaccacccggaatgatggcggcaaagacctgcaagaccagcataccaagaaagaggagaacgccgacaaaaccctgtgcatctacccatgcctgaaaggctcccggctcggatacaaaggcaaccagcggtcgtcccatgtagtatgtgataacgaagaataatataatagccagtatggaaaaaaatctttgtacgtgttttttcatgatgcctcccatataaacgtcttattatggtatattttagcacagattatgggaagtgtatggcgaaatgaaattcttaataaagattttagaaacacaaaacccaaaggcaattgatgacaatataaaggtgtaagggaatcttgcatcgatgtgagaaatagacaaaaaggataatcaatatgaagcaagcagaatttgagcagtttgtcgaggcagagggaaaagatatcctccgcttccgccggatcttgacagcaagccaaagacaggctttggaggagatcctgagtcaggttgtgatcgattgcagcgtagaatatacggatggctccagcgcatccatgagtgtatcaccttctgtaagaatcgcgttgaatacgcagacagcagaagatagcggaagcgatttcgagaatgaatatctggaggtaaccatacaaaagcagtaaaatagttcataaaaatgcacgggaaaacctggaaaaactttaaattattcacaaaattgcagatatcgtggaataattataagaaaatttgttgacattgaaaaaaaccggtggtaatttaagaacaaacaaagagtaaatgcaaggaacagaacaagatcatgaggacatctcatacagtgcagagacttgtcggttggtgcgagacaaggtatggttcttttgattatcctctgcgagcagtgcgctgaataccttcctggtcagtaggtgccaccggtttccaccgttatatggagacttatttctgcaagatggattgcggtgatgaggttgagaggtcacattttgtggcaattaaagtggtaacgcggaagcatagagccttcgtctttagtgagtgctaaagacggaggcttttttagtacatagactctttgctagaaatttttagaagggagccgcgtgagcgcggaaaaagacatgaatggattagttattgttttaatcggaattgtagcacttggcgccggctatctgttttatggaagatggctggcaaacaaatgggggatcgatccaaaggcaaagaccccggcgtacacacatgaggatggagaggactatgtaccgtcatctaagtttacggtattttcccatcaattttcatccattgcaggtgcaggtcctgtcaccggaccgatcttagcatctgtattcggctgggtgccggtactcctttggttgattatcggaggactctttttcggagcagtacaggactttggagccttatatgcctctgttaaaaatgaaggaaagtccatgggaatgatcattgaaaagtatatcggcaagacaggaagaaagttgtttatgcttttctgctggctctttaccctcctcgttatcgcagcctttaccgatatggttgccggtacctttgtaggcaagggtgtggctgacatgagcgaaacgacagcatatgcagattctgctgccgcttctatttctatgttgtttatcgtagttgccatcatttttggcgttattcaaaaatgcgtcggacagatgaaagagtgggtcagagccgttcttgctatcgcacttttggtcggcatgtttgcactgggtatgcatttcccgatctatgcaaccaagacagcatggatctacatcatcatggcttacctctttttagcatcggttatgccaatgtggcttttgatgcagccgagagattatatgacaacctttatgctattgggcatgatcatcggtgcggttgttggtgtcctcgtcgcacatccgactatgcagctcaatgcttttaatggctttaatgtagacggaagttatctcttcccgaccttgtttgtaacgatcgcctgtggtgctgtttccggattccacagcctggtatcttccggtacatcttctaagacgatcagcaatgaaaaagatatgccgatggttggctatggcgccatggtcgtagagtcactgcttggtattgttgcgctggttgttgtaggtgccgttgccgtcaatggtacaaagccggagggaacaccattttccatcttttctaccggcgttgcaggtttcttggaaaaattgggattgccggtacaggtggcaaccgtatttatgaccatgtgcgtatctgcactggctttgacatctctggattcagtcgccagaatcggtcgtatgtccttccaggaacttttccttggagataccacagatacgtccaaaatgccgggatggcagaaagtgctcaccaataaatattttgcaaccgtcatcaccttattctttggttatcttttgacactgggcggatacaacaatgtatggccactctttggttctgccaaccagttgttagcagccttggttttgatcgcgctttctgtattcttaaagacaacaggaagaacaggctggacattatacgcaccaatgtttattatgttagcagttacatttacagcactgatccagaagaccattgctctggttcgcaatatcgcaagtggtcaggcaaccttcttagtagatggtctgcaatttatcgttgccatccttttgatggtcttaggtgtctgtgttgcattttcttgtttgaaaaaattatttggcgcaaaggaagaagcgcaggcataatcctttgcaaaaggagactggtaatgaaaaaaaagtggtatcaggcagattcttcggtcatgacaggcgatgtatcggtggcagagggtgtcagcatatggcataatgcgacgcttcgggcggatacggcgccgatcaggatcgggcggaacagcaatgtgcaggataatgtctgcatacatgcaggagacgggtacccggtagaaatcggagaaaatgtttccattggacacggtgccattctgcatggttgcacgatcgcggataatacgattattggtatgggtgcaattgttctgaatggagcacacattggtatggattgtatggtgggagccggcgcattggttacccagggaatgcaggtggcggatgggagtcttgtgttgggaagtcctgcaaaacgacaccggatgttgacagcagaagaaatagaacaccagcatgaaaatgccttgcattacgtaaaggcaggtgaagaacaattgagagaaaaagatgtgaagcaaagcaataccggaaaaatgcaagcaggctatgaacgccttgcaaaaaatctcatggactttatctgggaagaacagatcaaactgggctatcggtgggaggtcatccgcctctatttccccctgacatccctttgccatttctttggcaggcagatgagcgaggaagaaatgctggatgtcctgcatgccttgccggaaacggtgacccagacactgggaaatgtccgttgcagcagcaaacagggacgcttttgtatcgagatcccggaagaaggtgtggcatatgtgcatgcgaatatgcacgatgacggatttttagaggaactggtcgctttggtgcagacgcatgattgcagtagggagaaactcttgactttgtttggcaaatatagtcaggcggttgagatccaggatatgcaggatgcagactttgattatgccatccattgcaaagaccgcgagaacgatccttattattattgttttcatgaggaaggttgtcatatcatttatcatcgttttacaccagaagactatgcagatctgatttcgtaaatgatcaattgagatttgataatctgaattctatacaacacaacgcaattcttataactgctcttgtatcttcacaaatacaagggcagttaaatttttcccactattcctattgacacgataggaatagtgggatataatcggaaacatcgaaaagaaaaggaggcaaaaacatgaaagtgttacatgaaaaaacaacgcgatgtatgtgctacgcacgaatgcagagctctcaagcagaatcagaaatggagagatgcgactgttgttgttgctctattttgatgtaagacttttgcggttttgcaaattcggtttgagaggcaatacgccggcgcttgagacagtcaggtgagttacgagtcacaaggccaaagatcgtgcgtagtataagatataggaagataaaagagaaatttactaattacaaaaaggagaacttaaaatgaagaatttgaaaataaagaaattattagcagtggcagtagccggtatcctgaccgtaggattggtagcatgcggaagttccaattccgacagtgcgaaatcagatacagcaagcggatctgatgcagcatcagaaagttatcgtaccttagacgagatcaaggaagatggaactatcaacattggtgtattttccgacaaaaacccatttggttatgtggatgagaacggcgactatcagggatatgatgtttactttgcaaaccgtctggcaaaggatcttggcgtaaaagtcaatttcgtatctacagaggctgcaaaccgtatcgaatatttgcagacaggcaaggttgacgttatcttagccaactttaccgttaccgaagaaagagcacaggaagttgattttgcacttccatacatgaatgtagcacttggtgttgtttccagagaagacaatgtgattaagagtctggataactggaataaagatgattccatcattgttatttcaggaacaaccgctgagacatatctgacagagaattatccggatatcccattacagaaatttgattcctatgcaactgcaaaagaagccttccagaacggaacatctgttgcatgggcaaatgacaacacagaagttatcgcatttgcacttcagaacaagggttataccgtaggtatttctgaacttggcaacaaggatacgatcgctcctgcagtgacaaagggaaatgacagccttcgtgagtggatcaacagcgagatcgagacattgggacaggaaaacttcttccacaaagattacgaagagacattagtagatacttacggaacagattatgaagacagccttgtagtagaaggtggcaaaacagagtaagtaagaatttgaaaaatacaggaaaggagaacgcgataccatggatatagcatttatgacaaagtatttaccaatgtatgaaagagcggcagtgctgacagtcaagatcggtctgatcggtatcgcattcgctatcctgctaggtctgatctgtgccatgattcagtatcataaggtgccggtcgcaagacagatcgtagccgtttatattgagatcagccgaaatacaccgcttttggtgcagttattctttatttattatggctttccaaagatcggcatcatgatgcagccggagacttgcggtgtcgttggtctggcattccttggtggatcttatatggcagaggctttccgcagtggtctggaatctgtagcaaagatccagagtgaaagcgccctcagtcttggcatgaaccgtgcgcaggttatgcgttatatcgttctgccacaggcagtttccgtcagtattccggcatttgtggcaaatgttatcttcttattaaaggagacaagtgtattcagtgccatcagtttgatggatctcatgtttacggcaaaggatctgatcggactttactataagacgacagagagccttttcctcttggtagtattctacctgatcatcttattgccggtttctttgcttggaacctggctggaaaggagagtgcgctatgctggatttggggattgatgtcctttttaagggaagcaatatgttgcgcctcctgtccggtctttgggtggcaatgaagatcagtctggtttccattttgatcagcctgcctctgggcgtcttggttggtgcgctgatgacagtaaaaaaccgtatggtaaaagtaattttccgtgtctatctggagatcatccgtatcatgccacagttggtcttgttatttattgtatatttcggtacgacacgagccttgggctggaatttatccggcgaggttgcatccgtgatcgtatttgttctgtggggaacggcggagatgggagacctcgtgcgtggggcactcatcagtattccaaagcatcagtttgaaagcagtgaagccttgggacttaccaaacgtcagacctatatttacattatcattccgcagacgatccagcgtttgatccccttgtcgatcaacctgatcacgcgtatgataaagacgaccagtctggtgctgatgatcggtgttgtggaaatgttaaaagtggcacagcagatcatcgaagcaaatcgtatgaccagcccgaatgcggcatttggtgtctttttgatcgttttcattttgtattttttggtgtgctggccgatcagtatgctggcgagataccttgagaaaaaatggaacatagcctaggcgtaaaggaggaagtaaagtggcagaaacattacttcaggtaaaagatctgataaaagaatatgagggcaaccgcattttggacggtgtgaatttagagatcgaacaggggcaggttgtcgttgtggtcggaccgagtggttgtggaaaaagtaccctgctgcgctgcatcaatgcattggaaccgatccagggaggtcaggtcatcttagagggcaagaccgtaggaaaagacaatctggaagagttgcgtcaaaagatcggcatggtgttccagagttacgatctctttccacatttgagtgttttagacaatatcacgatcgcaccgatcaaggtgcagaaaagaaaaaaagaagaagtacaggcggaagcaagagaattgctcaagcgtgtcggtttggaagataaggcaaacagttacccaagacagttgtccggtggacaaaagcagagagttgccattgtgcgtgcgctctgtatgcacccggaaatcctgctttttgacgaggtgacagcggctctggatccggaaatggtacgcgaggtcttggatgttatgctggatctggcaaagcagggcaggacgatgatcatcgtgacacacgagatgcagtttgccaaggcagttgcggataaagttgtatttatcgaccagggaaagatcttagaagaagcagcgccggaagaatttttcaccaatccaaagacggaacgtgcaaagcagtttttgaatgtcttccagtttgattaaaaagaaaataaaatattatgtatgccaataaaaaagagttacaggttggcagatatcttgtgaaagaatctgcctagaaccggtaactctttttgcatatgaagattttatttcaggacgttaattccgactgcggagagcgctccgatgatgataccggcaagaagaacgccgcccataacggagatcgtgcttttcttgaaatccatatcaaggaaagaggctgccagtgtacctgtccatgcgcctgtgcccggaagtgggatacctacgaacaaaagcagggcaacatagagtccgcgtccggcttttgcctgtaactttgcaccacccttgtgaccttttttcagacaccaggtaaagaagccgccgatgatcggcttatctgcgccccactccagcacctttcttgcaaagaagaaaatgatcggaaccgggagcatattaccgatgatcgagataatatatgcctgaagaagcggaaccggtgggttacataggagtgtaccatagggaatcgcgcctctgagttccacgatcggaaccatggaaataaaaaatgtgatcagataactttttaacattgtatcctcctaaaaatgcttaactatgtaaatgatatatgataagagggaagtttgcaatggtttttatcttggatttgaagcatagatctatctataattacgcccgatcgtgcttccaccatccactaatacatcgacaccggcaagatagccgttacgttcatcagcaacagaagcgatcgcaaagccgagttcttccggcgtacccatgcgcttttccgcagccgtttctaggagcgagccgccttctttggcttccagatttcccatatccgtagcaattagtcccggactcaaagagcagacacggatgccttttgatccgtaatcaaaagcgcatttggcagcataccagatgacgaatttcttggacagaccgtaagccagaccggaagacttgtaatcatcttttagcatcttaggtagtttcagacatttttttaagaagagatcttcgtcggtatcagccagagtgaaagtctttttatttgccagaaatcccgggatcatataggcggaattggaggaaatgtcaacgatcacgctacctgctttcatatattttgaaaactcctgattgatatagacggtgcccagtgcattgacgcggagcagtttctcaggatctgccatggcaggggaaagcccggcggcatggatcacatttttgatttcgcccagttcggcggcatatgctgctaactcctgcacctgagaacgaattgaggtgtcgcaggtcttggcataggcttcgtatcctgcttcctgtaattctgttacggcacgttccaattttgccagtgttcgccctgttacaaggatgatcttttccttaggcatatattttgcagcagccagtcccatgccactgcccccaccggtgatcacacatacttcttttttcatgataaattctccttataatacggcatgcggtatgccgtttgttatctttctatgccctagcatagaacttttatgtttaaaaaatgttaaacagattttttatattatgagattttttccgcaatctgctgtctaatatatgtaaggcgaaaacgaaggacgcttcgcacacgctttatagaagcgcgcgaaaggactatgaaatgtcaaagatagaaaatggatatttaattgaccaggcaaatgaagacaatgcggtaccgaccttctttggggtaaaattaaaagatggcagtctcttatacccattggcaaatggcggaaattacggctatacggatgacagtcagactgcctatgaaagcctgtttgctttggatcgggtgatcgaagcagatcaggtggaggcaatccttttacaaaagaattatccgaagacagatgccgatggcggggcgcattatgaagaaagtgatttcttcgtgattccgctacaataacagaagaaaggaaatctttacaaacattgcaatttcaggcgctttcgtatatcataaaactagatttttatggtatgcggaggcgttctttttatggcagataataattgggatgatttgggcgaagaattaaaagatgcggtcaatgatgcgatcaacagtggagactttggagatttggcgggttccatcggagatatggtcaatggcgcactctactcatttagcaaaggggtatcttcctctatgcgcgatgtctcccaaagagcaagtgacagaaatcgtatggcgggtgatatgggacgcatggctggagatatgggacgtatggcaggcaatatggggcgcatggctggtggcatgggcagagcctttgggcaagccgcagcccagatggcaggcggtgtggcgcagatggcaaatgacatgagcgcacgtcagcgcgcggatatggcagcaagtcagggacttcctctttatgacaagagcccggcaaaggcatcctgtgtcctgatgatggcgatcggttatcccctcatgggtcttggtattttcttttcagccgtgatggcattcgcatttggcgttgccggatcctatttcctggcaccgctgatcttattccttgccatggcagtcggcggtacggcattggggatcggtggcaccaacaggtttaaaatgctcagccgtttttcaaaatatacctatcgtttggaggaacatgcttacatatccgtggaggaactggcaaaaaaggttggcaaatccgtagactataccatgaaggatctggagaagatgatcggacagcatcttttctatcaggcacacctggactatgataataaatatctgatcttatcagaccgtacttatgagcagtaccagatggcgcgtgaggacttcaaaaaagagcaggcagagaagaaagcaaaagaggcagaagaagacaagttgccggaagaatgtcgcaaactcattgcggagggacagcgttatgttgcccatatcagagagtgcaacgatgccattccgggtgaggagatctcccgcaaactggataagatggagcaactggtacagcgtatttttgaagaagtcaagatccatccggaggtggcaggagatctgcacaagatgatggaatactatctgccgatgacggagaagttattagactcttaccgcgaactggatgcacagccggtagccggtgagaatgtgaccaagaccaagcatgagattgaagatgccgtagattcattgaacgtggcatttgaaaaattgctggactctttatttgcagaccgtgcatgggatatttcttccgatatctcggtgctcaacactatgttggcgcaggaaggtctgaaagaagacgatttttcagcaaagaaatagatcataaataaaaaggacaaggagaagagacatgggagaagaatttaaggattttacgacaacgcctacactgacatttggagagacaccggacacgcaggaattgccgagcacagtcgcagaggagacagaacttgtggcagattctgcatttaacgagaacaatctgacagcagaagaaaagaagatggtcgaggacttttcacagaagatcgatctgcacaactcacaggctatcttacagtatggcgcgggaacccagaagaagatggctgatttttccgaaaatgcactgaaaaatgtacgcaccaaggacatgggcgaagtcggagatatgttatccggtctggtcgtggaactcaagagttttgagatcacagaggaggacaaggggattttaggactctttaaaaagtctgccaacaaagtgaccggactcaaggcaaagtatgacaagacagagaccaatgtcaacaatgtatgtcaggcattggagaagcatcaggtaacactgatgaaggatattgcacttttggataagatgtatgatgccaacctttcctatttcaaggaattatccatgtatatcattgccggcaagcagaaactggaagaagtcagaaatggggaacttgcagaagccaaggcaaaggcacaggcaagcaatctgccggaggatgcacaggcagccaaggatatcgaggctatgtgcgatcgtttcgagaagaaactgcatgatctggaactgactcgtatgatctcgatccagacagcaccgcagatccgcttggtacagaacaatgacaccatgatggcagaaaagatccagtcaacattggtcaacacgattcctctttggaagagccagatggtacttgcccttggtatcgaacattccaatcaggcagccaaggcacaacgcgaagtaaccgatgttaccaacgaactgctcaagaagaatgcagacctcttaaagactgcatctgttgagacagccaaggagtccgaacgtggtatcgtggatatggagactttacagcataccaatgagaccctgatctcaacctttgatgaagtcatgaagattcaggaggatggacgtgcaaagagacaggcggctgagcaggaaatgcagcgtctggagacagaactcaagaacaagatgttggaagttcgcggataatatagtataggatgtaaatgccatgcgcaagactttttgcgcgtggcattcttgtttgtctaaaacgaaaaaacaggcatagtttttacaaatgacaagaaagaagggacacaagatgcttactgttttaaaagtgataggaatgatcatcttagttattgttgtactttatttactcatgatcatgccgcgcatgataaaccgtccggattttacaccttttcaagggcgcttgtatgcccaccgtggtttacatgacaatgagaccaacgcaccggaaaattccctgaatgcttttcaaaaagcagtggatgccggatacgggatcgaactggatgtgcagttgaccaaggatgagaagatggtcgtatgccatgattttgacttgaagcgtatctgtggggcagatgtcaaggtgcgcgacctgacttttgaggagttgcagggctatcatatctgcaagtctgatcagaccattccgacctttgaggaagttctgcgcctgattgacggcaaggtgccgctcattattgaatacaaggtgcctggcatgagcgccaaggtatgcgagatggcagatgctctgttacaggactataaggggctttactgcgtcgagtcttttcaccctttagccgtgctctggtatcgccgcaatcgcaaggagatcgtgcgtggtatcttatccgactcctatataaaggagggcatgactgacatgccaaaggttgtttatggcattacccatcatatgctggtcaatttcctgatcagcccggattttattgcctaccatcataagtattataaggatctgtcgcgcactttatgtcgcaaactctatcacgcaccggcagtggcatggacgatcaagagccagcagcagttggaagatcgtaaggatgatttcgacatctttattttcgactctttcctgccaaaagacggaccggtctttaaaaattaggcaaagataagcaatattccgacagaaaaacaaaatatctaaaagcacaggacttgtggactcctataataaacttatcgtatcagaaaaatgacgagtttcgttagagataagcaaaaaaggagacaagtatgaaagcaatcagattacgttgtgaacaaatggaaaatccattggggattgatgtgcaaaagccatgtctttcctggatctgtcaggatggtattcatcagactgcctatgagatcgaggcaaagaccggtgaagatgtcatatacaacagcggcaaggtagcaagtgacagcatgaatgtcatgctggatgcagatcttgcaagcaagcagcaggttgtctggcatgtgcgcctgtgggacgaaaaggatgtctgcggcgagtggagtcaggatgctcattttgagatggggattatcaaggcagatcagtttgtggcaaaatggatcaacccggagggacagatcaatacggacgagatgcagccggtatcttatctgcgcaagacctttacttttgacggaaatgccaaagatgcaagagcctatgtcagcgcacatggtatttatgaggccaggattaacggcaagcgagtgggcgattttgtccttgctccgggaacatcttcttatgacaagcagatgccatatcagacctatgatgtgacagaacttttggaaaacggagaaaataccattacagcagaagtggcagatggctggtatcgcagttattccggcgttgatggagacagaaatcttttcggtaccgagcttgcctttttcttccagttggaaaatgccggacaggtcatctgtatttcggatgagacatgggaggtttcccaggcaggaccgcttcgtcaggcagatatgcagatgggcgaggtctatgatgcaaataaggaagacattacggattggcatggcgtaagtgtagtggatgcagacaatagtctatttaaggcgaccaacagtgtcccggtgcaggaacatgagcattttgaaggaaagatcatgacaactccaaatggcgagaccgtgatcgattatggacagaatttggcaggttatatctgctttaccttagaggcgcatgaaggcgatcgtcttgtcctgacacacggcgaggcactggatgagaacggcaactttacggcagagaattttcaggatcgcaagcgtcataagggcggcggaaccgagcagaaggttaccttcatttgtaaagagggaacgaatacctatcataccaagttttctatctggggattccagtatgctaaggtggagactgatatcgacctgagtaccgcacattttgaatccattgccgtgtattccgctatggagcagatcggacatttctcctgtggcaatgcagatgtcaaccagttggtgcacaacagtatctggagccagaagtccaacttctgtgatgtgccgacggattgtccgaccagagagcgtgccgcatggacgggggatgccggcgtattcgtagataccggtattttccttgaggactgttacagtatcttccgcaagtggctgggcgagtgccgccttatgcagtacgatgacggaaagattgcaaacattgcaccgctgaacagtaagccaagtttcttctcaggacttttgtcaggttcgacaggctggggcgatgcttgtatcatcgtgccatatgctctttacaagcgttatgatgatgtgcgtattttggaagaaaattacgatatgatgaaaaagtggtacgctttcctcgaagatcgtgccaagaaaaaggacatcaagaagatctttaagaaaaagagcccatatcgcgattatacgatcgagacaggtatcgactatggcgagtggtgtgagccaggcgtagactctgcttccttgatgggaaagacaccggttgactctgctactgcatattttgcacattccggtaaaatgttatccgagatcgcacagatcttagggcatgaggacgaggcaaagcattacgcagaagtttccgagaaagcgacccttgcttttcgtgatgcggcaacagagaatggtaagatcataggtgagcgtcaggcaccatatgtcagagccattgcctttgatcttttgacggaggaagacaagaagcaggcagtcgaagacctgaatgctcttgtagtaaagaatgattatcatttgaacaccggcttccttagtacgccattcctttgtcaggtcttggcggaaaacggacataccgacacggcttatcgtctgctcttgcaggatacggcaccaagttggctttatgaggtgaaaaagggtgccaataccgtctgggagacatgggatggtatcaacgaaaaaggggaagtgcatgcttctttgaaccattattcctatggtgcgatctgtggctggctctttggtggtgtctgcggtatccacttagagaataagcatgttactatccatccctacccggatgcatccttggggtatgcgcatgcggagtatgtctctccggttggaaagatcgtcagtgcttggaagtatgagggagataacatccattacaccttcgagatcccggcgaacgtgacagcggaggtctacttagaggacgggcagaaagtgaccttggaagcaggaaaacatgagattgtatcaaagtaggattgcttcacaagagtatagagaaatgataaaaaggctgtagcgttttgctacagccttatgttttgtttacggtattcacccggtgcgattccggcaatcttttggaaagagtccgaaaaataagatctggaattaaaggataattcaatactgatatccaaaatgctcatattggtcgtactgaggagcaccttggcgcgttcaatcttttcacgcatgatgtactcggtaatggtacagcccatttcctgcttgaacttgcgggaaaaatagtattcggaataaccggcgcgctctgccagatcaccaatggaaagtttctcattgatatgcacgccgatataatcacaacagtttttgacgatcggtgagatgccgtcggtgtgtttggcttcgcaaactttctggaaatagactgtttgcatttcttctataacagtaccgttatcatccagagaaacggagtcttcaatgcgctgcccgtaaaagtcacaaagatcataggctacgtttggagagacaccaccctcaatcgcggcgcgcgagatcagggtcaaaagcacaaaggcattgtttttggcggcacgtagactgtttttgggattgtgcttgaccccattactcagatgagatgagttctgcagagccttgctatagtccgggtttccatccttgaaaagacgcaaaaattcctgctcggaggcccagatgccgtgatgctgttgcgatgatggaacaatggaaggattttcgtagtttcctttgttctgtacgctctcgatggtgtttatatcaatggctgttccgctgatcagatagtgcaattgactagcataactcatcatgacattgcttgcaacaatgggaagagaggtcagcagtttggagacgtttgcctttgtcttgatggacaggttgcgctgatccatagcctttaccagttcgttgtaggaattttctccggtaaaggttggccctaagacatagaatttttttaattggttgtcaacaatctcaaagtcaatcagccaggcaaggttgaaaaaggaatagataaagcgaggatgggagggcaatccaccgtttaatgcagggggaacctgcagttggaacaaagcatcaaaaccctgatagtcatccccgggataggtggtaaaaagcatctgcatatgctcatcatagatccagccaaagagattgttggtatgtaagagcaaatccatataggacttgatctgttcgtccttggtcatgcttagtcctcacataaaaaatcggccagaaggctataatcttcctcatttacacaacggacagagccgttttccaatatactttcttttcctgcaatggagcagaaaacatactgactcagtgtagatgcaagattcaggatatctccctcattagaatcaaaaaacacgtcgtttttgcatgcttttactgcgatcagaaacttggctaaatcggtatctttttttaattttctcatgataaaatcctcctatcaaaaagaatgcacataggtgcagcatgaaatcattatgattttaacacagatcagaaaaaacgtgaagaaaagatgacgaattttctgataggaaatacaaaatctggtcgaaacaatgtaaagaggcagataaaatagtataggtaaaaaaagatttatagatttttggaggaaaggaatatggcaataaaagcaatacagcagtttcagttgcgcaccgtgatcggtacagaggcaaaggcgaaagagactttgcgcctgatggaagaggcaggatacgatggcattgaactctgtagttatatgataaagcatatgtcgcttaccatccgcgcaatcacacgtcttgcaggcatgccgatgggaaagagtggaaatctggactggcatgcgcttctggcagatacaaatttaaaggtagtcagcatccatcaggatctgggaactttgaaacgtgttccggaggaagccatcgcagaggcaaaatcctatggaacaaaatatatcgttatcaccggaatgcatcattttgattattccgacaaagaggcagtggatgaattgatcgcagatctgaatgcttgtggaaaacgtctgaaagaggatggcatcgaactgctttaccacaatcacaactgtgagttccgtaagattgatggtcagacggcttatgatcgcatcattgaaaacacggatccggaatacgttaattttgagtttgactcttactggccgacagaggcaggtgttaataccgtagaactcatgcggcgtctgggaagccgtatcaagttgtatcacatcaacgacagaggcagccgtgtagagggaaagacttcctctattctgacctcagacagtatggaactgggttacggcaatatggatttaaagaccatggtcgatattgtgaaggaaaatggtgtggatgctgttgttctggaaagtcataagaattgggtagataaatctccgatcaagtccttccagttgagtgccaagttcatgaatgagaatgtctaaactttagttgcctatcacacgaaaagttgttaaaataaatctatatgagttcgtgaggtaggggatatatgaaaaaggttttattcgttggacattttaatgaccagacaaagcagatacaaaaggagttgtcaaagtttgtctctatccagttatgctcggacaatgtgacgatcgctgagagcatgatgggcatttatgagccggatctggtgttggtaaatgtcgagggatttacggacagtcatctggaatttttccagatcttagcagaaaaatatgtgatgactcctgttgttatcattggcagtgaggcggcatatcgccgctatgctctttatgatatgtcagggcaggtatcttacgtggatccgcaggatatggcggaaaatggtgtcttggaggcgctgatggcacgcgtggacattgatgcggaggtcttgccggatggctcgatcgtatccaaggatgaccgaaagatcgtcttggtggtggacgacagtccgatgatacttcgcagcatgaagcagatgttagaggaacgttatcaggtgacacttgccacttccggccagcaggcacttaccatgattgataagcgccagccggatctggttgttttggattatgagatgccggattgcgacggtaaggagaccttggagttgatccgctcaaaggaagcgaccaaggatataccggttgtttttctgaccggacatggagatgcggagcatatccgttctgtcttggatctcaacccaagtgcatatttcctgaaaccgccaaaggcagacaagatcctggaggtcttaggacaattattataaatatgacaggctgtattccccgagaggaagtacagcctttttctgcgttgtaaaaagaggagagaaaggaaatcagtatgaaatgcttgagttgcggtaagaattttgatggcgaaaaatattattgcatatgtcctaagtgtggaacttacaacaagccggaggataagacaagtcaaactttgccagaagcggattttatatatgaggagccacaggcagaggctgatagggaggatgcggtaaaaagccctgatgttgatatcacaaagactgctgcctctgtgccggacgcacaagaaacaagggaaaaaaaggcaaagcggaatcttctgatattgatcgtgattttccttgccttatcctttttgtttaccatagtaaaaaacattgttgtgggatatctgggaacggataattacaaggcgtctcatcgagaggatgtaacggaggtggctgtttcaaaaggcaaagtagggcaggcatacacggtggaaaaagattatggccgcaccttgaccgttgcaagtgccgaggttttggctgaggcagatacagtcgaaggtcttccaaaggggcagcgcctgatcgcagtgcgtctggaatccaatcaagtggatagcatagactacgacagttatgaaaatgctccggtagatgatttttatatttcatatgatggaagttttaggtcagaagtggggacataccaatttgataagggtggatatgatgatctgatcggcaatcgtcagtcaatcagtccgtatgatttcatgggatccggtgcgcatgcaggatatgtctttttctttgtaccaaaggaggcagaaaatattgcatttttttatagtattgcagatacagacagcggagaaattcaaaagtatgtgagcgtgccgttgcatttggatgtgacagagtaagaggaggggatgacatggagacaggaaagcagaataaaaagatcatcgtccttctggtggtgattcttatcattgcaatcagtactttcggcagcactttaatggattttattgattccgtacaatatagtctgagcggagtctctaccagcagccgagcagttctggatggggaaccgacgattgcctatctgggcaagacctacaaggacaatgcgacaagtggatattcttattatgcgatcgatctgccggtgtataacaatggcaggtatgagatgggaacggattatgaggtgcccatgcaactggtagcggaagactgggaggatgtggacagtttttacgaaacagatgacagcgatttcgcctattcctatgaagacgtgatcccatccggtacgactggcattgcccgtaagatttatctgatcaaggatggcgtagatcaggtaaaagttatctgttatgagacgagtgatgattactatgatgagaagaatggcgtagaatttaatttgaaagtaccaacagaagagatgaaaacacaggaataaagaccacagtttttcaaggatgtgatctcgggtattattgtggcgattatcgctctgcccctgtcgattaccttggcactggcttccggtgtgacaccggaaaagggaattcgcctgattttatcgcacaccaatgaacagcctatgcatatgatggaaaaggcaggatttgacaagcgcatcggcaaggaatatttctgcaagcatattgatgatgcactggctctggcagagcggattgcagccaaatagaatagagatatatcataggacctatgtcgtcggaaaacggatgacatgggtctttttttaacacaatttttacagagaccatacctttcattttacaaaagcaccttatgatagatcctgtaaagaaaatgaaaagaaaaaagtctatcagacgaaaaggagatcaaaaatgaaattgaaggaaatcgccgcaacacttcttgttgcaacattagcactgggtaccatggtaggatgcggaagtaaaggaaatgacaatacagccgatagcgcagatcagacaggagcatccggggatatcaccattctttctcgtgaagatggatccggtacaagaggtgcattcgtagaactcttcggtatcgaggaaaaggatgcagacggcaacaaggttgacatgacaaccgaggatgcaaagatcacaaactctacctctgttatgatgacaactgttgcaggagatgtaaattctcttggatatatttcactgggttctttaaatgacacggtaacagctgtaaagatcgatggcgttgaggcgaccgcagacaacgtttccaacggtacatacaagattgcccgtccattcaacatcgcaaccaagggcgaggacttaagtgatgcagcacaggatttcgtaaactatatcttgagcaaagacggacagcagatcatcacagacaatggctacatcagcgtaggcgagggtaaggaatttacatccaacaatgcatccggaaaactcgtgatcgctggatcatcttctgtaacaccggttatggaaaaattagtagaggcttatggcaaggtcaatgcaaacgttgagatcgaggtacaggaaagtgattcttcaaccggtatgcagtcaacgatcgacggcttgtgtgacatcggtatggcatccagagaactaaaagattctgaaactgaggcaggacttgtagcaacagagatcgcaaaagacggaatcgcagttatcgtaaacaacgaaagtggaatcacagatttaacatctgatcaggtaaagcagatctacaccggtgagattcttacatgggatgaagtgaaatagaaaatcccgatattcaaggaaatgagaaaggtcagaacatgaaacatttgaaagaacagataatgaaggtcatctttttcatagcggcttgcacttcggtgttagccgttgccttgatttgtatctttttattcgctaacggacttccggcgatgggaaagatcggatttggcaagttcttaaccggcgtgatatggaaaccttcaaataatatatttggtatattgcctatgatcatgggcagtatctatgtgacagccggagccattatcatcggtgtgccgatcggactctgtacggctgtttttatggcgcattattgtccgaaaaagatctacggtatctgtaaggcggcagtcaatctgatggcaggcgtgccatccgtagtctatggcttcttcggactggtatgtatcgtgccactcatgcaggacttgaccggacacgatggctctaccatgctgacagcatccatcttacttggcatcatgatcctgccgaccattgtcagcgtctgtgaagccgctatccgcagtgttccgacaccatattatgaaggagcacttgccctgggtgcgaccaaggagagaagcatttttcttacggtcatcccggcggcaaagtccggtatcgtggcaggtatcgttctgggcatcggcagggcgatcggagagacgatggcagttgtcatggttgcgggcaatcaggcacgtatgccaaagggcatcacacgaggtgtgagaaccctgacctccaatatcgtattggaaatgggctatgcggcagatctgcatagggaagccctgatcgcgaccggcgttgtcttatttgtatttattcttttgatcaacttatgcgtggcggcactcaaacgtcaggacgcaaagtaaggaggcaaggcaatgaaacaaaatttaaaaacagcattaaagcatcccctgtcgtttttgcttcggatcttcatcttattatccgcagcaattaccgtgggcgtcttgctctatatcattatttttatcgtggcaaagggggctccccatctgtcattagatctttttgcatgggaatatacttcggacaatgtttccatgatgccggcaatcatcaataccctcattatgacaggattatccctcgtgatcgccgtgccgcttggtatttttgcagccatctatctggtggaatatgcaaagcgcggcagcaaattggtaaaagtcatccgcatgaccgcggagaccctatcgggtatcccatccattatttatggtctgtttggtcttcttttctttgcaacctatttgcattggggatactctatgtggtccggggcattgaccttagttattatgatcttgccacttgttattcgtacgactgaagaagcccttattgccgtgccggatatgtatcgggaagccagttttggactgggcgcaggaaaactgcgaaccatctttcggatcatcctgccggcagccgtaccgggcattttatccggtgtcattctttccattgggcgaattgtcggagagacagctgccctgatctatacttcaggaaccgtggcacagacggcgaccgatctgacaaagtccgggcgaacccttgctgtgcatatgtatagcctttcgcgtgaaggtctgcacatggatgaggcatatgcgacagcgcttgtcctactgattcttgttgtattgatcaatgccatatccgatggcattgcaaaaaaagtttcaaaagtgtgagaaagataaaaaggagtcaataaaacatatggagaacaaagcaaaaatttccattcaggatctgaatttatattatggcgatttccatgccctaaaaggcattaacatggaattgccggaaaaagaaatctctgcctttatcggaccaagtggctgtggtaagtctactttattaaaatctatcaaccgtatgaacgatctggtagagggttgcaagatcaccgggcagttgagattagatgaagaaaatatttatggtgatatggacgtcaaccttctgcgcaagcgtgtcggcatggtgttccagaagccgaatcctttcccgatgagcgtctatgacaacattgcctacggaccgcgtacccatggagtgcacagcaaggcgcagttggatgagatcgtggagacctctctgcgccaggcggcgatctgggatgaggtcaaggaccggctgaaaaagagcgcactgggcttgtccggcgggcagcagcaaagactctgcatcgcaagagcacttgccgtcaagccggaagtcttgcttatggatgagccgacttctgcactggatcctatttctacgtcaaagattgaagatctggtgatcgaactgaaaaaagattttaccatcatcatggtaacgcacaacatgcagcaggcagtgcgcgtatcggataaaacagcctttttcttacttggagaagtcattgaatacggagagacggagcagatcttctctatgccgaaggagaaaaagacagaggactatattacaggtagatttggttaaggaggaagtatgagaaatcgatttgacagacagttggaagaactgcacgtagaactgatcgaaatgggaagtatgtgtgaggatgtgattcgcaagacctcaaaactcttgcagtccggggatgcaaaagtggcaaaggagatccgcaaggaggacagcaatattgacgaacaggagcgtctggtggagagcctttgtttaaaacttctcttgcagcagcagccggtagcgaaagacctgcgcaaggtttccgcagccttaaagatgatcacggacatggagcgtatcggcgaccaggcatccgatattgcggagatcattgaaacgacagactttagtgtaccgacaaatgatgtaaaactggcaaaaatggcagaaacgaccatagccatggtgacggagagcattgacgcctatgttaagcaagacttggaactggtgcgtgaggtcattgcccgagatgatgaagtcgacgatcttttcctggaagtccgtcaggagatcgcagacgatatggtagaagccggggatccgatgagcagtctggatcttcttatgatcgcaaaatactttgagcgtattggcgaccatgcgaccaacattgcagaatgggttgaattttctatcacaggaacccacaaggatgcagatattttataaattttatttgcaagatcgcccacggtgcaatactatgatagtgatatgagacacaggaaacgcgagttggagatcatggagaagatcatatgatttattatgtagaagatgaaaagaatatccgggaactggttgagtatgcactgctggcaaatggatttgagatcaaatgtttttcggagggggcggctctttggcaggaactgcgaaaagatgtcagaccggagttgatccttttggatatcatgctgccgggagagaatggtctggaaatcttacatcgcttaaaaactgatggcaagaccaaggatatcccggttatcatggtgaccgcaaagggaagcgaatacgataaggtcctggggcttgacagcggggcagatgattacatagcaaagccttttggcatgatggaaatggtatcgcgcatcaaggcggtcttgcgccgcaccaaaaaggaagatgcaggggatgatctggtctatgaggatatccgggtctgcaatgcgtcccacaaggtctttgtgaaagatcgggaagtggaactgacaaagaaagaatatgatcttttgtcccatctgatccgcaatcagggcgtggtactgaccagagatcagttattaaacagcatctggggttatgattttgacggcgaaacgcgtactgtggatgtccatgtcagatccctgcggcaaaagttaggaacggcaggagattatgtgacaaccgtccgcgggattggctatcggataggggaatgatatgagaaaacgcatttttagaagcacggcaattctggtgacattggcgatccttgttacctttgtcactgcttttttctttatgtataacaaattagaagaaaatatgacggagcgcgtggataacgaggtggattatctggcaaaggctgtggatgaactgggaggaacttcccttgaaacaggtctggcagatggtgtgaccgggcgcattaccttagtcgatgccgtcggcaatgtcttgtatgactcttatgaggatgcagcggagatggaaaatcacgcatcccgaccggagatagcccaggcgatgaaagagggcagggggagtgccagccgctactcgacgacttatgccaagcgcagttactatgcagccgttcgtctggataatggacagatcctgcgcgtgggggatacgatcgacagcgtctatgggaccctttttccgggcgttttcatgttgctgctgccattggtcttactgctgatcctgagtttttatctgatcgaccggacgacaaagcgcatgatggagcctttggaggcaatcgacctggatcatccgctggaaaatgtcgcctatgatgaactggtgccttttctgcgtcgtatcgcagaccagaacgaagccttgaaagaacaggtgcaggagcgcaacaagcagcagcaggaatatgtagccattacggaaaatatgaaggatggtctgatcgtgaccaaccgtcaccatgtgctttccatcaaccgggcagcccagcgtatttttgagatcaaaccggaagaatgtatgggacagaatatcattgtcgtaaaccgcaaccagaagttgaaggaagtggtggacggcgcgcttgccggaaaagacatggtcaaacatatgaccattgatgatgtgacctatgaactgcatggaaatccggtcatccaggacggcacaaataccggtgttgtcatcttcattatggatgtgacccagaaaaagcagttggagaatatgcggcaggagttttcggcaaatgtatctcacgaattaaagacaccccttatgtcgatctccggctatgcggaacttttaaaggatgggatcgtgcggccggaagatcagaaggaatttgccggtaggatctatcaggaggcagcccgcctgacaacactggtacaggacatcatccgcctgtcaaaactggatgatgaaaatctggaactggaaaaagagacgattgatctgtttgagatgagcaaggagatcattgagactttacagcctgcggcaaagaaacggcatatctccatttcttatcagggcaagcgtttgtctatcagtggcatgccgcagatcatttatgaaatgctttacaatgtatgtgacaatgccattcattacaataaagatgagggaacggtggttatcacgaccgaaaagacagaagaaggcatctgctggagcgtgtcagatacgggaatcggtattccactggcagagcaggaacgtatttttgaaagattttaccgcatggataagagccattcgcgtgcgaccggcggcacgggtcttggactttccattgtaaagcacggcgcagaattacatggagcgagtgtccgtgtggactccgccccggatcagggaaccacgatcaccatcgtattccctgcctaaatttatttttgtctgttgtggcgtttctcgtcgatcatggtgcgcatacgctggcgcaattcattgccatctttactgcgcttgaagccttggatactgagcagggtacttttctgtgcagcagatgaggacaggaaaagactttccagacgctctttggccagacgttcgcgcagggcggcagccttttcttctgccagttccttgcggacaaaagcgctctcttggatctgttcggacttctcgatcatgttgccgatggcatcggctgccttggtatccagtttctcgtaggcacttgcgatctgctcgttgatctcgctttcgatccggttgaagttcttggcaaaattggtcagggcggaaaccgtcagagccatatccatgccaaataaaaacataaagaccagcgacagggcttccatcagatagacattggtatcgtgtgtcatgccgctgacaaaaggataaatgacgcggacgaccagaatgcctgccagtccaaagccgatggatgccggcaggcagacacgaccattgatattgcagataacattgctgtagtcccaccagtaagcgtggaaaagtttttccagcgcccaggaagtcgtatattccaaaacgatactgccaaagaagcagatcaaaaagatctttaagttgctggcttcctgcataccggagatgggaaactccgaaaaaaggatggaggcaagcagggcaccgactccgtagatgggaacgatgggaccgtgcaaaaatccgcggttttcccagtgatgcttgcggatggtacagtaggtggattcatagatccaacccatgaaactgtatatgatgaaccagacaaaatatttgcttactaacatagaattatcctttctttgagctgctaccggtgctaaagattatacaaaaataagatactataagaaatactaatagtcaaaatagaaatatgtaatttgacaaagattaaacaatcttttattctgagtaaggaaaagttataaataagacaagttaaaggagaagttatcatgaatgcacagacaaaaacaacagcacttcgtaccgtagacattgcgtatatcggactctttgttgcagttatggcaatctgttcttggatttccattccggcaacggttccatttaccttacagacatttgcagtctttatggcagtaggtcttttaggaggaaaaagaggcacgatcgcagttttaacatatgtattattgggagccattggcgttccggtctttgccggattttccggtggtattggcgccctgctcggcaatagcggcggttatatcgttggctttgttttctctgccctcgttatgtgggctatcacagcaaaatttggcgaaaagacatgggtattaggtctttctatggtattaggtctgattgtatgctatgcttttggaaccatgtggttcatgatcgcttacactgcaaatacaggtgctgtcggcatcgtagccgtacttggctggtgtgttatcccgtttatcattccggatctctgcaagatcggtattgctttgatccttaccaagcgtctgaaaagacatgtaaaattataagagaaacggttcgctgtcaggaagcacatcctttggggtgtgcttttttatttgtgtattcttactggtaaatcagaggaatttgtgtaaaataaaatggaaaagaggttatatttatggaaaaggaaatcagatcggacaatcctttgggatatgtcccggaaaataaactgctgcgccagtttgccataccaagcatcatcgccatgctggtatcgtccctttataatatcgtagaccagttctttatcggtaatgcggtaggggagttgggaaatgcggcgaccaatatcgccttccccctcaacacgtcctgcgtggcgatcgcgcttttgatgggtatcggcggtgcgtctacctttaatctttctatggggcggggagactctaagggcgccggaaaatacattggcaattcggctacggtcatgctggtattaggtgttgtcttatccgcggtcacacttttattcttagcgccgcttttgcgctttttcggttcgccggaagaagtcctgccttatgctatggaatatacgaggatcacggcattgggctttccgtttttgatcctgtctaccggaggcggacatctggtgcgtgcagacggcagtccaaagatgaccatggcgatcaacattgtcggtgctgtggtaaatacagttctggatgccatctttgtctttggttttggctggggtatgacaggagccgcggctgcaaccgtgatcggacaggtcattgccagtatcatggttattgtctatctgtcacattataagactgtgccattgcatagggacacttttttgccaaaggcagagatcgtcctttcggttgtatcgcttggcgcggcaccttgctttaaccagttggcaatgatgctggtacagattgtgctcaaccgtacccttaaatactacggcggtctgtccatctacggcgagtctatcccgatcgcctgctccggtatcatcgccaaggtatccatgatcgtcatggcatttgtcatcggtatttcccagggcttgcagccgatcgtcagtttcaactatggggcaaaaaagtatggccgcgtgaagaaatcctactttatggcgattcgcatttctgctgtcatctgcgtgatctcctttgtcctttttcaggcatttccgagacagatcatttccatctttggtaacggatcggaactttactttgattttggcgtgaatttcttccgcaagtacctgttttttatctgcctgtgctttatgcagccgatttcagccaactttttcacggcgatcggtaaaccgaaaaagggtatttttatgtcgttgacaagacagatcatctttcttctgccactgcttctgatcctgccgcgttttatggggatcgacggagtcatgtatgcgggaccgatcgcggatctggtagcgacgatcgtctgcacaatactggttgttcttgagatgcgcagaccggagtttgcaaagaattaaatgattttgggggattttacatgatacgaatcgcaatcgtagaggatgaaaaagaatatcaggataccatgctttcctatatcaagcggtatcgcgaggagcattttgctgacattgccacaagcgtcttttcggatgggatggatctggttgatgattatcacggtggctttgacatcctgcttatggatatcaagatgaagcatttagatgggatgaaagcggcaagaaagatccgcagtatggatcaggcagtcgtcatcatctttatcacgactatggcgcagtacgcggtagcgggctatgaagtggatgctctggattttatcttaaagccgatcgattacggcagatttgagccaaaacttaccaaggcgatcggcgtggtggaaaagcagggcaaaaagaaatatgtcatgctacaaaaggacggacgcaaggaaaaggtgtcctcggatgatattttgtatatcgaagtccgcaatcacaatgtctattatgtgaccgcccacgagacctataccatgcgttcttccatggcagaagcggaaaaggagttcgcagactatcatttcagccgttgcaaccaggcgtatctggtcaacctaaaaaatgtgatcagtgtagataaggatgatgtgcaggtcggcacctatcatctgcctttttccagatccagaaaaaagcctttcttacaggaactcagtcagtttttggaagccggttatgataggtaaggaggattcatgttagcatttctacatcaatttatttttccaatggaattgtttctggcaatcctgatctatgtactgccgctgcgaatcagaaagggtggaggctggcgctgtcttttgaccggtctcgtacttttgatcgttgaggcggtctggatgcagtttttcccacaactggctggccttattccgatcccgggacacggagatctggcggcattgacctctttgtttgtatatgtcctgctctacgctgtcctgctcgtggcaatgttgctggcaatccttttttgctatgaagtgacgctcaaggaagcggtcttgtgtatcatgatgggctatgcgaccgagcatgtggcatattgcatccgccttctggtcaacagtgcgacccatagccagatcgcggaaagcccccacctttgttatctgcttattcatctgggagcttatgtctttttttacttcttcttcgccaagaagatggtgcaaaatcatcactatgagacagatgccatcacttcgctttggatgactctggttacgctctttatcgtgcttctgatgagtctggcctcctctttctggggatttcggacgttgcacgggatctatggattggtctgctgtctctttgtcatgatcaaccagcgaaactatatgggacagtggcatctgcaaaaagagatgtcggcgcaggaacaactctttatgatgaataaggcgcagtatgaactctccaaggagaacatcgaactgatcaaccgtaagtgccatgacctgaaacaccagatcgcaggacttcgcaacatcacggattccgaggagcgtaggcaggtcgtagactccatcgagaaatctgtcatgatctatgactccatcctacataccggcaatcctatcctcgataccgtcctgacggaaaagagtctggtctgtcaggaaaacggcatccgcatgcatgggatcatcgatggcaaactcctcttttttatggatgccatagacatatacaccctctttggcaatgctctggacaatgctattgaggcgaaccgcaaggtggaggaagaaaagcgctgtatcagtattctgatccatgaaaaggtcaatctgatctttatccagatcgaaaacccatacagcgaggcactgcactttaagcatggtctgccccagaccagcaaggaagataaggattatcacggctttggcatggagagtatccgcaccatggcggaaaagtatggaggctttctaaccttagagaccgggcaggaaatctttgtcctgcgtattaccattccacggagccgatagaccgattacgacacaaaaatgacagaacaggacacacattgttcacaaaaagaaaaagtatgctaacctcttttttacaaagatggggtagcgctttgtgcgttaccgcaaaatgtaagaaggaggtttttcgttatgaggaaaaaggaaaaaaagcagccgaccagacgaagcaagatcatcaagaccgtcatatcattgatcctgattgcggtcatggtcgcagcgatcgtggctgctaacacacttttgacggataacaatcgtatggtaaatgccatgatgggagccaatgactctgtgatcgacaactccggcgtggatactaagggattggatctggattataacaagagtgattattcggaggatgagatcggagcggcagaagatgctctggcagaccagatcgcggatgagggtattgtgcttttgaaaaatgaggacaatgcacttccactttccaaggatacgccgatcagtttctttagcagaaactccgttaccgtcacaacacatgccggtatcatgggacatggcagcggcagtctgaaagaggattttgaagcagacggctataccgtcaataagactctttggaagttctatgacaagggcgacggatcatcttatggacttggcacaggctctatcagttttggtgatgaagaagactttgccatcaatgagtgcccgttggaaaagatcacggcagacgacaaggtggtagacagtctttccggtacgaccgcagtctatgtcttaaagagagtggctggcgaaggtcgtgatatgccgcgttctatgtataatcacacagacaaggcagaagaccagaccaagtcttatctggagccggattccgtagagttggaaatcttatcttatttaaatgataactttgacaatgtggtactggtggtcaattccaatgcagccttagaactggactgggttaatgactatgctaatatcaagtcgatcgttttagcaccgagtggtctttcttctttgccagagatcttgagcggagaggtcaatccatccggcagaaccgtagatacctttgcagcagatgcccttgcatcaccggctgcacagaactttggtgattaccagtattatgatgaaaatggcgatgcaaccaaatataactatgttagttatgaagaaggtgtctatgtcggttaccgctactatgagacacgctatgaggatgttgtattaggacagggcaatgcaggagattatgactatgcttctgaggtatgctatccgtttggttatggactttcctacacgactttctcttggaacgcaccacagatcacctggaaagatggaagcgcaaccgctacggttgaagtgaccaatacaggatctgtcgcaggaaaagatgtcgtagaactttacgcacaaagtccatataccgattatgacaaggaaaacggagtagagaagccgtccgtagaactgttggcatatggaaagacatctgtcttggagccgggcgcatctgagactgtcaccatgacctttgatgaagaacagtttaaggcatatgatgccaatggcgcaaagacctatatcctggatgccggcacatattacatcacagcagcaaaggatgcacatgaagccatcaacaatattttgaccgcaaagggcaagacgaccgcagatggcatgacagaggcaggggatgcatccatggtaaccacgtatgagccggagaatgcagacacggatctgacaacgtatgccaaggatacctatagtggtgcagagatcaccaaccagtttgatgatgccaagggtgatgtgaactatctgaccagaaatgactggaccggaactttcccgacacatgatggggagccgacagatgagatcagtacctggggcaatgagatcaacggtagtgacaaggatggcaatcctgcatcttatgtttacagcaagatcattgatgcagatggcttaaaggcattagattcctttgattccggatcaccggtcgatgcatccgagtttgatgacaagatcgtttacggaaagaaaaacggtctgaccctgatccagatgcgtggacttgattttgatgatccacagtgggatgaccttctggacgaattgacttatgaagattactacaacacgatcggactttccggttatggaattgagtatattgattccattgatatgccattctgtaccgatgcggattctgcaaacggactgatctatggcggaaccgggaaatattatccgaactctatgacactggcacagacctggaatcaggaactggcaagagaaatgggaaccatgatcggtaatgaggcgatcatcggtggcatggacggctggtatgcaccatctatgaatatccatcgtacaccgttctcaggacgtaacggtgagtattattccgaggatccttacctctccggtgctgttgcatccaatcaggtttacggtgcagcaaccaagggtgtatatgcttacatcaagcactttgcctttaacgatcaggaagatcaccgaggcgaccgtgacggacagtacggacttgcaacatggctcaatgagcagtctgcaagagagatctacttaaagccatttgaaatgtgcatgaaactgggcgatgtggaactcaactatctggagcaaaagagcgatggcacttatgagaacgcgaccagacagatccgtgcatgtcaggcagtcatgaccgcatttaaccgtatcggttatacctggaccggcggaagttacaatcttttgaccggcattgccagaaatgaatgggcattcaacggcatgatgatcacagataatgccaataccggtgtattcatggatggctaccagatgatcgaggcaggcggagacatcaagttgacctacttagcagattctgcacgatttgattttgataaaaatgatacagcaacctatcactacgcgagagaggctatgcaccgtgtcctttatacggtagcaaattccaaggcaatgcttggtgcaatgccgggaaccgatttcgtggatgaaccttctggtacagagaagatcacaatggcagtggatattgtatgcggtattctgatcgcactcctggcagtgacgaccgtgcttcgctttgtaccgagaaggaaaaagcaaaagtaacagcatatgaaagaatagagaaggcagggacgatctgtggatcgcccttgtctttttttgtcggaaactatataataaaacatcatagataatacatagtgagaaggggctgtattatggaaaaagaacgtgtagaaaagacaaaaacgaaagaggaaaagaaactaacagaggagaagactgccaaggttcgcggcaaaaaggctgagaaagcaaagaaaaagccgggcaagttacacaagaccagtatcggtatgaagatctattcttgtatggcggtcatggggatctcctttttggtcgttgtttttgctaatatctccatccttggcacagttgagaagaataacgacaaactggtcaacgtctatatggagttggagcaggcaaagagcgtgactgcagagtcatatcagcagacggcaaagtacgcagagtcctgtgtcaaccgtccaaaggatgtcaacttctccggactggaatcagcgatccaggccgtgcgtgacaatatggatacgaccaagaaatgtgtcaagaagacaggagacaagaacttgatctcccgcgtggatgcatgggaagtcaagatggaagatttcctggattccgcagagttgatcctgaccaagtgtcagcagggggatatcgaggcggcttccaatactttgtctgccctgggtggaccatatacttatgtgcagatcgcacagggtgacttcgaggaattatttaacagtgaattagccaatatcgaaaggaccaatacacaggcgatcagccgtatccgtcagatcaactatatctgctccggtgtggttgtatttatcatcctcgttatggttctgatcgtttataagaccatcgttcgtccgaccaagaagtccggtgagcagatccgtcagatctctgataagatctccaagaacgagggtgatctgaccgagcgtatcatggtgcgttacggtgatgaagtcggtcagatggcaatgggcatgaacggatttttggatcagttgcagaatgttatgcaaaacctcaagtctgaggcagacaatatgacatcttctgcacaggctgttctggattctgtagattcttccacagccaatgcagacaatgtatctgccgctatgcagcagatggcggccagcatggaggagatcgctgcaacacttagtaccatcacttccggtagtgatgctatccttgcagaagtacagaacatggtagacagtgccagcggcggtgtcgatctggtacatgagatcaaagacagagcacagaatctgcatgcagagacaatctcaggcaagaacgagaccagcggacgtatcgtagagatccgtggcatggtagaagatgccgtggaggagagccgcagtgcagaaaagatcacagaactgaccggcgagatcttggatattgccagccagaccaacttactcgctttgaatgcatccattgaggctgcaagagcaggcgaggcaggcaagggatttgctgttgttgcggatgagatccgtcaacttgcagacagcagccgtgagactgccaacaacattcaggagatttccaaactggttatcggttccgttgagaaactggcatccaattcacagaatatgcttgcctttatcgacgaaaaagttatgcaggactacgatggatttgttaaggttgtggagcagtacgaggcagatgcagacagtatcaatgaagtattgggacagttcgcagccaagacagacgagatccgcaataccgttgaggatatgaacaatggtatcaacgatatctctactgccattgatgagaacgcacaggatgtgacaggtgttgcacagaatgccgtatctttggtagaggctatgaacaagatccaggcagaaacagaaaacaatcaggcgatttcccagcagttgaatgagcaggtaaaccgcttcaagagagtataatggaaaagaattacaaattaaagatcagttatgacggttcgcgttatttcggctgggaacaccagccggatcgcgaaaccatccaaggaaaaatagagacagtccttgcccgtatggtggataaggacatggtagacgtgattggcgcggggcgtacagatgcaggtgtacatgcccgcgccatgattgctaatgtgcatctggatacgcagatgtcaccggaagagatccgtgattatgccaaccgttatctgccggacgatattgccatattggaagtgcgggaggcggctgaccgcttccatgccaggtataaggcagtgggaaagacttaccagtacacctgttttgacggtccggtcaaaccggtctttgaccgcaagtattatacgccactggatcaggaactggatgtggaagccatgcaggaagcggcgcattttctggaaggcaaacacgattacaagagtttttgcggcaacagccgtatgaaaaagtcgaccgtccgtatcgtagacacgatcaccgtgcgccggcgtaagggatatgtttatctgaccttccatggcaccggctttttacagaatatggtgcgtatcatgtcaggaacgttgatcgaagtcggtctggggcgaaagagaccggaagaggtcggggagattttggaggcatgcgaccgtaaggtggcaggtccgacagcaccggcaaaggggctttgcctcttgaaggtggactattaaaggagagcagaatgaaggatgagtgaaggtttttcagaccttcgctctttttttgccctgttttttgtatagaatgtcggaaattatggataatatacaaaaacgatatggaaaatttgttgaagtttatgactggaaatgattgaaaatgacggaatgtgattgtataatacaaacatcaaatgaatgattttgaatgaagttgaacggaagtgaatttatgttagcagaagaaagatttgcaagaatattgtccatactagaagaaagcggttctgtgacggtcgcagaattgatggaacgtctggatgcgtcagagtcgaccatccgtcgtgacctcaacagcctggatgccagaggacaactcatcaaggtgcatggcggtgccatgatgaaggacgctgcttcttaccggacgcaggatgatgacgtccagttacgcaaggagcgcaacgtagagcagaaagtagcgatcgcccgctatgcggcgcatttgatctctgattatgatgtggtctatctggatgcaggcacgacgacagagttgatgatcgatcccatgctcaaccgcaatgccatgtatgtgaccaatgccatcggtcatgcgagaaaactggcagccttaggctgtaccgtctatcttctgggcggtgagttcaagggaacgacggatgccatcgtcggtgaggaggcagtgctttccatcgctaaatacaattttaccaagggctttttcggaaccaatggcgtgacggtagaacagggatttaccacaccggaggtcaaagaggctttgatcaagcgcagagcactggcacagaccaaggatgcctacatcttagcagatgccagcaagttcggagagatatccaccgtgacttttggggactttgcggatgcaaccgttttaacggatcagataaacaaaaagtatagagatttttcaaatattaaggaggtgggagaatgatctatacagtgacctttaatccttctttggattatatcgtgtcagtggatgattttatgctggggcgtgtcaatcgtaccaggacggagatcatttatccgggaggcaaggggatcaatgtttccatggtgctgaaaaatctggggcatgatagtcacgcacttggcttcatggcaggatttaccggacaggagatcgtcagactcttggatgaatggggcgtacagtcagatttcatccgggtagagcaagggatttcccgtatcaacgtcaaactccgttccaatgaggaatccgagatcaacggacagggacctgcgatcgccgaggaacatatcagacagttgtatcaacagttggatcgtttggaggacggcgatgtcttagtgctcgccggaagcataccggatgtcatgccggatgacatctatatggatatcatgaagcacttatcttccaagaagttgcatatcattgtggatgcgaccagagatctgctggtaaatgtattgccttaccacccatttttgatcaagccaaataaccacgaacttggtgagatctttggcgtggaattggaggataaggaagaagtctttacctatgccgcaaagttacaggagcgtggggcacgcaatgtcctggtttctatggcaggggacggagctgtccttttgacagaggatggacagagatttgaaagtatgccgccgaagggcaaggtcgtcaattcggtcggtgccggggattccatggtagcaggattcctcgcaggatatatggaagaacatgattatgccaaagcattttatatgggactgtgtgcgggaagcgcatccgcattctcagaggaactggcaaccagggacgaagtcctcgctttgatgcatagtatcgggaagtaatgtgtcaaacattattttataggaaaggtaaaaggaggaatcacacatgaaagtgagagatttgcttggtgtagaaagcattcagttgcaggggacaccaacaggcaaggaagatgccatcagacagatggtagacttgatgtgcaaacgcggcaacattgcggatccggacgcttatctgcagggggtttttgcaagagaagaagaaggaacgacaggtatcggagaggggattgcaatcccacattgtaagtcggatgcagtatcggcaccggggctggcagccatggtcgtgccacagggcgtagaatacgatgcacttgacggagaaccggtgcatatcatctttttgatcgcagcaccaaatacagaagacaatgtgcatttggaggtacttagtcgcttgtccgtccttttgatggatgagcagtttaccaaggatctgatgcaggcaaagagcccggaggactttttgcatgtgatcgatctggctgaggaggacaaggaagaaaaagaggaagccaaggcagaggcagaaaaagcagaggtcggagaggagacttttgtggttgcggttaccggatgtcctaccggaatcgcacatacttatatggcagcagaagccttagaaaaggcagcagccgcagcaggatgccggatcaaggtagagaccagaggatccggaggagccaagaatgtaattacggatgcagagatcgcctctgcaaaggcagttatcgttgccgcagataccaaggtgccaatggatcgttttgatggcaaagcattgatcgagtgtaaggtggcagatggcatcagcaaggcagcagaactggttgaccgtgctatgagaggggatgctaaggcataccatgcaagggccgctaagaaagagagcaaggtcgagacaggaaagacagacagcgtaggacatcagatctatacacatctgatgaatggggtatcgcacatgcttccgttcgttatcggtggcggtatcttaacagcgatcgcctttttgatcgatactttgatgggctatggtgcgatcggtggcggaagtttcggttcctgcacaccggtatccgcattctttaaatatgtaggtggtcttgctatgggacttatggttccggtacttgcgggctacattgcttattccatcgcagaccgtccgggtcttgcggttggttttaccggaggccttctggcatccaatggtaatgctctctttaccgattatgattggggcaatctgtccggctttagcgattttgttggacgttttgctttccagggagagcatggcggtacgaccgtttccggtttcttaggcggtattctggtaggtttccttgcaggatacattatcttgggactcaagaaactgtgcgagaaactgccggattctttggaaggcatcaagccgaccctgatctatccggtcgtaggtatgtttatcgtgagtgtcctcatgtgctttatctttaacccgatcatcggattgatcaacaccggactctctaccatgctgacagccctggcaaaggcaggactgatcaccttgctgggatgtctcttgggagccatgatggcgattgatatgggaggcccgatcaacaaggcagcctatgtctttggtacaggaatgcttgcaacagcatctgatctgatggcaagcggcgcacagtcaacagacccggcagtccaggcatgctacattgcaatggcatccatcatggtcggtggtatggtgccaccaatcggtattgcccttgcctgtcatttcttcccgaagaagtttaccgaggcagagcgtgcgtctaaggtttccaaccttgttatgggatgttctttcatcacagaaggtgccattccatttgcagcaggtgacccggcacatgtgatcccatgtactctggttggtgcaggtgtcgcaggcggactcagtgcattctttggatgtaccctgatggctcctcacggcggtatcttcgtatttgcaaccgttggcaagcctttgctttacatcctttcatggatcatcggttccattgttacgaccgtcatgcttggttttatcaagaaggacgcacaggaagtttaaaaaggaatatagatgggcggaagcagaaaagcagtatgcttccgctgcatctaaaatataaaaagaaagatcattaggaggaaaatatcatgaaagaaatcacatacacgatcacagatccggaaggaatccatgcaagaccggcaggtgtcttagtaaaagaggcagcaaagtttacaagcaaggttatcatcgcaaaggatggaaaagaagtggatgccaagagaatcttaggtcttatgggacttggtgtaaaatgtggacaggaaatcgttttaaagaccgagggcgaggatgaggacgcagccatcgaagcacttggcaaatttttggaagaaaatctgtaagacaggatagcgggtaagcgctcgtagtagtttagcgcagtaacgaagagagggcgatgaatatgaaattagaaggtaaaagcgtttttagcggaatagcaatcggaaagtgcaagatctttggaaagaaggatcaggtcgtaaaacgtagcaaggtcacagatacggatctggagatcaagcgttttacccaggcaaaggagcaggcaaagagccagttggcagccctttacgaaaaggcattaaaagaagtgggcgaggcaaatgccgccatttttgaagtgcatcagatgatgctggatgatctggactatgtggagtctatcaccaacatgatctcatcccagggcatcaatgcagagtatgccgtggcaacgacaggcgataattttgccgaaatgtttgcagccatggatgatgattatatgagagagcgtgcagcagatgtcaaagatatttccaatcgcgtcatccatatcttgcagggcggcagtgagcaggcaggactgggagaccagccggtcatcattttggcagatgatctggcaccaagtgagaccgtgcaactggacaagtccaaggtgctttcctttgtgactcgtcatggatccaccaattcgcatacagcgatcctggcgagaaccatgaatattccggcgcttattggagtagattatcccgaggatgcagaaggtcatatggctgtcgtggatggcagaaacggtgtctttctattggatccgacggaggaagaattgacaaagtatgaggcacttcgccaggaagatgtagaaaaagcaagacttttacaggaattaaagggcaaagagaatgtcacgaaagccggcaggaagatcgccctttatgcaaatatcggtggtgttggcgatgtggcaagtgtacttgctaatgatgccggcggtatcggacttttccgcagtgagtttttgtatctggaaacagaggattatccgagcgaggaacagcagtttaaggcgtatcggacagtcgcagagaacatggctggcaaaaaggtcattatccgaacccttgacatcggtgcggataagcaggtagattattttggactggaacatgaggaaaatccggcgatgggatatcgtgccatccgtatctgtctggatcgcaaggagatctttaagacgcagttgcgcgcgatttaccgtgcatcttattatggcaatatttccatcatgtttcctatgatcatctctgtggatgaagtcaaggctgccaaagagatgtgtgcgaccgtgcaggaggagttaaagagtgagggcattccgtatggaaaggtggaactcggtattatgatcgagacacctgcggcggtcatgatctcggatcttctggcaaaggaagttgacttcttttcggttggaaccaatgacttgacccagtacacactggcgatcgaccgtcagaacccgaaactggataatatctatgatgcacatcatctggcaatccttcggatgttgcagatgatcattgataatggacataaggaaggctgctgggtcggcatctgcggcgaacttggtgcagatgtgactctcacagacacattcattaaaatgggcattgatgaactttcggtcagcccgtctatgatcttaaaggtcagagaacagatccgaaatagcgatgccaaataatttgataagcagatggcggatgtttgttatgctatccggacattcgtctgacttttgccccgtcgtccctgactgcgctgtgggatgacggtatatagaaaccacctttgtaagacagaggtggttttttttcttgcctgcctgtggtaagataggaacgtgaagaaagaaggtaaacaaaagatgaaatacgatattgttttatttgatttggatggaacgcttttgaatacattggaagacttggcggacagcgtgaattacgtgatgatgcagatgggatatccggtgcatccgttggagagtattcggcagtttgttggaaatggtatccgcatcctcatggtcaaggcaaccccacagggagaggaaaatccacgttttgaagaagcctttgccatgtttaaggcttattatctgacccataatcagatcaagaccagaccttatgatggtgtgatggaacttttgcacgattatgaggagcaggatatgcctatggcgatcgtgaccaacaaaaatcaggagtctgtagatgtgctggtgcgtgatgttttcaagaaccatgtgcgtgttgcggtgggcgatgacggtatccgtccaagaaaaccggcagcagccccggtggaagaagcactgcgcagactgcgtcaggtctacgccgaccggtcatgggcgcgcatgggcgtagaggatgccttatccgaggaagactggttggaatggatcaagccgcacgtcctgtatgtaggtgattcggatgtggatgcagcgacagcagaaaactccggtgtggattgtgctctgtgtgcatggggatttcgcgaggaatctctgcttgagaccctgccacatgtggtcttgttacataaaccattagaattagaagcatttgtgagaggttaaatatgggtttaaaaaaggcatattgccgtgtatatcaatggatttataatattggaatgaaagtggtcaaatggaaggagccagagcgcttggagggcgtggatagttttcacagtatcccggagatcttggagcaagcaggtgtctgggcgcctatgatcgtcaccggaccccgcattggcaagaccggatttttgaaagatctctacaatgatctctccgagcgatcggtcatctatgatcaggtgcatcctgatccgacgatctcacagatcgaggaaatgtaccagatctatcaagaccatgactgtgacagcatcattgcgattggcggtggttccaacatggatgcggcaaaggcactggcggcgcgtgttgcccgcccggataagtctttgcaggacatgaagggacaattaaaggtcggccggcaggttcctttttttgtcgctgttccaaccacagccggaaccggttcggagacgaccattgcagcagttgtgacggatgatgccgagaaccacaagtatgccatcaatgatccggtattggtgccggattatgccgtgatggatccaagtcttactgtatccctgcctgcagatattacggcagcgaccggtatggacgcgctgacacatgcggtggaagcctatctgagttggacttaccgcacggaagagactatcgaatattgcgaagaggcggtcacggcgatcatgggatttttgccggaagcctacgaacagggaaattctctggaagccagggaagaaatgctgatcgcatcctttaaggcgggggcagcctttacacgagcctgcgtcggaaatgtgcatgccattgcgcatacgatcggagggctttatcatgtgccgcatggtctggcgaacgcggtggttctgccgatcgtcttagaagactacggatcggcggtctatggaaaattagcgcgccttgcaaccctttcacaggtggcttgcgaaggaagcgaggcagaacgtgccaaagaatttatcagacatatcagacaaatgaatgaacacatgggtatcccggagcatctgccgcagatccgcgaggaagatattgcacagatggcagagtgggcagatcaggaagccaatcccctctatccggtgcctgtgatttacgataaaaagcattttgaggaagtgatccgaaaagttgctggaaagtaggaggtagacagaattgataaacatttacagaacggacaaccgtatcatctccgaaatagatcagttcgataccggtgcatgggtaaaacttaccgcaccgtcactggaagaatgtgcagagatcagtgatcgttttcatatggatatcgcagatgtgcgggcggccctcgatgatgaggagagttcccgtatcaatctggaagatgaatatacacttatcctggtggatatcccgtcagcagaaatgcgtaacaaccgccattcctataccacaatcccgctggggatcttgattgcagaagatgtggtgatcacggtatgtgcggaggagactgccgtactgcgttcctttgtggaacaacgtgtgcgcgatttctccaccaaaaaacagatgcgttttacctatcagatcttatacaatgcctgcatggtctatcagagcctgctgcgcagtattgacagaaagcgtactgagatcgaggaaagaatcgatcagaataccgaggatgttgacttgatagacctgcacgaattggaatccaatctggtctactttgctacgtcactgcgtgcaaatggtgtggtgttggatcgtttgacacgttatgggaggctccgtcagtattcggaggatcaggaactattagaggatgtgatcattgagaacagacaggcgatcgagatgacacagatctatcgtgacatcatcaatggtaccagagaactgatgtcgacggtcatcaacaatcgcctgaataatgtaatgaaatatctggcagcgatcacgatcgttatgtccatcccgacgatcatatcgggactctggggcatgaacgtcggtggcaaatggatgccgttttcgtccacaccgcatggtttcgcgatcatctgcgtgataacgctgctgctttgcatcgtggttatgctttggcttcggaagaaaaagatgctttagcctgagcaaactcgtctgtgatctgacgaaagacctgcatgatacgaggatcaaaagaggtgccgtcttcatctaagagaatggagacggctttttcatgcgaaaaagcgtctttgtaactgcgctggctggtcagagcatcgtagacatccgcgacagccagaatacgtgcgctgaggggtatatcttcgccggcaagtccttttggatagccggatccgtcccatttctcgtgatggtaatatgccatgtctctggcatcgcttaagaaactgtcctcgccaacgatctcaaccgcatgggtaagcgcctgaccgccaaaggtggagtgttggcgcataaattccatttcctccgggctgagacgtgaaggctttaaaagagtgttgtcggaaataccgaccttgcccaggtcatgcagtggagcaccgcgaagcaatcttaccttgtagtccggtgtgatcgcatccgggaaggtatgtgccttgtctaaggcattcaagagtatctcgaaatattttgccgtgcgtctgacgtgggagccggtcataccgtcacggatttccaacaggtcatttaaactggcgaccagtgccgtctctacgcgtgcgacctgctctgtcttttgcatgatgatctcttccaggtgatcctgataatgtgccagatccaactgggtgcggatacgcatgcgcatgatctggggctgcaagggcttatggatgtaatcgactgcgcccagttccagtccgtggatctcatcggcaacattgtcctgtgctgtcaagaaaatgataggtgtgtcctcggtctgtggcagggaacggatggctttcaatgtctcgaaaccgtccacctccggcatttggatatcgagcaggatgatgtctggtgtatgtttttctaaataacgaagagccattttgcaggaattggctgtgacgacattgtagtagtcatccagtgcttccttggcggtacgcaggttgatgccgctatcatctatgattaaaactgtttccatactgtcaaactccttgtggtgtttataatgaggtcggaagatcctgaccggcaaatctgccgctggctccgcaagggagggtaagtccgttgcaggaaacaggaagaccgatttcttctgcggctacacttcccggatagccttttaaggcggttgaaatcatatagtgcagtacagcaggctgcaagcctgtggtgtatgagtttacaaggaagaaaagtggctggtcggtcagcagttgcgcacacaattctatgagcggatagatggcatcctcgatcttccagatctcacccttaggaccacgtccgtaagatggcggatccataatgatggcatcgtagtgattgccgcgtcggatctcgcgctctacgaactttttgcagtcatccacgatccagcggatcggggcatcggcaagaccggaggatacggcattttcctttgcccaggtgaccatgcctttggacgcatctacatgtgtgactgcggcaccggttgctgccgcggcgatcgttgcaccgccggtataggcaaagagatttaataccttgatcgggcgatccgggtgctctttcttcctattacatataagtgtggaaaaccaatcccagttgactgcctgttccggaaaaagaccggtgtgtttaaaactgaaaggtttcagatgaaaagtcaggctgccgttatggttgacatagagattgtcgttatcggtgtggggcagttgataagtaatgctccactgctgtggtagatcaaagaactcccactcgccaccaccttttttgctgcggtgatagtgcccgtttagtttcttccattcgctgaccttctttggggtgttccagatgacctgtgggtccgggcggagcagggtgtattttccccagtgctccagtttctcaccgccggagcagtcgatgacttcgtattctttccaatggtctgctatccacataatgattcctcgcattctatctatcgtatcgttcgatttgtattcttcttattgcttctatattatatatgaagaaagactaagatgccactgaaaatattgtatgcgaaaaaatacaatatttattcaaaaaaccttgcaagtattgattttatcatgtatattagatgttgctgtgacattgatagcgttgaagcgtgaggttgctgccgattatcaccatagtaatctggcaggttttccgtggagcgaatgtcaagttaggaaactggcgacaagtcactgtacaaaatatagtctaccattgtgtagagacacgtgtgttaatctttaggacacacacggagaagtgtacagtcaccgcttgtcgtactattgaaataagtgcgaaggaggcgactttttttatggcaactcaggttatgagaatcacactcaaggcatatgatcacgaattagttgatgcatctgctaagaaaatcatcgagactgttaagaaaaacggatcacaggtgagtggaccggtaccacttccgacaaagaaggaagttgttactatcttaagagcggtacacaagtacaaagattccagagaacagttcgagcagagaactcataagagactcatcgatatcatgacacctacccagaagacagttgatgcattgcagagactcgaaatgccagctggtgtttacatcgatatcaagatgaagtaagaagttaacaaggttaacgatccggtataggtttatatagaagcaacatttatgttccacttatattgcctgttctaggatgatcgctacggcgatccgctgtagaaaaacaggaggaaagaaaatgaagaaagctattttagcaacaaaagtcggaatgactcaaatcttcaatgctgatggagttttaactcctgtaactgttttacaggctggtccttgtgtagtaacacagatcaagactgttgagaacgacggttacgaagcagttcaggttggtttcgttgacaagaaagaaaaggtagtcaacaaggatgccaacggcaagaaagaaatcagaaacagacatggcgtcaacaaggctgagaagggacacttcgataaggctggtgtttctggaaagagattcgtaagagaatttaagtttgaaaattgcgcagattacaatcttgcagatgagatcaaggctgacatctttgaagaaggtgacaagatcgatgctacagcaatttcaaagggaaaaggattccagggtgctatcaagagacttggtcagcacagaggacctatggctcatggttctaagttccatcgtcatcagggttccaacggtgcttgttcttcaccaagtaaggtattcaaaggaaaaggaatgcctggacacatgggaagcgttaaggttacaatccagaaccttgaagttgtacgcgtagatgcagagaataacctgcttttggtaaagggtgctgttccaggacctaagaagtctttagttacaattaaagagtctgtaaagtcaggtaagtaatcgatagtaggaaaggaggaactttacgatggctaaagtatccgtatacaatatggaaggcaaagaagttgagacaatggaacttgacgatgctgttttcggtgttgaagtaaacgagcatttagttcacatggcagttgtccagcagcttgcaaataaccgtcagggaactcagaaggcaaagacacgttctgaagttcgtggtggtggtagaaaaccatggagacagaagggaacaggtcatgcaagacagggttctacaagagctccacagtggacaggtggtggtgttgtatttgcaccaactccaagagattattcattcaagttgaataagaaagagaagagagcagcacttaagtctgcattatcttccagagtagcagagaataagtttgttgtagttgacgagttgaagttcgatgcgatcaagacaaaggattttgcaaaggtaatgagcaaccttggtgttgaaaaggcgcttgttgttatcaatgacaacgacacaaatgttgttatgtcagcaaagaacattcctactgttaagactgcttcaacaagcacgatcaacgtatatgacatcttgaagtacaacacagttgttgtaacaaaggatgctgttaatacaattcaggaggtgtatgcataatggctaacgtacaatattatgatgtaatcctcaaacctgtaatcacagagaagagcatgaatgcaatggctgaaaagaagtacacatttcttgttcatccagaagcaaacaagacaatgatcaaggaagcagttgaaaagatgttcgaaggaacaaaggttgcttccgttaatacaatgaacaacgatggcaaggaaaagagacgtggcagaagcgtaggcaagactgctaagactaagaaggctatcgttcagcttacagcagatagcaaggacatcgagatcttcgcagggctgtaagtcgaaagcaagattatgcgtcatgtttagacgcgataagtaaaacgtaaaagtagcgaaaggagaattacaatgggaattaaaacttataacccatatacaccttccagaagaaatatgactggctctgatttctccgagatcacaaagaagactcctgagaagtctcttacaacttctttaaagaagaacgctggtcgtaacaatcagggtaagattacagttagacaccagggtggtggaaacagaagaaaatatagaattatcgatttcaagagaaagaaagatggagttcctgcaactgttatcggtatcgagtacgatccaaacagaacagcaaacatcgcattgatctgctacgcagacggcgagaaggcttacatccttgctcctgaaggacttgctgatggcatgaaggtcatgaacggaccggaagcagaagtacgtgttggtaactgccttccgctggcaaacatcccggttggtactttagtacacaacatcgagatgtatccgggcaagggtggacagttagttcgttccgctggtaacagcgctcagttgatggctaaagaaggcaagtatgcaactcttagacttccatcaggcgaaatgagaatgattcctttgaactgtagagcatctatcggtgttattggcaatggtgatcacaaccttgttaagattggtaaggctggtcgtaagcgccacatgggtatccgcccaactgttcgcggttctgttatgaaccctaatgaccatccacatggtggtggtgaaggtaaggcaccaatcggacgtccgggtccatgtacaccttggggcaagcctgcacttggtttgaagaccagaaagaagaacaaacagtctaacaagcttatcgtaagaagaagagacggtaaggctatcaaataaggaggatcattatggctcgttcattaaaaaaaggaccatttgctgatgaaagcttattgaagaagatcgatgcaatgaacgcatcaggcgacaagagtgtcattaagacatggtctcgccgttcaacaatctttccacagatggtaggacatacaatcgctgttcatgacggaagaaagcatgtgcctgtatatgttacagaagacatggtaggacacaaacttggtgagttcgtttctacaagaacttacagaggtcatgacaagaacgaaaagaaatcaagagtacgctaattaatttttgaaaggaggtttcacatcatggcaaaaggacatagatcccagattaaacgtgagagaaacagtcaaaaagatactagaccttcagcaaagttatcttatgctagaatgtcagttcagaaagcttgcttcgtattagacgctattcgcggtaaggatgttcagacagctcttgctatcgtaacttataatccaagatacgcttcaagcattatagagaagttattaaagtcagcaatcgcaaatgctgagaacaattacccagacaagaactacagcctggaaaacctttatgttgcagagtgctatgcaaataagggcccaacaatgaagagaattagaccaagagcacagggtagagcttacagaatcgaaaagagaatgagccacattactgttgtgcttgatgaaagataggaggcaatcatgggacagaaagttaatcctcacggcttaagagtcggtgtgatcaaggattgggattctaagtggtatgctgaaggtgaattcgctgactacttggttgaagattacaatatcagaacatttcttaagaaaaagttatatgcagctggcgtatctaagatcgagatcgaaagagcagccggaagagttaaggttatcgtttacacagcaaagcctggtgttgtaatcggtaagggcggcgctgagatcgagaaggttaaggctgaacttcagaagttgacagacaagaagcttgttgttgacattaaggaagttaagagacctgacaaggacgctcagttagttgcagagaatatcgcagcacagttggagaaccgtgtttctttccgtcgtgctatgaagtcttgcatgtcaagatctatgaagaccggtatcaagggtatcaagacaagcgtttccggacgtcttggtggtgctgatatggctcgtacagagttctattcagaaggtactattccgcttcagacacttcgtgcagatattgattatggattcgctgaggccgacactacttatggcaaggtcggcgtaaaggtttggatctacaaaggagaagtacttcctacaaagggaaataaggaaggaggagccaaataatgttaatgcctaagagagtaaaacatcgtaagcagttccgtggatctatgacaggaaaggctttacgaggcaacaagatcgtaaacggtgatttcggtattgttgctatggaaccatgttggattcgttctaatcagattgaagcagcccgtatcgctatgacacgttatatcaagcgtggtggtaaggtctggatcaagattttccctgataagcctgttacagcaaagcctgctgaaactcgtatgggttccggtaagggagctttggagtactgggtagctgttgttaagccaggtcgtgtattatttgaaatctccggggtacaggaagatgtcgctagagaggctcttcgtcttgctacacacaaattgccttgcaagtgcaagatcgtttctcgtgcggatttggaaagcgaggttgcagcaaatgaaaactaaggaatatgttaacgaattaaagaatgcatctgttgcagatttgaatgcacagttggtggaagcaaagaaggaacttttcaatttaagattccagaacgcaaccaatcagttagagaatacagcaagaatcaaagaagttagaagaaacattgcacgtattcagacaatgattactgcagctgataacaagtaagcagttcggaattttaaaggtagaaaggagacaatatcgtggaagaaagaaatcttagaaaaacacgtgtaggtattgttgtaagcgataagatggataagacaatcgttgttgctgttaaggataacgtaaagcatccactttacaacaagatcgttaagagaacttataaattaaaggctcatgacgagaacaacgatgcacacatcggtgataccgtcagagttatggaaacaagaccattatctaaggataagagatggagacttgttgaaatcatggaaagagcaaagtaattagaaggaggctacaaacatggtacagcaggaaagtagattaaaagtagctgataatacaggtgctaaagaaatcctttgcattcgtgttatgggcggttctacaagaagatatgcaaatatcggtgacgtgatcaccgctactgttaaagatgcaacaccaggtggtgttgttaaaaagggcgatgtcgttaaggcagtagttgtacgctccaagaagggtgcccgtcgtaaagatggttcttatattaagtttgacgagaatgctgcagttatcatcaaagatgacaagaccccaagaggaactcgtatttttggacctgtagctagagagcttcgtgagaaacagtttatgaagattgtttcccttgctccggaagtattataggaggtagtacgatggcaacaatgaagatcaaaaagggcgataccgttagagtaatcgctggtgcagataaggataacgaaggaaaagttatcgctgtaaatcagaaaaatcatacagttttggttgaaggtgtgaacatgatcaagaagcacacaaagcctagcatggcaaaccagaacggtggaatcatcgagcaggaaggaccaatcgacatttcaaatgttatgcttcttgttgatggtaagacaaccagagttggttttcagatggacggagacaagaaagtccgcgtagcaaaagcaactggtaaagtgatcgattaatataacgagaggaggcaaatcagttgagtagacttaaagagcagtaccagaatgagatcgtaaaggctatgatcgaaaagtttggttataagaatattatggaagttccaaagcttgacaagatcgtagtcaatatgggtgttggcgaagctaaggaaaacgcaaagcttttagaggcagcagttaaggacatggagacaatcacaggtcagaaggctgttacaacaaaggcaaagaactctgttgctaacttcaagatcagagaaggtatggcaatcggatgtaagacaacacttagaggcgaaaagatgtatgatttcgctgatcgtcttatcaatcttgcacttccacgtgtacgtgactttagaggtgttagtgctgattctttcgacggaagaggtaactacgcacttggtatcaaggaacagatcatcttccctgaaatcgagtatgataaggttgacaaagtaagaggtatggacattatttttgttactactgctaagacagacgaagaggctcgtgaattactgagattattcggtatgcctttcgtaaagtaatttaggagggaattttaagatggcaaagaaatctatgaaagttaagcagcagcgcaagcagaaattctctactagagaatatagccgttgtaaaatctgtggtcgtccacatgcttatttaagaaagtatggcatctgtagagtatgtttccgtgagttagcatacaagggacagatccctggcgtaaagaaggctagttggtaagccggaaggaggaaatttaatcatgacaatgagtgatccaatcgcagatatgcttacaagaatccgtaatgcaaatactgcaaaacatgatacagttgatatcccagcatctaagatgaagatcgcaatcgctgatatccttgtagatgagggatatatcacaaaatatgacatcgtagaagatggtaactttaagagcatccgcgttacattaaagtatggcgcagacaagaacgagaaggtcatcacaggcatcaagagaatttctaagcctggtcttcgcgtttatgctggtaaggatgagatcccaaccgttcttggtggacttggtattgcaatcctttctacaaataagggaatcgttactgacaaagaggctagaaagcttcaggtcggtggagaagtgcttgctttcgtttggtaattatccgaaagcaaggacattggaacatttcacgtaatgtataaaccgtccccgaggcggacatacaatatagcaccccgcgcatagcggagaaattataggaggtacgggcatgtcacgtataggaagaatgccaatcgcaatcccagcaggagttactgttgaaattgcagaaaataatcatgtgactgtaaaaggtccaaagggaactcttgagagaacacttccatcagagatggatatcaagttagagggttctgaagtaatcgttacaagaccaaacgacttaaagaagatgaagtctttacatggtcttacaagaacactgatccacaacatggtagttggtgttactgatggttacgaaaaagtcttggaagtaaacggtgttggatatagagtccagaagtcaggaaagaacctgacattacacttaggctattctcatccggttgagatggttgatccagaaggacttgagtccacagttgatggtaacaagattatcatcaagggtatcgataaagaaaaagttggccagtacgcagcagaaatcagagacaagagaagacctgaaccatacaagggcaagggtatcaagtatgctgatgaagttatcagacgtaaagttggtaaaactggtaagaaataattaaaggagtgacgagaaatggttagtaagaaatcaagagaagtagttcgccagacaaagcatagaagacttcgtaatactctttctggaacagcagacagaccacgtcttgcagtattcagaagtaacaatcatatgtatgctcagattattgatgatacagttggtaatacactcgtttccgcttctacgcttgataaagaggtaaaggctgatttagagaagacaaataatgttgaagcagcagccaagttaggtactgtcattgctaagaaggcattagataaaggtatttccacagttgtatttgacagaggtggattcatttatcagggcaagattgcagcattagctgacgcagctagagaagctggattagaattttaggaggaaataacacatgagacatgaaattattgatgctagtcaattagagttaaatgaaacagtggtatcaattaaacgtgtaacaaaggttgttaagggtggacgtaacatgcgtttcacagccttagttgttgtcggtgatggcaatggtcatgttggtgcaggacttggcaaagcagctgaaatcccagaagcgatccgcaagggaaaagaagatgcaatgaagaagttgattactgtaaaacttgatgagaacaacagtattacacatgatatttctggtaagcatactggtgcttctgtattactgaagaaggctccggaaggtacaggtatcatcgctggtggtccagcccgtgccgtttgtgagttagcaggtatccagaacatccgtacaaagtcattaggttcttctaacaagcagaacgtagtacttgctacaatcgacggactccgtcagttgaaatccccagaagaagttgcaagacttcgtggtaagactgtagaagagattctcggttaaggaggaaatagatcatggcagaaaagaagttaaagattacacttgttaagtctcctatcggagcagttccaaagaacaagaagactgttgaagcattaggcctcagaaaactcaacaagactgttgagatgcctgataacgaagcagttcgtggaatgatcagacaggtaagacatttagttaaggtagaagagatttaatcaaataattaaggaggtgtcacaatggatttatcaaacttacagccggcagaaggctcaaagcacagtgataatttcagaagaggacgtggacacggttcaggcaatggcaagaccgctggtaagggtcataagggacagaaggctcgttcaggagctccaagacctggttttgaaggtggtcagatgcctttatacagacgtattcctaagagaggtttcacatgcagaaactctaaggaaatcgttggtatcaacttatcttatcttgagagatttgaagatggtgcaactgtaacagttgaatcattggttgaggctggtatcgtaaagaacaccagagacggtgttaagattcttggtaacggtgaacttactaagaagttgacagtccaggctaatgcttttagtgcaagcgctaaggaaaaaatcgaagcccttggtggtaaagcagaggtgatctaatgctagaaacactccgcaatgcatttaaaattaaagatttacgaaaaagaatcggatttacatttttaatgctcattgtagtgcgaattggaagtcagcttccaattcccggagtggatccggatgtattttcacagttatttgcaaacaatggcgatgcgctgaatttctttgatgcgattactggtggatcttttgaaaatatgtctattttcgctctgaacattacaccatacattacatcttctattatcatccagttgctgaccattgcattcccaaagttagaggaaatgcagcgtgatggggagcagggaagaaagaagattacacagattacccgttatgttacggttggattggcgatcatccagtctgttgctatggcaatcggatttggacgttccggttatctgactgagttcaacgccctgtatgttatcatgacagtcgctgctcttacagcgggttcatctgtacttatgtggatcggtgaaagaattaccgaaaagggtatcggtaacggtatctctatcgtacttgtaatcaatattctttcacgtattccgagtgatctgacttcattatttgagcagttcatctcaggaaagaccattgcaaagggtacacttgcaggtgtgatcattgcagcaatcattgttgctatggttgttctggttgtattcttgcagggggctgagcgtagaatcccggttcagtattcaaagaaaattcagggaaagagacaggttggtggtgccaactccgtgattccaatgaaggtcaatacggccggtgttattccggtcatctttgcacagtcattgttacagacaccggttatcatttgcaccttgcttggtaagacaggcggtacaagtttctggtacaagattcttcgcggtatgtcacagtcaaactggttcgatccgaataattggatttataccattggtgctgtagtgtatgtgctgctgatcatcggctttgcatatttctatacgtcaattacctttaatccgcttgagatcgctgacaacttaaagaagcagggcggttccattccgggtatccgatcaggcaagcctacgagtgattacctacaggcagttctgaacaacattatttttatcggtgctatcggactttccatcgtggcgatcatcccgatcgtatttaatggattatttggtgcaaatgtgtcctttggtggaacatccatcatcattattgttggtgttgtcatcgagacactgaagcaggtggaatcccagatgctcgtcagaaattacaagggatttttaaatgattaatgaatagacatccatatggagatactggcctagccgtatctcctaaggtgttataaggaggttttttatcgtgaagattattatgttaggtgctcccggtgccggcaaaggcacacaggcaaagcagatcgcagcaaaatatcagatccctcatatctcaacaggagatattttccgtgcgaacattaaaaatggcacagaacttggaaaaaaggcaaaggaatatatggatcagggacttttggtgccggatgaactgacctgcgatctggttatggatcgtatcggtcaggaggattgtgcaaatggatttgtactggatggatttccacgtaccattccacaggcagagagtctggatgcagcactttctaagatcggacagaagatggattttgccattgatgtcgatgtaccggattcccatatcgtaaagagaatgtcaggtcgtcgtgcctgcctttcctgtggagcaacatatcatatcgttgctattccgccaaagaaagaaggtatctgtgatgcctgcggtaaggaattagtcttaagagacgatgataagcctgaaacagtacagaagagactggatgtttatcatgagcagacccagcctctgatcgattattataagaagcagggtatcctgcattctgtagatggaacgcagccgatggaggatgtattcgccaatatcgacgcgatcataggagtctagcccatgtcagcagttaccattaaatctgcccaagaattagagtatatgcgggaggcaggcaggatccttgcaagtgtgcatcagaccttaggggatgccctttgtgagggaatgtcaacgctggagatcgatactttgggagaagagatcatccgtagtttcggatgcgagccttcctttttgaactatatgggatatccggcatctgtgtgtgtttccgtcaatgatgaagtcgtacatgggatcccgagagaagatcatatcattacaaatggcgatatcgtcagtctggatattggcgtgatctataaaggctatcattccgatgcggcgaggactcatggcgtgggagaaatctcaccggaggcacaggcgctcattgatgtgacgcgcgagagtttctttgccgggatagaacaggcgacagccggacggcatttgaatgatatttcaagtgcgatcggtgattacgcgaccaagcgcggttatggcgtggtccgggatctggtaggtcatggcattggcacacacctgcacgaagaaccggaaataccaaattaccataaatggcggcgcggcatcaagttgcagccgggtatgacctttgcgatcgagcctatgatcaatatcggtagtccaaatgtcgtatggatggatgatgagtggacggttgtgacggaggatgaatccttatctgcacattatgaaaacaccattatcattacagacggtcgaccggagatactgacactgacagaaagtgagaagcatctatggacgaattgatcttagcaaaatccaaggcaggacatgataagaatcatatctatcttgtaatgaaacggcaggatgacatcgtctatctggtcaatggaaagaccagaacttgcgataatcccaaaaagaaaaaagaaaaacatatacagccgatcaagcatttgccacaagagatcttagatctggcaaagggcaagacgatgaatgatgagttggtcggtcagattttagatctttatgtaggaggaataaaataaatgtctaaggcagatgtaatcgaagtagaaggtgttgtagtagaaaaattaccaaatgctttctttaaagtggaactggaaaatggtcaccagatcttagcaacgatcagcggaaaacttcgtatgaattatatccgtattttaccgggtgacaaggttacgatcgagatgtcaccatatgatctgacaaagggcagaatcatttggagagataagtaaaaagttgttgacaagagtttgatacttttgctatactatcaagtgcgtttatgggcatttcttttcgcgcgcctataaatgcagtagataaaagacttgtacatgcgtacaaggaacacgaaaatgatgagaagggaggcatttcctacaatgaaggtaagatcatcagtaaaacctatttgcgaaaagtgcaaagtaatcaagagaaaaggtagtgttcgtattatttgcgagaacccgaaacacaaacagagacagggctaattcataaggattagtgttatttgtatatgttatgtgcggctgatgttcccgatgattagtaaataattaggcaacattttcataatatatgcggatcaccctacataccgagggtggttagtttcgtggattcggaactcttccttactatatgtttaggaagaaaagaaccaaataaggcatatacacacatttcaggccggcaacggagctgtatagggtctatttggggatggtagtagttaatcagaaaattttatggaggtgtaaacacacatggctcgtatcgcaggtgtagatttaccaagagaaaaacgcgtagaaattggtttaacttacatttacggaattggtagagtaagttctaacaagattcttgaagcagcaaatgttgatcctagcactcgtgttaaggacttgacagacgacgaagttaagagaatcagtgctgtcattgacgaaacaatgatggtagaaggtgatttgagaagagacgtagctcttaatatcaagagactgcaggagattggatgctatcgtggtatccgtcacagaaagggacttccggttcgtggtcagaagacaaagaccaacgctagaacaagaaagggtcctaagagaactgtagcaaacaagaagaaataatttcagaaagtaggttagtttagatatggctaaagttgcaaagaaagtaacaaaaaagcgtgtaaagaaaaacgttgaacacggacaggcacatattcaggcatctttcaacaatacaattgtaacaattacagatgcacagggaaatgctttatcatgggcaagtgccggtggtcttggatttagaggttcaagaaaatctactccatatgctgcacagatggcagctgaaacagcagcaaaggctgctctcgttcatggattaaagacagtagatgttatggttaagggaccaggatcaggtagagaagcagcaattcgtgcactttctgcatgcggaatcgatgtaaccagcatcacagacgtaactccagtaccacataatggatgtcgtccaccaaagcgtagaagagtttaataggagggataatctaagatggcagtaaatagaaccccagttcttaaaagatgcagatcacttggtttggatcctgtatatttaggagtggataaaaaatcaaatagacagttaaagagatcaggaagaaagacttccgagtatggtctccagttgagagagaagcagaaggctaagtttatctatggcgtattagagaagcctttccataagtatttcgacattgcagacagaaagaagggtatgactggtgaaaaccttatgactatccttgagagccgtctggacaatgttgtattccgtatgggatttgccagaacacgtagagaagctagacaggttgtagaccacaagatgttcttggttaatggcaagcctgtaaacgtaccatcatacttggtaaaggctggcgatgttatcgaagttcgcgaagcaaagaagagccttcagagatttaaggatatcgttgaggtaacaaacggcagactcgttccggattggatcgatgttgaccttgagaagttacagggaactgtaaaagagttacctacaagagagcagatcgacgtaccagtcgatgaaatgcttatcgtcgagttgtactctaagtaattagacacaatttagcaaggtaaaccagtataaggagggccacctagtgttcgatttcgaaaaaccaaacattgagattgctgaaatctcagaagacaaaaagtatggaagatttgttgtagaacctttagagagaggctacggaactacacttggtaattcacttagaagaatcatgctttcttcattgccaggtgcggcagtaagtcaggtgaaaatcgaaggcgtattacatgagttctcatctattcctggtgttaaggaagatgtaacagagatcatcatgaacatcaagaatcttgcaatccgcaacaacagcgcaagcaacgacccgaagatcgcatacattgagttcgagggcgaaggtgttgtaagagcaagtgatattcaggtggattctgacattgagatcatgaatccggatcttgtgatcgctaatttaaatggtggtgctgacagcaaactctacatggagttgaccattacgaagggtagaggatatatcagcgcagataagaataagtcagaggacacaccaatcggtgttatcgctgttgattctatctacacaccaatcgaaagagtaaatctgaaggttgagaatactcgtgtaggtcagattactgactatgacaaacttaccttggacgtatatacaaatggtacaattcagccagacgaggcagtaagtttagccgctaaggtattaaatgagcatttaagcctcttcatcgatctttctgatcgtggaatcgaggctcaggttatggctgacaagccaatggatccaaagggcaaagtcatggatatgaacatcgatgaattagagttatctgttcgttcttacaactgcttgaagagagcaggtatcaacactgttgaggagttatgcaacaagacagcagatgatatgatgaaggttcgcaaccttggacgcaagtctttggaagaagtattaggtaagttaagcgagttaggactccagcttagaactggagacgaataaaagtcacatagggagaaccggtaagaccaaaaggcacggaactctcataatatcatggatggcataccatgcacctcgcgaataagaccaaaaggcatcgcgaagtgagccatcacataaggaggaaaatgaaatggcaaagtatagaaagttaagcagaacatcttcacagagaaaggcattactgagaaatcaggtaacaaaccttttatatcatggaagaatcgttacaacagaggctaaggcaaaggaagttcagaagatcgctgaaggaatcattgctatggctgttagagaaaaggacaacttcgatgaagttaccgtacaggctaaggttgcccgcaaggacaaagacggcaagcgtgtaaaggaagttgttgatggcaagaaggttactgtatatgatacagtagaaaagaagatcaagaaggatcagccatcccgtcttcatgcaagaagagaaatgcttaaggtattatatcctgtaaagtctgctggtaagactaagaaggagatcaaggaagttgatatgcctaagatgttattcgaggaaatcgctcctaagtatgctgaccgtaacggtggttacacaagaatcgtaaagatcggaactcgtaagggtgacggtgctttggaagtagttcttgagttagtataatccatttatgaacgtagaaaacctcccgtagtttgaaatgctgcgggaggttttttgtcgttaaaccaagttatttgaaagtaacgatcgtgacaccggcatcgccctcaccaaattcggcgagatggaattcgtcgacgatcttttgttttcttaaatattgatgtactgccttacgcagagcaccggttcccttgccgtggacgacacggaccgattttaaatgcgatacataggcatcatccagatacttatccagtttggctacggcttcgtcgccgttgagtcctaggaggttgatctccggggagatggtagcagccttgctaaagccaccattgcctgtgtaacggctctttttgccggttgtcttagcggctgtatcgttgtcctccaaaaggatcagatcattgatattgaccttggatcgcataatgcccatctgcacctgcagatcgcctctggcgtttggcagggagtagacggttccgttgatgttcatggagagcaccttgactggatcccctacgcgcagattctttggtactttgtggttctttggcttgtcgttatccttggcagcaacagaggccttctttcggctgtctgacaatttcttaccgacagcagcacgcttggcttccatcttggcaatgtccgggttggaatgactgtatttgttgaagtcgcggatggtttcgtctgcgatctgcttggcttcctgtaagatgtgggaagcgtcctcatttgcctgacgcaggatcttatccttggaggcattcagacgatcttcgcgctcttttagtttcttttgcaggttttccatttctcttttctgccgggcaatttcctcactgtcacgcatcatagagacccgtctttgttccagatcgaccatgaggtcttcaaagttctgatcatcttccgtgacgtgagtcttagcgtctgcgatcaagtcgtcggacagaccgagttttttggaaatggcgaaagcattactttttcccggaataccgatgagcagatggtaggtcgggctcagggtctctacggaaaactcacaacaggcgttttctacgcccggtgtggataaagcatacattttcagttcactgtagtgggtagttgccatggtgaggacaccgcgctcatgtaaactggataagatagcagtcgcaagggctgcgccttcttttggatccgtaccggcacacaattcatcgaaaagacagagataatgtccactggatctttccacttcccgcaagatatgcacaatgttggtcatatgtgaggagaaagtcgagagggactgttcaatactctgttcatctccaatgtcagcaaagacatcatcaaatatagataactggcttcgatccttggtcgggatatgcagtcctgcctgccccatcaggctgagaagtccgcaggtcttgagggagaccgtcttaccaccggtgtttggaccggtcacgatgagaagattgtaatccttgcccagtgtcagatcgatcggtacgacatgtttgggatccaaaagcggatgtcttgccgcgcgcagatggatgatgccatcggtatgaaactccggctcaacggcgttcatcttgcgggcgagttctcccttggcaaagatgaaatccagttctgccaagatcataaagtcctgtgagatctcctctgtatgttctgcgacaagattggacaagtcggctaagatcttttcaatctcctctgcctcctgcaattccagttcacgcagggagttgttgagattgacgatggacataggctcgataaatagggtagagccactggaggactggtcatgtaccatgccgggaacgtagttcttgtactctgccttgaccggcagacaatagcgcccgccacggactgtgatcacgccatcctgtaagtaagaacgtgtcgtattgttgtttaacatggtattcatctgggtgcggatacgctcgccgatgacattcttttgcctgcggatatttttcagcccaggactggcatcgtccgcgatgctatcttccgataagatacagtggcggatctcctgacagaccggtgtgagtggttccagattgttaaagaaatgagccagatgatcgccctcgatcgacagatcattttcactgcgtccataggtcttgacccgcttggcaacctctaaaagagatgcaatcgccaatagttccgaaatcgtcaaagaagacccgatctccagatgttttaggaaaggacgtacatccgtaatgccggagaaagagacacttccccgtttaaagatacggctgagagcatccttggtctctgcctgcatgcgtttgatctgtgaaagattggaaacaggcagaagttcacggcaataagcctttccctgtgtactgccagcacattgctccaacagagcgattattttgttgtattcgagtgtttttaatgctttcttattcataaaatgtattatacacaaaaatatattgaaagaccagtcattcaaccgtataataaaaactgcatgaatgtagtaaagatagggcgtaagggcatatagaggtatggcgcaagaagacgctctgcatagaagaggagaatgtaatgagatttatcaaagacctcacagagggagaaagaatcaatgaaatatatttgtgccgcaaaaagcaatcggcactgaccaaggcaggaaagccatacgaaagcctgatgctgcaagataagaccgggacactggatgccaagatctgggaaccgagttccatgggaattgatgactatgacgaattggattatatctgggtgcagggagatatcacatctttccagggcgcataccagttaaatatcaagagactgcgcgttgcgcaggagggcgaatacataccggcggattatcttccgtgttctgataaggacgtggatctcatgtatgaggaattgctgggatttatcgggacgatcaaggcaccatatatgaagcagttgcttttgagtttctttgcagacgaggagtttgccaagcgttttaaattccattccgctgccaagagcgtgcatcatggctatgttgggggacttttggaacatacactgggtgtgacaaagaattgtgatttttacgcacagacctatccgattttaaatcgtgatttacttttaactgcggctattttccatgatatcggaaaactggatgaactttccccgtttccacagaatgactataccgatgagggacagttgttgggacacattatgatcggggctgccaaggtgcaggagcgcatcaatacaatcgagggatttccggaggtcaaggcgagagaactgatccactgtattttggcacatcacggcgagttggaatttggttcgccaaagaagcctgcgatcgcagaggcagtggcacttagttttgcggataatatcgatgccaagatggagaccatgaaagaggctttgggcaatgtggcagagggcgatctcaagtggcagggattcaaccgtttgtttgattccaatatcagaaaaacaagtacagaggaataatatgaaaaagaatgatacctttatcctgaaaatcgaagatatgggcatcggcggtgaaggcattggcaaatatgaggggatgaccttttttgtcaaagatgccgtcattggagacgagattcttgcgggcgtgactaagctgaaaaaaggctatggctacgcccgccttgttgaaattgtgaaaccatcgccgaagcgtgtggaggctccctgcaagatagcaagacagtgcgggggatgtcagatccaaaatctctgttatgaggagcaactggttctcaaacagaaaaaagtcgaaaataacttaaggcggatcggcagtttttcacaggaacaagtggaaaaggtcatggagccagtggtcgggatggagcatccgttccgctatcgcaataaggcgcagtttccttgtggatatgataaggacggcaatatcgtctttggattttatgcggcaaggagccatcaggtcatcccgatcgatgactgcctgctgggggtcagtgagaatgcaaagatcctggctgtcatcaaagagtacatggaagcctgccatatcaagccgtatgatgagacgacagggcaaggtctgctgcgtcatgtcttgatacgcaaaggttttcatagtggacaagtcatggtctgcctgatcatcaatggggataaattgccgcaggcagatcgattggtggagagtttgtcggaagtcccgggcatgcacagcatttcttataatgtaaataaggaaaagaccaaccgtatccttggtgataaggtgcagcttttgtggggagatctgtgtatccgtgataccattcatcgggtcagagaagaagagtctgggggatttaccaggacagatgagagcgtgacttttgctatctcgccaaaatctttttatcaggtgaacccggtgcagacggagaaattgtacagtcttgctttggagtatgcgggactgacaggcaaggagatcgtctgggatctttactgcggtatcggaactatttctttatttttggcacaggcggcaaagcatgtgtatggtgtggaaattgtgccggaagccgttgcggatgccagagaaaatgccaagaataatcagatcgaaaatgcaactttttatgtgggcaaggcagaggaagtgctgccggcatgggtagaagaacatgcagatgatggtgatgcaggtctgcacccggatgtgatcgttgtggatccgccgcgcaagggttgtgatgagaagtgcctggaaaccatggttgccatggcaccggagcggatcgtttatgtcagttgcgattccgctactttggcaagagacttgaagtacttacagggaaaggggtatgaggtgctgcgcgtgcgaccggtcgaccaattttgccactccatgcatgtggagacggttgttcttttgactaaggtacagaaataaagttaaaaaaacgacttaaaataagggcttttccgagggcttggacgaaaatccaggttctcggattttctattttatgaggaaaactgatcctatgtcaaaatggatggctatttacaatgattttgttgccggttatgaaagtggaatgactatggtagagattgcaacgcgtaataatgtcagtgagcggacgatatataggtataaagcgtattatgacaagatgagaaaagtggaagttgatgagtagatcattttcattgcataaaatggattttgcgatggaaggagagaaataacctgccattcagttcacctcgataacgatgtttctgctaagcaaatatttccacttgttagtctagcctaactacgatataatggttagcataaactaacaggagggtatattttatatgaagaaaaatccactacgaatcctatggctgatcctgggatttgcagcgatcggaatcggtgctgttggtgtggtcttgccggtactgccaacaacaccctttctattattagcatcattttgtcttgctaagggttctgaaaagttccatacatggtttaccggcacaaaactatacaaaaatcacttggacgagtttgtgcaaaatcggagtatgaccttaaagacaaagttcagtctgcttctcccggcatcgggcatgctgctcttagcctttgcagcaatgccgaattggtatgggagggcatttatcatattccttatcatctttaaatatgtctattttttaccaggatcaagaccattccggtggagaaatcataagagacataacctttaggtttatactgcctaacaaagagagacttctgtttggagacatcttttagtatagttatatgagtaataaaatatgtgtcaaaggatgcagatgccgatcattacctccagatattggaatatggtgcatggcacaaatccaaaagaggtgcagcaggatgccgagggcatgcaggttatgcaggttttaggcaataatatggcattttggctgaattgtaagaatgtagcgatgaagatgggactttccatgccggaagaaccggaatttacctatacaaattttatccactaagatagataccctccctcaggttcgagggggatttgtatttcataaagtaccagaatgccattgtatttgctcttttacaagcgtagaatgagttgcgaataaaagaagaaaagagatggcattttatgaagattacattgatccatggacagagccacaaaggctcgacttatcatgtggcaaggattttagcagaaaaaatagacggagagatcacggagatcgtcttaccgcgcgactttgatcagatgtgtgtcggttgtgcccagtgcatcaaaaaggacgaaaaattgtgtccgcattatgagaaactggcaccgatcacagaggcgatcgatgcagcagaccttttgatctttgaaagtccggtttatgtttaccatgtcacttctgctatgaaggcattgttggaacattatggatggcgctggatcatgcatcgcccggaggagagcatgttcaaaaagcagatggtctgtatcgcgaccgcggcaggtggcggacaaaagaacacctgtcaggatatggcggacagtgctgcttattggggtgtggctaagacctacaagtatggtatcgctgttcgtgctatgaagtgggaagatgtgacggcaaagaccaaggacaagatcgagcgagatatggatgcgcttgcgtccaagatcaaagccaaccagggcagggtaaagccacctttaaagaccaggatatttttcccggtcatgtctatggtcttaaagaagcgtccggacagtgtggatgcaaaatactggaaggaaaaaggatggctggatggcaagcgcccttggaaataggggattgacgatacgaaagaggatttttttgacaaattccatcatggccttattgtctctgatgctgcctttaccgggagcacagggaatcacggaactgacctctttacagatcttgcagggcgtgtgtgcaggatatggcatacaaagtgggagcgtgctggaacggctggtatctttttacattcccttatttgtgtccgggagcctggtatgctatacttatgaaaaaatgagaataaaggcaggagaaaaaagatgaacatagtatgcttggacttagaaggcgtcttggtaccggagatctggatcgcatttgctgaggagagcggtatcccggaattaaagagaacgaccagagatgagccggactatgataagttgatgcattggcggcttggtattttaaaggaacatggacttggcttaaaggagattcaggagacaatcgcaaagatcgatccgatcccgggcgcaaaggaattcttagatcagttgcgggaaatgacacaggtcatcattatcagtgatacttttacccagtttgcaggacctctgatgaagaaattgggctatccgaccatcttttgtaattcgctggaagtggcagaggatggcgagattaccggttttaagatgcgcattgaaaattccaagtattccacggtcaaggcattacagtccatcggttatgatacgatcgcttccggtgacagccacaacgatctcggaatgatcaaggcgagcaaggcgggatttctctttaaatccaccgatcagatcaagcaggacaacccggatattccggcatatgagacatatgacgaattgctggcagccatcaaggcagccttataagaagcaagtgataggggcatatcttctacaagagatatgtccttcttttttgctctatttcatataattcctattgcaacagtatgaaatgtatgatacaatccaaaacatacactttagaaaagaataggggacatatacatatggcacgaggatttgagacaaaatgtttacacttagaagaggaggaaggagactgtagtcactttggcgctctttcctatcccatctatcagacggcaacgtatgcacacccgggcgtgggacagagtacaggttttgactatagccgcttgcagaatccgaccagagaacatctggaaaagattgtagcaagtctggaaaacggcattgatgcatttgcatttaccacaggcatggcggctattaccatgctgatggagttgtttgcgccgggagaccatctgatcgtagatgaagacttatatggtggaagcatccgtctgtttagccatgtatcttccaagaatgggctgaccttttcttctgtgccgtgtcatgcggtcaatgtagaggactatatccagccaaataccaaggcgatctacattgagacaccgaccaatcctatgatgaatgtgacagatatcgctgccttggctcaggtggcaaaaaagcatgacatccttttgatcgtggataatacctttttgtccccatacttccagaatccgctggatctgggagcagacattgtcatccatagcgggacgaaattcttaggcggtcacaatgatacgctggcaggctttcttgtcacaaatcgggaggatatcagagaaagatttcgtttcctgatcaagacgaccggggcgggtctggcgccatttgactgtttcctgatccagcgtgggatcaagaccttaggcatccgcatggaacgcgctcaggcaaacgctatggagatcgcgcattggctgcaaaagcagtcctgtgttactgaggtgatctatccgggcctcaaaagccatccgggacatgagatcatgaagaagcaggcgcgcggttttggtgccatgcttacttttcaggtaaaaaatcaggcgtatgcatatgctattcttggaaaagtccgcatgatcaaatatgcagagagtctgggaggcgtggaaacacttctgacctatccgatgacacagacccatgcagacgtaccggacgagatccgcaggaaaaacggcatcaccgaatgtacccttcgtatgtctgtaggcattgaggatgttaaagatcttctggcagaacttgaaaaagtctttgccgaggcagagcagaaaatagaaggctaggaaatatagaagatagagatacaaaaggagaaatcatggcagagagaaacttagattttgacagaccgatcgaccgaaaagggaccaagtgcttaaaatatgactttgcggtggagcgcggcatgccggcagatatcctgccgctttgggtggcagacatggattttcagacatcttcctatatacaggatgcgatcgtagagaccgcttcgcatgggatctttggctacagtgagtcggatgatgcctattttgaggcactgcagggatggatgcgcagacgccatcagtttgagatcgaaaagaaatgggtggtaaagacaccgggcattgtcttagcacttgccatggcggtcaaggcatacaccaaatgcggcgatggcgtgctcttgcagtcaccggtctactatcctttttctgaggttatccgcgataacggcagacgtgtgatcagcaatgatctggttctgggcgaggacaaccgctaccatatagactttgtggattttgaagacaagatcgtgcgtgagaatatcaagttatttcttctctgcaatccccacaatccggtgggacgcgtatggacggaggaagaacttttgcatataggacagatttgtctgcgtcatggtgtgacggtggtcagtgatgagatccatcatgattttatttttaaggggcaacaccatgtttttgccggactgagtgatgccttggcggatatcacagtgacctgtacctctccgagcaagacctttaatgttgcaggcttgcaggcatccaatatcatcattaaaaacgaaaatctgcgcaaggcatttatccatcaactggatgcagcaggtgtcagccagatcgggctcatggggctggttgcctgtcaggctgcctatgcacatggggacgagtggtacgaaggtatgctttcttatgtgcggggaaatattgactatgtcagatcctttgtagaagaacgattgccggatgttcggatgatcgacctggaaggaacctatctggtctggctggacttccgcggcacaggtttgtgtcaaaaggaactggaggacaaggtcatctatgaggcaggactctggctggacagtggagccatcttcggcaagtctgggaaaggctttgaacgtatcaatgtagcgtgtccgcgcagtaccgtgcaagaggcaatggagcggattgaaaaagcatttacaacataaaaggaagtaagggcaaagaggcaggagagatttctgtctctttttctatgtcaaaacgcacagcagatgtgttatactggggctatcaaaaacttggaggacattatggatatcaaagaacagattcatggattatcagaagaaatgatagaaaatctgggcaaactggttgccattgattcgcagttggcagaggcaaaggaaggcaagccatttggcgaaggaccggcagaggcgcttcgtgtgggacttgagatcgcagagggactgggctttcgcaccgtcaatctcgacaattactgtggttatgcagaaatgggcgagggggatgagatcgttggtatcgcaggacatctggatgtggttccgaccggcggtgactggacatacgatccttttaccctgacgcgtgatggcgactacgtctatggccgcggaacgacagacgataagggaccggtcatcgaggcactttacgctatgaaacttttgcgtgattccggtgtcaagttgaacaagcgtgtgcgtcttatcatgggatgtaatgaggagaccggatcgaaatgtatggagcattataatgaagttgaagaagaactttcctgtggctttacgccggatgcaagttatccgtgcatccatggggaaaaaggacatatggagatgatggcatattccaagcataccaagatcatttccatgaatggtgggttcgtctcaaatgcagtatgtgattcctgtacgaccgtgattccggcaaaggatggcttgaaggaccgtttggaaaaggttctggcagagaccgatctgcaggaatataaagtaagccaggaaggcgacaggatcacgatctttgccaagggtgtaccggcgcacgcgtctacaccgacacttggagtcaatgcagcggcagttacctgtcagagtctggcagaagcaggctttgaggacgactttgtgaccttctacaatagccatttaggcacagcgtgtgacggcgcaggcgttgggctcaagtttgcagatgagtacggagatctgaccttctgcaacggtatcgttaagactgaggacggtgtcatttcctgcaccatcgatatccgtgtgcctgtgactttaaaggcagaccgggtacgtagtatgtgccagggacatctggaagatgaaaacggacgcattgagatccttgagatcggggatccacttttcttcccgagagagtctccactggtcgaggctctttacaaggcatatgtggatgtgactggggacagcgaacaccagcctatggtcatcggcggcggcacttatgccaagtccttaaagaatattattgccttcggaccggagaaattgggtgtggattatcgcatccatggtgcagatgagtatattctggtatccggcatggaagaatccgtattgatctacatggaagcgatcaagaatcttctggcaatctaaatcataaaatttgtcaaaaaaatgcattttctaattgcgaaagagcagacagccatatataataatattcggaaataaagttacatacttttagataagaatacatttatatagattgagatagcaaatgagaacaacatatacatacaatgaaggaatcaacttccttcgggcagtttccatcttggggatcgtgctttatcacatctttccattcgccatgaagggaggctttcttggcgtctgctttttctttttaatatcggggtatctggcggcaaagaaaggtcagatcgactgggataatgagagttttcacattcgtaaatattatatcaaaaaagggctacgcatatatccggcactctatatcatggtcatggcggtcattgccttttttaccgtctttcatcaggaattattattaggggcaagagaggaagcggcaagtatctttctgggttacaacaactggtggcagatgctgacgcaggcatcctactttatgaagatcacggaacactcgccatttacccacctgtggtatctgggggtggaaatggaactcctggtcgtatggccacttctctttttactttataaaaaatggatcgagccgcgtctgggcaaaggggcgatctggttttttgtcctactggcagttgcctctgtacttgccatgggactgatgtaccatgcagacaatgtcaatcgtgtttactacggcacggatacacgtgctttttccttcttgatcggcgtggtcttaggcctcaaggaagatgactggaataaaaaaggcaacatcctctttcagggggacaatgggcgggctctttttttcgtatctttattggtgacgatcgccttgtttgtacttgtcgaaggtgagcaggcatggctttaccgtggcggtatggcgctgatcagcctgttttttgcctttatggtctatgtgatgaaccagtgcgattttacgacaacagcactgaaccggaataaggtcctgcaatggatcggcagacatagttactggatctatctctggcattatccgcttctctttattatcaacttacagcatatcttttagaaatggggtgcgtagcgatgaaagataagaagtattacaaaaaggtagccattgggatcgtggtcggtatcatttccgcgatcgcgatcgtgggctttatcaaggctccgtccaaatcttccgatcgtctggcggaagatctgcaaaaggagttcaaagccaaccagaagatgttaaaggagcaggatgcagccaagcagaccagcgccgatcaggatacatccgacagcaaggatgccaaggaggagagcggaccaaagatcacctgtgttggcgattcggttatgttgggagccgcaccggaattgatgcaggcgatcccggatggtgtgatcgacgccaaggaaagccggcaggcaagggacggcgtggagatcttagaaggtctgaaagaagaaaataaattgggctctaccgtagtgatcgaactgggcaccaactgttatttcagtcaggcgaccgggcaggagatcattgattatctgggaaaagataccaagatctactgggtcacggtctatggcaagtatttgcaggatcaggagcggacgaacggtgtgatccgccagttggcaaaggacaacaaaaatgtggaagtcattgcctgggatgccttaggggcagagaacccggactggttttataatgacggcatccatttgaatggagcaggacgcagtgcatatgcaaagatgatctgcaatgcgcttggaatcgagacgacggatgtcgacttctcacaaacgcagacgacggacaatgcaggcgaataaaaagcaccataaggagcatgtatgaattacgaacatgaggtggtcgtgccacgagcgggcatgccgtttaaaattgatatttttgaaggggcgggcggcaactacaccagagagccgcattggcacaattcggtggagatctttgccatttatgagggcagcctggtctttatcctgcgcgaaaaaaagatccgggtcgagagcggtgaatttatcatcatcaacaccaacgaactccactctatccgtgcggagaaagccaatctggcggtctatgtgcagatcccgatcagtgaattcaagaattacttgactgccgatcattttatctctttccacaaaaagggaaagggggctatggcagatctggatccggcgcagatggaggagaatgagaaaaagatgatgaccctcatccgcaatatctacgatctgaccggtacggatgtgccggggcatgaatatgagatgttgcgcgattactatgccatgatgcagttgctggtgaccgtctatcgccaggaggaggcagacgatcttttgtaccggtcttccaaggctttgcagagattatcgccgatcacggaatatatcaaaaagcattatgcggaggatatttccctacagtctttggcggagcaatttggctattccatcgaacatttatcccgtatgttccaaaaatacgcccagatcaattataagtcctatctgtccggcatccgtttagagcatgccgtggaggagatggagaagggtgataagaccatcagtgagatcgcgacccaggtcggattttcggacagccgtgccttggcaaaggcatttcagaaaaagtatggtatgctgccgagcgagtacaatcggaaaaatcgcgggcaaatgtcaaaaaattgatatgtaccaatcaagtataaagtcgaggaaaatcatttcttttgatacaataaggatgtagtttcagtgcatgaaattacatccttttttgcaaaaaacaatggtaaaagtattaagaaatattggagggtgaaacaatgacaaatattccagaagcaaaaattggtgtggtagcagtcagcagagactgtttcccggagagcctgtctgtttccagacgagaagctctgatgaaggcagtacatagtaagtatccggatttggatgtttacgagtgcccgatctgtatcgttgagagcgagatccatatggtacaggcgctggaggacatcaagaaggcaggatgcaattctctggtcgtatatcttggaaacttcggaccggagatttcagagaccttgttggcaaagcattttgaaggaccaaagatgttcattgcagcagcagaagaacacggcgatagccttttggacggcagaggcgacgcatattgcggtatgctcaacgcaagttataacttacgcctgcgcggcatcaaggcttatatcccggagtatccggtaggcgatgcagaggactgtgcagatatgatcgcagaattcgcaccgatcgcaagagccgttgtagcactttctgacttaaagatcatcagttttggaccaagaccactcaacttcttggcatgtaatgcaccgatctatcagttgtatcaactgggtatcgagattgaggagaactcagaactggatctgtttgaagccttcaataagcatgaaggggatgaaagaatccctgctgttgtagcagacatggaagcagaacttggcgcaggcaacaagaagccggagatccttgccaagttggcacagtatgagatcaccttaaaagactggatcgaagagcacaagggctatcgcaagtatgttgccatcgcaggcaagtgctggccggcattccagacccagtttggatttgtaccatgttatgtaaatagccgtctgaccaagcagggtattccggtttcctgcgaagtagatatctacggagcactcagcgagtttatcggtgctgtgatcagtcaggatgctgttacccttttggatatcaacaataccgtaccaaaggatatgtacgaagaagatatcaagggcaaatttgactataccttacaggatacctttatgggattccactgcggcaataccgcttccaacaagttatccttctgcgagatgaagtaccagaagatcatggcaagaagccttccgatcgaggtgaccaacggtaccttagagggagatatcgcaccgggagacatcacattcttccgtttgcagtcaacttccgatgccaaactccgtgcctacattgcacagggcgaagttcttccggtagcaaccaggtctttcggatccatcggtatctttgccattcctgaaatgggcagattctatcgtcatgtattgatcgagaagaacttcccacatcatggagccgttgcttttggtaattacggtaaggctttatatgaagtattcaaatatatcggtgttccggtagaggagattggatacaatcagccagccggtgtacgttatcctacagagaacccttttaaataggagataaagatgttatttattggcgtagatctcggaacatcagcagtcaagttgctgctgatggacgagacaggaaagatattaaagatggcatccaaagaatacggactttcctttccgcatccgggatggtcagagcaggatccgcaggactggtacagccagtccatcgccggtctgaaagaattattagccggttgtgacaagtcacaggtggcaggaatcagttttggcggacagatgcatggtctggtggcactggatgacaaggatcaggtgatccgtccggcgatcctgtggaatgacggcaggacgacaaagcaggtggcatatctgaatgaggtcattggcaaggacaaattatctgcctacacggcaaatattgcttttgcgggatttacggctccaaagatcctctggatgaaggaggaggaaccggagaactttgctcgcatcgccaagatcatgctaccaaaagattacctggcataccgcctgagcggtagtttttgtaccgattattcggatgcttccggtatgctgcttttagatgtcaaaaaccgcaagtggtcagaggagatgcttgcgatctgcggtatttctcaggagcagttgccaaaactttatgagagttatgaggtcgtaggcaccctgtttcctaaggtggcagaagaacttggcttatcttcggaggtcaaggtcattgcgggagcaggagataatgcggcggcggctgtcggtaccggcacggtaggcgatggggcttgcaatatctcacttggtacttccggtacgatctttatttccagcgatcagtttggcgtggatgagaagaatgccctgcattcctttgctcatgccaatggcaagtatcatttgatgggctgtatgctttccgctgcatcctgcaataaatggtggatggatgagatcttacaggaaaaagattatgtcgcagcccaaaaggatattaagactctgggacaaaatcatgtctatttcctgccatatctgatgggagagcggtcaccgcacaatgacccgcttgccagagcatgctttatgggcatgaccatggatacaggcagagccgatatgatccaggcagtttttgaaggtgtggcatttgccatgcgtgattctttggaagtggcacggagtcaggggattgacatcaagcgcaccaaaatctgtggtggcggtgccaagagcccactctggtgcaagatcatggcaaatgttttgaatttacaggtagacctcttggaggttgaagaaggtccggcactgggcggtgccatgctggcagccgtcggttgcggtgcttacggatccgtagaagaagcggcagatgcgatcgtgcgcgtggcagatacgatctcaccggagccggcattggtggaggcatacgagaaacgttatgcgaccttccgccagatttaccctgcattaaaggagatttttcctcaagtctgattctgtataacaatcactctcctttaagttgataattgataagtagcagcgacagagccagaaatggctctgttgttgcgttttttgctttgtctgatataatgggaaaatgatgaaaaaaataggaaaagtggtggggctggctcttggtgtccttgtagtcctttacggaatgttccgtctgggcgtacacgtcgtacaatatccaccggcaccccatgtaaaagaaggaaaaatacacattgcctgtgtcggtgacagtatcacctatggggcaggtgttttagggcatcggcgcagtcagtcttatccggcatatttgcaggaaaatttaggcgaaaaatatcaggtcttaaattatggactcagtggacgaacccttatggatgagggggatgtcccttaccgcagtgagaaactatatcagaaaagtctggatgctaatgcagacatttatctgctcatgctgggtaccaatgatgccaaggattaccagtgggatgaggatgcttatgccaaagagatcaaggattttgtggaggcatatcagaccgcggcaccgcaggcaaagatctatctcatgcaaccaccgcaggcattttctacgcaaaaagacggcagtatcaagtatggcatacaggatgcggtcatcggtgggcagatgtatgagatcatcgcggacacggcagagcagatgggtgtcggctatattgatctttatcagttgaccaaagaccacagcgaatggctgccggatgggatccaccccaatgccgagggcaataaagccattgcagattatatttatgagtgtatagaaaagcagtaaaagaggcaaacaaatgaaacagggaattatatttgatatggatggaacactctgggattctgccgaacaggtggcagcgtcctggacactggctttgcaccagtgcggctatgcggatgtcgttgtgacaaaagaggatatgtaccgcaccatgggacggaccatggataagatcgctgagatgctctttccttttacccagggaaaagagcgggaagatctgcttgcgacctgttgtgtcgtggaaaatgattatctgcgccaacacggtggaaaactttatccgggcttgcgtcagactatggaaactttgcagaaagcaggctatcatctttatattgtaagcaattgtcaatccggttatatcgaggcatttttagattacttttcttttcatgacctctttgaggatatcttgtgctttggcgataatggcaagccaaagggagaaaatatccgtttattatatgaaaaaaatcatctggatactgcggtttatgtgggagacatccagggagactatgatgcgaccatgcaggcgggactgccttttatccatgcagcctatggatttggacagatcgatcatccggtagaaaagatcgacgcattgatggatctgccggaagttatgaaaaagataggataggagcaaatatggaattacaggacaaatataaaaaattacaggactatctgcgggacttgggaagcgttgctgtggcattttccagcggtgtggattcgacctttttacttgccgcagccgtcgatactttaggaaaagaaaatgtcatggcagtgactgcatcctcctgctctttcccggagagagagttaaaagaagcgcaggcattttgtaaggagagaggcattcgccatgtgattacagcatctgaggaattagacattgacggcttccgccacaacccaaagaaccgctgttatctttgcaagcatgaattgtttgaaaagatccttgctattgccggggaaaaccatctggcagccgttgtggaaggctccaatatggatgataacggagactatcgtccgggattgcttgccgtggcagaactggggatcaagagcccacttcgggcagcagaactggataaagaggatatccgtgccttatccaagcagatgggtctgccgacctgggacaagcagtcatttgcctgcttatcttcccgctttgtctatggggagaccattaatgaggagcgtcttggtatggtagataaggcggagcagttacttcttgatatgggctttcatcaggtgcgcgtgcgtatccacggagaggggcaggagaccatggcacgtatcgaggttctgccacaggagatcgcacttctggtagaagatgccaagcgtgaaaaaatctattcctatttcaaggagatcggatttgcctacgtgacactggatctgggcggctaccatatgggcagcatgaatgtaggcattacagaaaaagagaagcagatataattgtacaatatgcataaaaataaaatatgtaatttgtgatacatgtataaaagagagaaaaatattttgggtattacgaagacaaaaaatttatgctacactaagcgcaattaatggtagttgcagtgggaacacgagacgaaagtttcatgttcccatttttttatgcactattatgcacttattagaaaagagaaaaaggagaattattatgccaaagaataagtttcaagatgtagtatttaccgccattatggcgacgatcatggtctacggtatggttgtttacaacgtagccctcaataccggagatgtcagcgggacaacctttgttgctgctttacatgaactgccgatcatggtaccgatcgcttttattttagagttttttgttgtcggaaagattgccagaggtctggcattttctgtgatgacaccacaggatcgcccacagttcatcacctatgcgatctccatctgcatctgctgtatcatgtgtccgaccatgagtctgatcgcaaccttcctgttcaaggagccaagttttggtacctggatcaagacatgggcaatgaacttcccgatggcgatctgctggcagatgttctactgcggaccattggtgcgtctgatcttccgtctgatcttcgagcgcaagcaggttgaggaaaaagtagaagaagttatggtagaagggaattagaaagaatttctaaaaaattgatgtaaaaataatacaaaaatcgtaggaattatacttttatccatgaaaaaaatcggttatgatacaaatggttgtatataaccgattttttgactttaaaatacattaagggatagattatggaagcattggaaaagacatggcaggaagtcctgtctatggaaaaagatacttatactttggttgataccagggacgaactgtcctttgcctatggcaatataccgggcagtatcaatctctcggaggaagcccttttagcagaggctgaccagtggaaggacaagacgctggtcttgtattgtaaaaagggagaacacagtttagaggtagcaggacatctgcgcgaggcgggatggcaggaggtctatagcctaaagggaggttatcttggctggctcatgcagcggatgcagacggaggatgagacaagccagccggagatcacgacctttgacatcgagcagagtctgcgtaaaaagtttaaaaagaccatctggagcaagtttaccaaggcagtccgtgagtatgaattggtgcaggagggcgataagatcgctgtctgtatttccggcggtaaggattccatgctcatggcaaagttgtttcaggaattgcagcgccatcacaaggtaaactttgatctggtatttctggtcatggatccgggatatagcaaggaaaaccgtgctattatcgagaataatgccaagaaactgggcattccgatcacggtctttgagtcagatatttttgatgcggtctttgagatcgagaaatcgccatgttatctgtgcgcgcgtatgcgcagagggcatctctaccacaaggcacaggaactgggctgcaacaagatcgctctgggacatcattatgatgatgtgatcgagactatccttatgggaatgctttacggggcacagatgcagaccatgatgccaaaactgcacagcacgaattttgagggtatgcagttgatacgtccgctttatctggtgcgtgaggatgacatcaagaaatggcgtgactacaaccatctgtatttcctgcaatgtgcctgcaaatttacagagacatgttcttcctgtcaggataacggacagaacaattccaagcgtctggaagtcaaaaatctgatccgcgagatgaaaaagaccaatccttatgtggagggtaatatctttaagagtgtggaaaatgtaaacttgagcacggtcatcgcctacaaaaaagacggtgtaaagcatcattttctggaaacttatgatgatgcgccagttgtaaagagggaagataatgaaagcgaataaaaaagaagttgatatgatccatggaccgcttcttggcaagatgatcgcctttacgatccctgtgatcttatcgggtgtgctgcagctcctatttaatgcagcggatattattgttgtcgggcgttttgctgggaatgagtcactggcagccgtaggttcgacctcctctttgatcaatcttttagtcaatctttttatggggctgtctgtcggtgccaatgtgacggtcgccttttactttggctgtgaccacagggaaaaggtgcgggataccattcatacgagtattacacttagtcttgtgtgcggcgtatttttaagtatctttggtatgctgacatcccatcaactcctggtctggatgggatcgccggatgatgttatcggtctggcaacgacctatctgcagatttatttcttaggtatgccggcgctgcttacctacaactttggcgctgccatcctgcgtgcgatcggcaataccaggacgccactgtattttttgatggcatccggcattgtgaatgtggtattaaatctggtacttgttattggattttccatggacgttgcaggcgttgcaatcgcgacggtcgtttccgaatacatttctgcggcactggtgctttactatctgcataagcagagcgatgtcatgcatttttctttcaaatatctggggatcaagacggatgttttgggacgaatcatccggatcggacttccggcgggaattcagggaacggtattttccctgtcaaatgttgtgatccagtctgccatcaattcctttggcagtacggtcattgcgggcaattccgcagccagcaacatcgaggggtttgtctatatggcaatgaatgcggtatcgcagacggcagttacctttaccagtcagaactttggcgcgggcgacaagggacgtatcaaaaaggtcatgttcctctgtcttggtatcgtggttgccgtagggcttatcactggggagagtgcttatcttttcggcagacaacttttacatatttataccgatagtcagccggtcgtagaggcgggactggtgcgtatgtcttatatctgtaccacttattttttgtgtggtatgatggataccatggtgggatgtttacgaggcatcggcaaatccattttgcctatgatcatgtccatcgttggggcttgcgggctgcgtctggtctggatcgcaacgatctttcagatacaccatacagaggggattttatatatggcgtatccgatcacctgggcgatcacgctcagcgcacatatcattacttatgtgatctgttttaagcggatacggtataagaatttctaggggaagacaggcagataagagataattgggaacggtttacaatgaaaaataaagcacaaaagaatgggtataaacacacactgcaaaagcggtttctgacacttttactggtcagcatcatcttggcatccggcatgatcggcggtgccgggatcgccagtgcgcagcgggtcatcaatgaggattcttcacagatcatgaatctgctctgcgaacagaaggcgagcgagatcaatctgatgttaaaagagatcgccagttcggtcgacatggattattcttatgtttccagaaggctttcacaggatagatctatgtggaacgatacggaatacatggaagattatatgcagcatgtgcatgacgaactggataatacggcacgcaacacctctgccgcagtttctatttatatgcgactgaatccggatattttccggacaacgcagggtgtatttctggtaaagaatgccatcggaaagtttacggaacgggcaccgaccgatatccaggcatacgatccgaccgaccgtgagcatgtgggctggtactatgagccgatcgagcagggacaggcgatctggatggagccgtactacaaccagaatactcgtgtctatatgacatcctatgttatccctatttaccgggatgatacgctgatcggtgtgatcggtatggatatcagcatggaaaaattacaggattcggtcaaaaatctttcggcttatgataccgggtatgcctttttggtttccgatgacggagatctggtctatcacaaggactatgaaaacgggatcacggtcgatcagtttgacgataatctgacgcaggttcacgacatcttagatacagagcgcatagagggaaagatctattcctatacctggaagggagcatccaagcgcctggtttacaaaaaactgaccaataacatgtatctggtcttatgtgcaccggcatcggagattgatgtttcgcgcaatagccttgccatgcagtgtctggtgatcctctttgtcgtgcttttgatcgcgtcgatcgcgggcatacatatggtgcaccgcatcacaaagcctttgcgtggtctgacagaggctgccaaacaggtggcaggcggcgattggaatgccaagatcgaggcgggcggtcaggatgaggtcggcgtgctggcaacgaccttgcagaatactctggagcagttgcgtcacaatgtggaggttgccaattatatggcagatcgtgatactttgacgggactttataaccgctattatatgacgcagttctgcggcaaacatatgatggaaggagaaaaagaggcaggggtcctctactgtgacctgaatgggctcaaatatatgaatgaccactacggacatgcaaggggcgatcagatgatcatggaggcggcagatcagatccgccagtgtttcccgatcgacatgtgctgtcgtatgggcggggatgagtttgtagtctgtgtattcggacgcagtgaaaaggattttcgcaagcaggtggaagaattgcgcagcaagatgtgcttgggtcaactggcatcagcatctatcggctggtgctggtgtgaggagatagaggattttgatgccatgatgacagaggctgaaaatgccatgtatcaggaaaaacaaaagttttatgagcagcatccaaagcagaagcgataggaggaaaaggaaatggaaaaatttgatctgttgacattgggagaggttttgcttcgcctttcaccaaaggaaaataaaagaatcgtaagaagcacagaatttgaaagtcacgtgggcggcgcggaattaaatgtcgcatccggggtttccctcttgggactgcataccggtattatttctaaactgccggcaaatgcgatcggggaactggcaagaagtaaggtgcgttccatgaatgtcagcgatgactatctggtatgggatcacacggaggatgcaagacttggtgcttatttttatgagagtgctaccttccctagaaaaccgcaggtggtctatgaccgaaagcacagttccatcaccaggatctcgatcgacgagttcccggaggatatgtataagtctacccggtgtttccatgtatccggcatcaccttagcactttgtccggaagcaaggacttgtgccatcgaaatgatcaagcgtttcaaggaggcaggggccctgatctcctttgatgtcaacttccgactcaacttatggacaggagccgaggcaaaggcatgtattgagcagatcctgccatatgtggatatctttttctgctctgaggatacggcgcgcctgacctttttaaaggaaggatccctagaagacatcatgcgctcctttaccgctgagtatccgatccagatcgtggcatccacccagcgtgtggtacacagtccaaagcagcacagttttggctctgtgatctacgaggcaaagagtgataccttctataccgagcagccttatgagaagatcgatgtagttgaccgcatcggcagtggggatgcttattgtggcggtatgctatatggcctgctttcttccgatatggattgcaggaaggcacttgcttttggtaatgcctgcagtgctatcaaaaataccattccgggagatctgccgtcatctgatctgcatgaggtggaatatgtcattgcagaccacaacgcaaaaggtcctgtttcggaaatgaacagataagaatatttgaacagacaaggctttcgtacatgggtgcggaagcctttttctttcgcaaaaaataaatagtgtcctcttgacatataccccataggggtatataatccagaccgtagggacgttccttttgccacatggagtgtccctacggtctgctacaatccgaagaaaggagaaagagatggaagaaaagatggaaaatacctgtccgcactgcagttcttgtaataaaaaagtgcgcgatgagaaagaatataaagatatgatgaaccgtttgagccgtattgaaggtcaggtgcgaggggtcaaaggcatggtggaaaacgatgcctattgcgtggatattttgacccaggtcagcgcgatcacatctgctctcaatagttttaataaagttttgcttgccaaccatatcaagacctgtgtggcaaatgatatccgggaaggcaagaatgaaaaggtggacgaactggtcgttaccttacagaaattgatgaaataaggaggacagacatgcaaaaatatgacgtaacgggaatgtcctgcgcggcatgttcggcgcgcgtagaaaaggtcgtgcgaaatgtggacggcgtgacggatgtagcggtcaacctgttgaccaattccatgaatgtggaaggacatgcggatagcggagccattatcgcagcagtcacagaagccggttatggtgcatccttaaaagaagatggacagggaggacaggcgcaggataagagtggagcaagtgaagccgaccagttagcgagcacacaaaagaaagcctttcgtactttgcgcaaccgcctgatcgcatccctttgctttttattgccgctcatgtatgtttctatgggacatatgatgtggggctggcctttgccatcctttatggcaggcaatcatgtggcaatgggcttgtatcagttgcttttgacggtggcggtcatggtcatcaatcaaaagttcttcatcagcggctttaccagcgcatggcacaagtctcccaatatggataccctggtagccatgggagcgggcgcatcttttggctatagtgtctacgcccttttcgctatgaccggggcacagatggcaggcgatatggacagcgttatgaagtatctggattctttctattttgaatctgcagccatgatcctgaccttgatcacggtcggaaagatgttggaggcatattccaagggaaggacgaccgatgctctgcgtgggctgatggaactggcaccaaaacaggcaacgatccttgtggatggtgcagagaaaaaggtgccgatcgatcaggtcaaggtggatgatgtctttgtggtacgtccgggcgagagcattccggtggatggcgtgatcctttcgggacaaagcgccattgatgaatccgcgatctccggtgagagtatcccggtagacaaagaggtgggcgatgaagtgacggctgcgaccatcaatgcttccggttttattaccgcaaaggctacgcgtgtcggctcggataccacacttgccaagatcattcacatggtcagtgatgcatcggcaaccaaggcaccgatcgccaaggtggcagacaagatatccggtatttttgtcccggcagtcttaggtatcgctctggtggcatttttgatctggcttgctgtcggacagacctttggttttgcactttcccgtgccattgccgtactggtgatctcctgcccgtgtgcgcttggactggcaacgccggtagcgatcatggtcggcaacggtgtcggtgccaagaagggcatcctctttaagaatgcaacttctctggaacaggcaggtaagacgacaacagttgtcttagataagacaggtacgatcactaagggtcaaccaaaggtgactgatatcgtaccgcaggaaggcatttcggcagaggaattactggcactggcggcatccttggaaagcaagagcgaacatccgcttgccaaagcagtgatcgcctacggagaggcacaaaacattgtctcggatccggtagagggatttgagagcatggcaggcaatggtctgtcggggctgtggcgtggcaaacgcatttacggtggcaaggaagaatttatcgcaccgcttgccaaggactctttttctgcttttgcaaagagccatgagatcgaacttttggcaaagcagggaaagacaccgctctttttctccagccaggatcaattttacggtatgatctgtgtggcagatgagatgaaagaggacagtccgcaggcgatcgcagaactgaaaaatatgggcgtgcatgtcgtcatgctgacgggtgacagggtagagacagcccaggcgatcggagcgcgtgcaggcgtagacgaggtcatcgcgggggttctgccggatggcaaagaagaagtggtccgccgcttctctcaagatggtcacgtcatgatggtaggcgatggtatcaatgatgcccctgctctgatgcgagcggatgttggtgttgccattggcgcaggtacggatattgccatagatgccgctgatgtggtgctggtcaacagccgtcttacggatgtggcagccgccatccgcttgagccgtagaacgcttcggaatatccacgaaaacctcttttgggcatttttctacaatgccattggtattccgttggcagccggactctggtatccgtttaccggatgggagttaaacccgatgtttggtgcggcggcaatgagcctttccagtttctgcgtcgtgaccaacgccctgcgtttgaattttgtcgatatttacagtaccaagcgggataaaaaagtcaaaggacaaaaagcaaaatcgcacgttacagaagcgcaagatactgttataatagaagacaagacaaaggcggatcaaaaagaaaagatagataaggagaattctgacatggaagaaacattaaaagttaagggaatgatgtgtgcacattgcgaggcacacgtaaaggaagcactggagaagatcgacggtgtgaccgaggcaaaggcagatcatgaggcatgcgaggtcgtggtcaagatgagcgcaccggtagccgaggatgtgcttgctgccgcagtaaaagatgccggatatgaatttgaaggaataaaataaaaaaatgccgcagtctttgatcggactgcggtttttttataaatttttaccggaaaatatagaaaggaaagatgtaagagatgataaacgaaacttacaaggcgatgttgggcggcaaatccatcatccgtgaattgagtgaatacgcgacaaaaaggggagagaagatcgggtatgacaatgtttttgactacagtctgggcaatcccagcgtgccttgtgccgaggattataccaaggcgatcattgacatgcatgagaccatgaatcccatggaattgcacggttacagcccatctaccaccattccttcggtgcgcaaagcggtcgcagagagcctgaaccggcgctttggcatgcagtacggcatggaacatatctttatgacgagtggtgcagcaggcgcattggcgcatgccctgcgtgcggttaccaaaccgggcgacacggtgctgacctttgcaccatttttcccggaatatacaccttatgttgaaggaaccggggcaaagttagaggttgtgccggcacataccaaggatttccagatcaattttgaggcttttgaggaaatgctgacaggggacgtgatggcggtgctcatcaatacaccaaacaatccgtccggtatcgtctattcggaggagaccatagagcatttggcagatcttttgcgtcaaaaggaaaaggcattcggacatgagatctttttgatcagcgatgaaccataccgtgagattgcctttgatggaaaaaacgtgccgtatccgagccgctattatgacaacacgctctcctgctattctttttccaagagtctgagtcttccgggcgagcgtattggctatgtggcagtcaatccaaaggcggtggatgcagatcttttagtgccgatcatggcgcagatcagccgtggaaccggacacaactgtccgtcatcttcggtgcaactggctgtggcacgcgtgttggatgagacaagtgatctttccgtttatgagaccaatatgaatcttttgtatgataccttggtagacctgggctttacggtggtgcgtccgggaggtaccttttatattttcccgaaggcacttgaggaagatgctaatgtcttttgccagaaggcaaaggaatacgatctgatcctggtgccgtctgataattttggtgtgccggggtatttccgtatggcttactgcattgatacggaaaaggtcaagaggagcattccggtattgcgcagatttgtagaggagcaatatccggatcgttagaaggaattttgtaattatatggtttatggtggatagacaaaagataggagcaggcagatgcaggatacgacaatcagtttgtgcatgatcgtaaaaaatgaagaaagggtgctggcaaggtgtctggattccgtcgcagatcttgtggatgagatcattattgtagacacaggatcgacggatgcgacaaaggagatcgccgcacgctataccgagcagatctacgattttgtctggcaggatgattttgcggcagcccgtaatttttccttttctaaggcaagcatggattacatctatgcgccggatgcggacgaggtcttagacgaggaaaaccggcaggcttttctgaaactgaaagcggcactcctgccggaagttgagatcgtgcagatgaagtatcatacggtgacggactataatacagtcttgaatgccaagatggaataccgtccgaaactcttcaaacgcctgcggacatttacatggatcgatccggtgcatgagacggtgcgtctggatccggtcgtttttgacagtgatatcgtgatcagtcatatgccggaaaatctacacagtaagcgggatttttctatttttaccaaggcaatcgcaggggatggcgggctgtcggataagttgcagcggatgtatgccatggaattgtataagaccggggatattcttgatcttatggatgcatgtccttattttttaaggatctatgagacagagagtcaggcagataaacgctcgcgcgctgctgctatcctgcttcggacatatcgcaggctgggaggggagcgggactttttcaagatcgccatcaaagagatgacagataagccatccagtgagatctgcgcagaattgggtgattactatagcgatgccggtgatgcgaaagaggcggctctctggtactacaatgcagcctatgaatccgaggcaatcctggatgtgcatgcgggcagtgaccgtgcactggagggactggtagcgtcatacgaggaagtgcttgcgcaggaactttccgaggaggagcgggactatttcatggaagccctcttgcaggcgaagcgggcgctggaagaaatagaggaataaatggacaccggagatgatccggtgtcttttcttatacaaaaatattgtaattcgtgacataaggtggtagtataaaagtatggtaaatttttaacaatcttgtgaggaggttacggaaatggatttttcgcaggaatatcagagcaaactaaaaacggcagatgaggctgttaaagttgtgcagtcgggggactgggtagattatggttggtgtacgggaacaccggatgccctggatcgggcattggcaagacgtacggatgaattgcgtgatgtcaaggtgcgcggtggtatcttattaaagccactggctatctttgaacgagaggatgcaggggagcatttttgctggaactcatggcatatgggaggtttggagagaaaactcattgccagaggctgcgcatactatagcccgcttcgctattctgaactgccacgttattatagagagaacattcagccggatgacgttgctatgtttgttgttgcaccaatggataagcatggttacttcaatttcggaccgaatgcatcccatttgatggcgatttgcgaaacggcaaaacatatcatcgttgaggtcaatgagaacatgcctcgttgtcttggcggcatggaagaaggcatacatatttcccaggtggatgcgatcgtggaaggagaaaaccctgcaatcggtgagctcggcggtggtggtcctgcaaccgatattgataaggcagtggcaaaattgatcgtggatgagatcccgaacggcgcttgtctacaacttggtatcggtggtatgccgaacgcggttggatccctgatcgccgaatcggatctgaaggatctgggcgtgcatacagaaatgtatgtggatgcttttgtcgatattgcgcgtgcgggcaagatcaatggatccaagaagaatattgaccgcttccgtcagacatacgcatttggtgccggcacgaaaaaaatgtatgattatctggacgaaaatccggaattgatgagcgcaccggtagattatacgaacgatgtgagaaacattgctaaactggataattttatttcaatcaacaatgcagttgattttgatctgttcggacagatcaacgcagagtctgcgggaaccaagcatatcagcggtgcaggcggacaactggatttcgttatgggtgcatatatgtcacatggcggtaagagtatcgtatgctgttcttccacctttaccagaaaggacggcaccgtggaatcccgtattcagccgacattggcaccgggatccatcgttacagataccagagccaacacgcactatctggtaaccgaatatggcaaggtctgcctcaagggattgtcgacatgggaacgaacggagaagatcatttccattgcacatccggatttcagagactggttgatcgaagaagccgacaagatgcatatctggagaagaagtaacaagtagagacaataatgggacacctcttttgctaagatggaatcacaggaaatggatgacatctggtgaaaggggtgttttttatgcagaaaaattttatgatcggcatatccagccgtgccttgttcgatttggaagaggaaaatgcgatctttgaaagtcagggggtggaggcttatgtggattatcagatcgcacatgaaaaagaagttttagcaccgggagcggcgttttccttaattcaggcttttcttgccttgaaccgggagagggacagccggcagatcgaagtagtcattatgtctaaaaatagtgcggacgcggcactccgcatttttcactcgatcgaatattatgggctggatatcacgcgggcagccttgaccggtgggggtgccattgcgccctatctgcgtgcctatggcgtggatctatatttatcctttaatgcagaggaggtcaagaacgccctgcaatcagggatagccgccggtgtcttactgcccagaggagcgatggaaaatggggggcatgctgtttcgacaaggactttcccgggaacctatcggcaagcctatatgcgggggcagatcaggcagcccttggaaatccgcatagcctttgatggggacgcagtcttattttccggggaagcagagcgtacgtttcaagaacagggagtggaggctttttgtgcacaggaaagagaactggcagatgtcccgctgcgtccgggaccttttgcccatgttttgcagttgatctcagaattgcagcagaggacagaagaaatgcgggaaggctggaaagaggatgccggaataccgcggatctgcacagcccttgtcacggcgcggagtgctccggcacatgaacgcgtgatccgtaccttacgggcatgggggcttcggatcgaccaggccttttttctgggagggatggataagagccgggtcttggaggcatttggggcacacatcttttttgatgataatgaggagaatgtggagaatgcttccgcggtcgtgctttccgccagagttccctgggtggaggagacgatggagcagcaggtaggataaaagatgtgaaagaaaaacagcagatcgaccccggcatatgctatactgttagggtatgagatcttggaatgagagaagagggagagatatgatctggaattgttttatggttggtcttggaggatttgtaggaagtattttgcgctatctggttggtctgctgccgctggatacaggaaatggctttccgataaagacatttttgatcaatcttatcggtgcttttctgctgggctttctttcggtatgcttgggaaagcgtgtcgatctgcaaccccaggtagcattgtttttaaaggtaggtttgtgtggtggatttacgacgttttccacctttgcttatgagtcatcctctttggtacaggatgggcatatgggcgtggcgcttatttatatgataggtagtttagtattaggagttttggctgcattgctgggacagtggatcgcggggtaaaaagatgacagagaaaaaacaggcaggctacaacaagaaaatgcaaaagaatgatacgagagagagacaggagtgcccttatcataagaaatgtggcggttgtgagtatagcggcataccatatgaggaacaattacaaaaaa

SEQ ID NO: 12571 - DNA, 57273 bp, Unknown
  gut microbiota DNA sequence
cttatccatattattatcgcaataaagtgcatgcggtgtatgcgcaaaagaaaaatggcgaggttatctgtggtacatatgaaaaagatagtcatcgcgttgtagatatcgaatcctgtttgttagagaataagggatcaactgctattattcgtgatattcgaggacttttgcggtcgtttaagataaagccatataacgaagatacgggttatggcttattgcgtcacgtactggtacgtcatgcacatgcgaccggggaagtgatggtggttttagtattggcatcaccagttatgccatcaaagaacaactttgttaaggctttacgaaaaatgcatccggaaattacgacggttgttttaaatatcaatgggcgtaatacaagtatggtgcttggcgaacaggagaaggtgctttatggtaaggggtatattgtagatgaacttatggggatgcgtttccgtatttctgcaaagtctttttatcaggtaaatccaatacagaccaaacatctgtatcagggagcaatttctatggctggtctcagtggaaaagaacgtgtgctagatgcctattgtggaacaggaaccattggaatgattgcatcccgtgatgcgaaagaagttgttggtgtggaattgaaccgcgatgccgtgcgtgatgccattaccaatgcaaagaccaaccaggcaagaaatatacggtttgtctgtgaggatgccacagaatatatttgcaaagcagcagtcaataaggagcattttgacgtggttcttatggatccgccgcgtgcaggaagtaccaaggagtttattgactccgtcattgcacttgcgccggagcgcgtggtttacgtctcctgcaatccgcagactttagcgcgggatctgaagtggttccgtcggggatataaggtggaaaagatgcgtccttatgacatgttcccgctgaccgatcactgtgaggtggtgtgcagtctggtgcgcaagtgatacaaataaccaaagtgaggaacttacagcatgaatgaaaccagagacatattaacgctggcagtggaaatcggcgatgccatgcttcaaaatggtggtgagatctaccgcgtggaagataccgttatgaagatcatggcggcttatcagttagaggattatgatgtatacgtgctatccaatggtatctttgccagtgccaatgagggaaaggaagatgcctgtagcatgattcggcatgtgcccttaggcagtgtaaatctgctcaagatatcaaaactcaaccagttagccagagacatttgtgataagaaatgtacgatatctgaggcttgggatcgtatggatgccatcatacatcacaagaaggatccactctggattcgtgtcctatgtaccggtatcggatccggtggttttgccattttgttcggagcgaattttttggatggatccattgcatttggcattggtcttttattacaacttttgatgttatggtttgaaaaacaccatgttgggcgctttgccaatctgctaatctgtagtatgtttgtaacagccctgagcctgcttcctatgtgtatgggacttccggtttcgcaggacaagatagtgattggctgtatcatgccactggtaccgggcattgcctttacgacctccatccgtgatttctataatagtgattatctgtcaggtgtgatccatctcttggacgcgcttttgactgcactctttatttcggttggcgttggcctgacaatctatatttttcagagtttgggaggtgttatgtcatgattgggacgatttttttgcattttatcattgctatgatcgcgacgttagcctttgctgttctgtttcaagcacctaaatcagaatggggtttatgtggggtgacaggtggtgtgggctggtttgtctatgaatatctgcattcacagcagggctggcatctgatgttggcaacgattgtggcaacactggccttgaccttgctttcacgctttttcgcggtacttcgcaagcatccggcaacggtctatctgttgtcagggatattcccgctggtgccgggagccgggatttactatgcagccttttatctaatcagcggtaatatggaaatgttttcgatcaaaggaactgagacagttgagacggcaggggcgattgttatcggtatcatccttgcaatgggacttccgcaggcatggctcaaccatctgaaaaagaaggaaaagaaagcaatataaagcataagaaaagcgccggagatcaaaagtctccggcgttttcccatgttgcgccaccatcagtagaaatatattttacacccgtggtatcaccagcttccggtcttgctaaaacgaccaactgatctttatcttttcgtggcatatcaaagtagaattcgccggttgtagcacctggaaattctatttttgtaaaagttttccctccatctgttgttcgataaaggttggaccaatcttgccccgcacatgtcagaccaatgatgccattattctcatcgtaaaatacgagaccttcgctgacaccaatatttccgataaaaggatcttcattaatcatttcccacgtgttaccgccgtctgttgttttttgtaagccataaaaacggcttcctgcggcagcatctaaaatcttaaatttccacccaatttgttctgtgagataaaaatattgtataccatcttcgtcagtatcacatttgccgattcctgaggagtttttagtagaagcatccgtttgctcctgttctttttgttcctgcaaagatgtgtattgggggttggcgatataacgtattggtgtaaccgtatcaagctctggcatgtgtaaggatacttcatatccttttacagacccaccagcatttagcttttggatttcggaacgatctccggaaaccgcaacgagaccatcttttatttcaaaagaacgatttcctaaatatagtaattggtaggtggagccatcataagtttgttcccactctgccacctgttctttccagttggccagtgcaagcacatcaatcataggagacagtaatgcatctgtatcaaaatctgccgatgcatacccatccatagtaacataaatttttttgctttttttggcattgtaactgattaaataggtgcgtgtctgatcgttctcatcttttccatataagaaaccttcgattgcacttatttttcctgtaccgtcaaaatctacagtaaattgttctgcaatatagagtttttccggaaggtttaatgcggcagttaaatcatccagaatgccttctataccagtgtcaaaaacattattatgtgtcaatgcaacttcgcgtgtatgtattaaatcttgaattttccaggctaattttccattataaggaatagcagagtagataatgttggatgtaaaaagaacggttgcaccgatcagggacatcaatttcacgaggaaagctgttttgtttttgatttttggcgtatctgttatgagcaggtagattaaggtagcgcaaaataccagcaatcccagcaacatccagagcaagtgccttttgacgccaccgtagcggcatagggcacttaggtgatagaggacaaaaatatagcagagaatcatcaggctttctgcgaccagtcttttatttttcatggaaaactcctttatctttgcctagtaatacatctttactacttatagcactaatataaaaagaagtaaattcgcttcatgaatatttcataatcattaggagcaaatactatgatattgacaaaaaataagaatatcaatataattatcagaagtaattatcaaaggtaactacatggaggtgtgaaaataaaatggacataaaaacaatcaaggcaatgtttgatgcctgttatcaggcaaagcgggtgcgagaactccttccaccgctgccggagggcgtcagtccttcctatattcattatctggatacgatcaccatgctggaaaaaaagggaatccgcgtcaaggtttctgacatcagcgaggctttgtccctcccccgtccgggtgtgacacgcactgtcaaggagatggaaaacaggggctatctgtacaagcagtgttccgaaagtgatggcaggatcatctatcttttgctaaccgaaacaggcaaggaattgctgaaaaaatacgatagggagtatttcaggaagatacaaccattttttgatgttatttcagatgatgaggcagaggttatgatgcaaaccatcgagaaaatgtatcaaattatgtcagagaggagtatttcaatcaatgaacgatagagccgattttacacaagggagcattttaaaaaagttattttggttcatgttgccggttttgggagccttggtcttacaggcggcttatggtgcagttgacctgctggtggttggtcggtttggttcgaccgaaggactttctgcggtatcgaccggcagtcaggtcttaaatcttgtcaccttcgttgtgacacagcttgctatgggtgttactgtcttgatcgcaaggtatttgggagaaaaaagagaagaagtcatcggctcggtaatgggcggtgcactcgcagtgtttgccgtgctatcggtggtgctttttgtacttttggttgtgtttgcaaatccaatttccgtcttgatgcaggctccaaaggaggcgctaacacttacgaaatcttatgtgcgtatatgtggctgcggtatcttttttattgtggcatacaatcttttggctgcaatctttcgtggactgggagacagcaagtcgccgcttttgtttgttcttgtcgcatgtatcgtaaacatcgtaggagatctgttttttgtggcaggcttgcatatggatgcagcaggcgcagcactggcaacggttatggcgcaggcagtcagcgttgtgtgcgcgatcctgatacttttgaaaaagaaactgccgtttaccataaaaagatccgattttgggtttaacagccaatgtagaaaattcctttctatcggactaccactcgccttacaggagtttttgacccaactttcttttcttgccctctgtgcctttgtcaacagattaggacttgaggcatcctcaggttatggcgtggcatgcaagatcgtcaactttgctatgttgatcccgagttctcttatgcagtccatggcatcctttgtctcacaaaatgtgggagccggcaatcagaaacgtgccaagaaagccatgtttacgggcattggtataggactatcctttggttgcgtggtctttttactcgtcatgttaaaaggagatctgctggcaggtatctttaccacagatccggcagtgatcgccaatggttttgcctacctcaagggctttgcaccggagacaattgtaacggcagtgcttttctccatgatcggctatttcaacggcaataaccagacactctgggttatggtacagggtttggtgcagacacttctggttcgtttgccatttgcctatatcatgagcatccagccaaatgccagtttgacgaagatcggactggcggcaccggtatcaacgaccgtcggtatcatattaaatgtgctcttttatctgcatctgaaccgaaaaaagaaggacatcttagcaaagtagaggatatcagaaatgatttgtgctataatagcgggcataaatgtggtcgcatacagacatataacgcaggaggatagtttatggaaatccgggtactccgatattttcttacggtagcaaaagaacagagttttaccaaggcagcagaagtcctgcacattacacaaccgaccttatcgcgccaattggcaggcttggaaaaagaattgggcgtgacattattcgatcgtagcggacatcatattacgctgacggacgagggactcctgttaaaaaggcgtgcgctggaaatcgtagatatggaagaaaagatcgtggatgaactacgcggaaatcaggaaccgatcgccggaaagatcatgattggctgtggcgagtttatggcagtggaaacgctggcaaaaatatgtcggtcttattgcaaaaagtatcctttggtacagtttgccatacatacgggaacggcagatacaattctggaaatgatgagtaaggggatcgtggacattggcttgttcttagaacctgtcagtacagagaatctggattatatccgcctgccggggagcgatcattgggtagtggcaatgaaagcagatgatccgcttgcaaaaaaagatgagatcacaaaagcagatttaaaacacctacccttgatcctgccggaacgaaccaatgtacagagtgagttggcgaactggtttggcaaggactttcaaaaactgcatatcgtagcaaccagcaatctgggtaccaatgccggtgtgttggcactggaaggtattggctatcccatttccattgaaggtgcggtgcgttattggcgagaagatcttttggtgcaaaaaaggttatctccggccatagaaaccagtacagtcattgcatggagaagaaacattccatgctctcctgcggtagaatgttttataaaagagttgaatgcctatgaggcataatgcgacatgctatataagtattagacataatagaacctgggattatataatgaatgcgtaagttagcgaaagaggctttttacgcattcattttatttttggaggtgtatcttatggcaaaaagattagtggcatattttagcgcgagcagtacgacaaaaaaagtggcagaaatgctggcagaagcagcaaaagccgatctgtatgaaatcgaacccaaagttccttacacccgggcagatctggactggatgaacaagaaatcacgcagcagtgtcgagatgaacgacaagaagattcgaccggagatcgcagaggaaaatctggatatgtcagcctatgacgagatccttttgggctttcctaaaatggagtacagtttatagtagtgtatagcgtgtaccaagttataattatggggttgaaaataacagtatacacagataatgtggaaaaatatgatcttaccggcaaaaagattattctgtttgcaacttccggtggcagtggatttggcaataccgtacaggaattgcagccgtcagcaccgggggcagagattgtcgagggtaaactcttaaacagagccgacaaacaggaaatcgaagactgggtaaagacattataaaaaggagaggataagattatggcaaagatcacgcagacagcaggaagaaatgcactcggtgagtttgcaccggaatttgcacattataatgatgatgttctctttggagagaattggaacaatgaagatattgatgtaaagactaggagtatcattaccgtggtagcccttatggcatccggtatcacagattcttctttgaagtttcatctggaaaatgccaaggcacatggtgtgacgcaaaaggagattgcggctatcatcacacatgttgctttttatgcaggctggccgaagggctgggcagtctttaacctagcaaaagatgtatggagcgtaaatgagggcgaccttccatatgaggatgaggcaatgcgcgcgcacgcaaaagaaatggttttcccaatcggtgcaccaaatgacgggtttgcccagtattttagcggacgcagtttcttggcaccggtttctaccagccaggttgacattttcaatgtgacatttgaaccgggctgccgcaacaactggcatattcatcatgcaaaaaagggcggtggacagattctggtctgcgttgccggacgtggttactatcaggaagaaggcaaagaagccatcgagatgaagccgggagactgtatcaatattccagcagaagtaaagcattggcatggagccgcaccagatagctggttttcacatctcgctattgaagtgtcgggagaggaaacttccaatgagtggtgccagccggtatcagatgaagaataccaaaagttaaaataaaaattagaagtggtaacacaagcagtggatttacatgtagggaatgttaggtaggagggcgtacgaggatatggaagtgcttaagaacttcaagaagattgaaaactacggtgcagccagcggcttccctgtatatggaggaaagatgtaataggaagaaaccatatattatttgccacgtatgcagcatgaacatatgactttatagaatgggcgtataatcattaaagatagagttataatacttgcgtataatcaaaatctgacatatacacttaaaaaaccccacaggaatctgtggggttttaatgattagttcacatggatgtgctctctggatttctcagagatctctgtcttgatcttttctacaaagtcatccaaaggaaggactgtcgtttctttttcaccatgaagacggaaggaaacggtacggtcatccttttcattaaatccgacaaccagcagataaggtactttttgtacctgaccttcacgcatgcggtagccgagtttttcggcacggtcgtcaagttctacgcggacatttgcatcttccagggcatctacgatttcctgcgcataagcattcagaccgtcgtcatctgtcttgaccggcataacgcgaacctgaacaggagcaagccaggtaggaagatttcccttggtctcttccaggatataagccataaagcgatccaaagatccaaggatggcacggtgcaatacgaccggtgtctgcttttcgccgttgctgtcaatataatagaggttgaacttggctggcagacagaagtccaactgacaggtagagagtgtgatctcattaccgatcgccggctgtacgtttacgtcaagtttcggaccatagaaagcagcctcgccgatctcctcggtgtattcgatgccgatactgtttaatacatcacgcagtgcatcttctgctgtattccacatttcatcatcatcatgatacttttctttattcgccggatcacgaagggaaagtacacaacgatagttggtaattccaaaatccttataggtatcaaagatcagatttacaacgctggtaaattcttccttgatctgttccggtgtcacgaagaggtgggcatcattctgacagaaatgtctgccacgctcgataccctttaaggttccgctggactcataacggaagtcatgagcgatctcaccgatacggatcggcagatctttgtaagaatgtcttctgtttgcgtagatcatcatgtgatgcgggcagttcatagggcgaagtacaaaggattcgccttccatttccattggtgggaacatgttttccttgtaatgatcccagtgaccggatgtcttgtaaagattgaccgtgccgacacatggagtcataacatggagataaccgagttttctctctttatgcttgatatagttttctaattcctgccagatggtgtatccctttggcaggaacattggaagaccacgaccaaccaggtcatctaccataaagaggttcatgtccttgccgatctttctgtggtctctttctttggcttcctctaataattgcaaatgtgcatccagttcttccggtgttgggaaacatacgccgtagatacgctggagcatcttgttcttgctgtcgcccttccaataagcaccggagtggcggatcaacttgaagtgcttgcagagttttacattgtctacgtgaggtccacggcagagatcagtaaaatcgccctgatcgtaaaccgtgatattgccatcctcaagatcctcgatcaggtctaacttgtaagggtcatccttaaacatttccaaggcttcttccttggaaacttcacgacgcataatctttttgccggatttgatgacctttttcatttctttggtgattgcttcgatgtcttcatcacggataacgtcatcgccaaggtcaatatcataatagaaaccttctgcgacaactggtccaacccagaatttagcctgtgggtaaagatgcttgattgcctgtgccatcacatgggcacatgagtggttcagcgtattcagacgctcgtcttctttgaaatttaccattttcattctccttttcatttttagtatgaaaaaagcacccatagactgatacatcatctaagggtgcttgcacacggttccaccttaatttttactcttgcagcctgtaacggggctatccggtaacgcttcggaatcatccttctacgtacagcttcgaagtggtcttcatgtaattcgtttctaaggaacttccagcatatgttcctctctctgtgagaacttgattgcattactctcttcatcattgcttttatgggtactattcatttctaaatctgcttcattatagtataataatggcggaaattcaatggattttgaaaaagtggaaaaatttcctaaatttttaaatttttttgtaacaaaatagggaaaacatcgtctaacctacgaaaaaaggaaaggaaggtgagaaagactggataccgagaagctatatcgaacgtattttatgaaggtatattcgtacgtgatgaatatcgtaaaaaatcctgctgcagcagaagaaatcacacaaaatacctttgtgaaagcaatgactacaaaaagtgaatacgaagggtcatccagcccatacacctggttgtgcgcgattgcgaaaaatcagtgttatgattacttccgtaaaaatggcagaattgcagaggctgtggaaccagagcaggaggcagtgtgtgcttcggatgtgacggaagattttgtcgtacgtgaaacttcgttgtctattcatcggattttgcatgatatggaagaaccatataaagaagtgtttgaacttcgtgtttttggagaattgtcatttgcggaaattgcttcgatatttcgaaaaacagatagttgggcgcgtgtgacgtatcaccgtgcaagaataaaaataaaagagaggttagaagaagatgagtaatatagaacagaaattaccgtgtgaggtagtgcaggatattttgccactctatcatgatggtgtgtgtagtggtgcaagtcgcaaaatggtggaaaatcatttgcaggaatgccgtacgtgtaaaacactgttgcaggaaatggatgagacggaaatggatatggcacttgctgatgagacaaaagaagtgctggaacaccatgcaaaaagggagcgtacgttggcatataagacagcagtagttattgcaggactcttattgttaccaattgtcattgcgcttctcatgacacttccgggctattctgatttaaagacggatgcggcaattatggcatctatgctattagtggcaggttttacagtagttccactgttatcgcgaggaaagaagctggcaaagaccattgtggcatcgacagctgcattgattcttttgatttttattgtggaaatgttttttgaccatggcaactggattacgtttggcgagattgcctgctcaacgatgtttggtctttctttggtttttgcgccatttgtggtaaaacagttagacttgccggaaacgctggtgaaccagaaagcacttctgacggtggcatgggatacgatttggttttatctgatgatggttatgtttgctatcgataatccaatttatacgcaggatcttttccttccgggtacattttttgttgctcttggctgggcaatcttttgcgattatcgttatttaccggggaatggttggatgaagacagcagttttatcattgttggttggtatctggggaaccattggaaatgctctcggctgggtatcggtttctgtgatgacaaaggcgggagagacaccgctggatctcagaggctggatccttgcgatcacccttgggctggcaatcgtcctctttgtcattggactgctccggcaaaagggacagtctaagagaatcaaagcctaaagtcatgcattgctatttgccctgggtctgcgtataataaagacagtcacaaaggaaaacgagaggagaatcaggacatgatagatcaaaattgtgcatactgcgtagagggagaactggtcgatgcttttggtatcaagatctgcgaactgccgacttccaaggtatatttatttaaggagcagagccatccgggcagagtgatcgtggcacacaagaagcatgtgagcgagttgatcgaactgagcccggaagaaagagcggcttacatggaggatattgcaaaggtggcaaatgccatgcatgagatcttccatccgaataaggtcaactatggcgcttacggagataccggacaccatttacattttcatctggttccaaagtatgaaaatgaatatgagtggggcggcgtttttgccatgaatccacaggtcaagactttaagcgatgcagaatataccgaaatggtagaaaaatatcgtaaggcacttgcataattgcctaaatatttgataaaaaaatcaaaaatttaatagtgaggagagtccttctggtttataatgagtataaattgcacaagtcagtatgtgctcagacaaacagggaggacttttttatggaattgatggaatatgaaaagaaacatacagaggcggtcaaaggctcacttgccgagtgtaccgtactcttgaaaaaagatggtaaatttccactggaggcggcaggcaagatcgcagcctttggtagtggtgtgcgcctgacagttaagggtggaaccggatccggcgaagtcaattcacactattctgtgaatatcgaagagggcttagagcaggcaggctttgagatcacgaccaaggcgtggctggacgcttatgatgccaagcgcgcagaggcaaagacggattttatcaagcgtatgaaggcagaagccaaggcgaaccatcagaatgtcatggtctatgccatgggaaaatccatgccggaaccaaattaccagatccctttggaggggcagggcaacgtggcaatctatgtattgtcccgtatttccggtgagggaaatgaccgtccggtagaagagggagagatcaaattatccgctacggaaaagagagatatcttagccctcaatgaaaagtatgataaattcatgctggtactcaatgtcggtggcgtagtcgatctgtccgatgtgacggaggtcaagaatatcttagtcctttcacaacttggcgtagataccggaacagccctggtagacatcctgcttggcagacagaatccatccggtaaactggcaacgacctgggcggcatgggatcagtatgcgccgatggatgactttgaggacatcaatgataccagatatcaggaaggcatctatgtcggctaccgctattttgattccttccacaaaaaggcactctttccatttggttatggcttgtcctatacagaatttgcacacaaactgtccggtgtcagcgcagacggcgaaaagatcacggtgcgcgcacaggtgaccaatacaggtcagcgggcaggtaagcaggtggtgcaggtctatgtatcggctccaagcgtaaaactggataaggcatatcaggatctctgcggatttgccaagactaaggaactggcatcgggagagagccaggaagtagccattacctttgccctttctgattttgcttcctatgatgaggcatctgcttcttatattctggaagccggcaactatatcgtgcgcatgggcgtaagcagccaggatacggctccggtcgctctgcttcgtctgcaagaagacgttacgactctggtggcaaagaatgtcttgggagatccgggatttacagacctgcgtgcagaggctggccagacagaaaatattccggcagatatctgtgtcatcactttaagcgcagatgattttacgacagagcaggtagattaccagccaaaatatgagatcttgccggaagtggaggcgctgtctatcgatgaggcagccctgatgaacatcggcggacatgatccaaacaagggtggactggcatccatcatcggcagcgccggatcacaggtctgcggtgcagcaggtgagacaacgactcatgtcaaagatttcccatcccttgttatggcagacggtcctgcgggccttcgtctggcgagagaatactatcgcgatgagaagggcttgcatgcagtagggcaggcaggtattccggaaagttttatggactacatgccaaagccgatgctctttttctcaaaactgatcatgggcggaaataagggaccgaaggctggaacggaagtaaagacccagtattgcacagccatcccgatcggtacagccattgcccagtctttcaatacagatctggcagaaaaatatggcgatatcgtgggctatgaaatggaaatgttcggcgtacatctgtggctggctccggcactcaacatccacagatctatccgctgtggacgaaactttgagtattattcagaagatccgctggtttccggtttgatggcggcagggatcacaaatggcgtgcagaagcatccgggatgcggaacgaccatcaagcattatgctgccaataacaaggagttgaaccgctatgccaacaacagccatgtgtctgagcgtgccatgcgtgagatctataccaagggctttggtatctgcgtaaagaagtcacagccgcatgccgtgatgacttcctacaacctcttaaatggcgtacataccgcagaaaaccgcggcttaatcgaggacatcttacgctgtgaatatggctatgaaggcattgttatgacagactgggttgtaccaatgaccgcagacaagcgttctgctaaccgcaattctctggcaagatttgtagccgctgccggtggcgacctctttatgccgggcggaaagagcgattacgaagatctgaaaaagggcattcaggaaggtgacgtatccgaggaacaggtacggatcaatgcgaccagagtgcttaagatggcaagaaaattagtagaaaaataagcataaaaacagaagggagcctgtgactggagaatcagtcacaggctccctttttgtatgaaatgcattttattggatctctccatttttatgccgttcaaagaatttctttgtctcggcaacaactacaccgtttaaggcaaagagtgcgatcatgtttggcagtgccatcagaccgttaaagatatctgcgatcgtccagacagcgctgacggtcatgtatggtccgataaagacggcaaagatataaagccagcggaatatcttgatggctttctgattgccctttgtcagatattccagacaacgctcactgtaatagtcccagccaagaatggtcgtaaaggcaaagaataccagacagagcataaggataaaggaagatacctctgccgggaaaggcagcccctgttggaatgcataggtcgtcacggcaacaccttccagaccgtctacctgccaggcaccggtcagtacgatggaaagaccggtcagggtacagatcacgatggtatcgataaaggttccggtcatgctgacaagtccctgacgtaccggctcttttgtctttgcggcagcagcggcgatcggtgcgctaccaagtcctgcttcattggaaaagataccgcgggcaacacccttttgcatagcgactaacatggaaccgacggcaccacctgtgatcgcttttggtgtaaaggctgcaaccacgatcgtcttaaaagcagccggaacggcagtaatattgcagatcacaaggctcagaacaaatacgatataaataactgccataaaaggaacgatgatctggctgacacttgcgattctcttgacaccaccgatcagtacggcagccacacaaaaggcaagtaccaaagaggcgataacgaccgcccaggaataatcgcctaagaaaggtaaaagttttaccgtgtgggcatctgccggatcaaagaaattatgtacagcggaggagataccgttgacctgactgaaggttccgataccaaaaagtcctacgcacacgccaaagaaggcaaataacttggcgagccaggtccatttttttcccatgccctgctcgatataataaaaaggtccgccaaggctgtgcccgtccggggcaacgacacgatatttcacggcaagtaatccctctgcatatttggtcgccataccaaagaaggcggtaacgaccatccagaacaaggcgccgggaccaccggtgccgactgccgtagcaacaccgacgatatttccggtaccgatcgtagcacttaaggcagtgcaaagtgcagagaaactggaaatttctccatgaccttcgtcctcatttttgaccatccatttgagtgccagaggaagttttcggatctgcaagaagcccagtcttgcggtcaaaagcagaccaccggcaaggatcagcaccatgagtgggacaccccacacaaagtcatcgattgttgttaaaacatcattgataaagttccacatgtttttcatacctctttcgttttagtaagggatgcaaaattcttgtggagagattggaaagaaaatagaaagatagatatcttctctgtccatttgcctgagagattcctgcgtgcatgcacgcatcttgcaccttcggcccccggctcgtcgtgtccgggtgtctccagagagtcgatccatttgcagttgcaccggcacggccggcacctgagagtgttactccttcggtagacaaaaacgtcgttttcctgcaaacttcatctcgaaaattgctccaatcactactatataggttcttcctatggatttcaatagtttgcatacaattttgagataaagtgaaaaagtatgaagttagcaaagactaacaaaaaggcttgacagtagaaaaaagcaggagtatatataagacgtagatacccgatgggggtatataaaagaaaggagatcatagaaattatgatacagacaactttaaagatcgatgggatgatgtgcggtatgtgcgaggcgcatatgaatgatgtcgtgcgcaagaattgccagattaaaaaggtcacctcctctgcaaaagatggcgagaccgtagttatcagcgagaatgaactggatatcccatggctgaaaaaggagatcaaagccattggttatgaactggtttcttacgagagcaagccatacgaaaagaagggactgtttggcttcctaaagtaaagaaaatttaagaaaatctttatagaatttttattgcgaaatcaggtgtcatgttttattctgatggtaagaaatggcagtaaggagcgtggcactttatgacaatattccctgaggacaaagagacagagaccgagatcagaggtctttgtgcggcggaagtagaggaaaggattcgacagggaaaggacaatcgtgcggatgtgggtacgggtctgacgaccgcagagatcatacgctcgaacacatttacttactttaactttatctttctcgttatcacgattctcttatgtctggtgggatctttccgcaatctgacatttttaccgatcatcattgcaaataccctgattgggatcatacaggagatccgcgccaagcgaacgctggaaaagatgagcattttaaatgcgccgcatgcgatcgtggtgcgtgatggcagtcaaaagcaggtcgcctcggaagaactggtcgaagatgatgtgatcctgctgcgggcaggcgaccagatctgcggggatgccagtgtcctatccggagaggtcatggtcaatgaatcgcttttgacaggcgaatccgatgagatcaacaagacgcagggtgacgaacttttatccggcagttttgtggtgtccggtcagtgctatgcccgactgacccatgtgggcatggattcttatatatccaagttatcgctggaagccaagtccatggaacgcacagagcaatccgaaatgatccggtcgatcaaccaactggtcaagtgggttggaatcgccatcataccgatcggtattgtcttattctcgcagagttatttcttcaatggggaaacgatcgcccgcagtgtgacggcgaccgtggcagccgtcattggcatgataccggaaggactctaccttctggcaacgatcgcactggcgctgggaaccatccggctggcaacgaaaaaggtgcttttgcatgatatgaaaagcattgagaccttatcgcgggtcgatgttctttgcgtagataagacagggacgatcacggagccgggtatgcaggtttcccatattttatggcgcagacaggtcatggaagaaaatggggcagaaggcgacaaagggctgtgggatcgtgaggctctacaggggatgctggcggattatgtctatgcctccacggataacaatgcaacgatggatgcgctgcgggcagccttagataagatgccggaagccaaagcgggcaggcgtagaccgtctcatatccaagccttttcgtctgcaaataaatacggcagtatgaccttttcggacggcacctattttcttggcgcgccggaatttattatgaaggattcctatgatgcgatcgcagaggaaatcgcgtcttatgtgcaaaagggctaccgtctgcttttatttgccaagcaggaagcggacggcattttaccactgggctatgtgaccttatccaatccgatccgtgccaatgcaaaggagactttttcttattttaaagagcaggatgtggcgatccgagtgatctccggagacaatccccagacggtgtctgaggttgcaaagcgtgccgggatcgagggcgcagagaattacgtcgatgcgacgacactggatagtaaggcaaagataagggatgccgtagaacgttacgccgtctttggcagggtgacgccaaagcagaagcagttgatcgtcaaagccttgcaggaggcaggacataccgttgccatgacaggcgatggtgtcaacgacatcctggcaatgaaggatgcggattgcagtgtggcaatggcatccggtagcgaggcgtgtgcgcaggcggcacaggtcgtcctcctcgattcggattttgcaaaaatgccagaggttgtatatgagggcagacaggtcgtcaataatgtaggtcgttctgccagcctctttttggtaaagaatatattctcccttctgatgtcggtattttcggcgctttttatgatcacttatccactggagccgtcacagatctccttgatcagtatgtttacgatcggtattccgggatttttgctggcattggagccaaaccgcgagcggatcaagggacattttatgcgaggggtcctagtgcgggcacttccggcagggctgacggatgttctggcagtcggtgcgctggtgatctgcgggcaggtcttttcccttccgccggaagatgttgcgacagcggcgaccctgcttttgtgtgtggtcggctttatgatcctgatcaagatatccaaaccgatgagtggcatcaaatatgccattgtgatcggcaatatcgcaggactgatctttgcagggatcttttgccatcagttgtttgccttaagcgctatgtcaaaagtctgcgtccttctgatggtcgtctttgcctttgcggcagagtcccttttgcgttatctgtcactcttggttgaaaaaattgactgtaaattttaggtgttatataatatatgttcattcaatggaacataataaaatgtaagtgcccgtcaagggcaggaaaggcaggaatttattatggtgaaaaagattgcaaataatgatatgacagaggttttagcagaaaaggtcgcactggtcgacttctcggcaacatggtgtggtccgtgtcagatgctggcaccggttgtggatgctttggcagaggaactggaaggacaggtggctgtctataatgtagatgtagatgccaactcggatcttgctatgcagtatagagtgatgagcgttccgtctttgctccttttcaaggatggacaggtggcaggacagactgtaggctaccagagtgcggatgagatcaaggcatttattgcaaacaattaggaggtatgacccttatgatggataaattaaaaagtattaagattgatgtgaccttagcagcagtgctgagtgtggtactgggggtactgctcgtgatatggccggcaaccgtgatcacggtcttggcacgcgtgatcgctattatcctcatggtatcggggatcgtttctctgataccgcgcctgatggatgaggtcaagtcttatacctcaatcattgtttccctacttattacactaatcggtctttggatgttcttaagcccgcaggcagtcgcatccatcatcccgatcgcgatcggtgtccttttggtggtacatggtgtgcaggatctttccctcgcccttgagggcaaaaagaccaaggcacacaactggtggagtattcctttgatggcgatcttaaatatcgtcttaggcgtgctttgcatctgtaatgcttttggtctggtaaaattaggcatgatcctgatcggtatcatgctgatctacgatggcttatccgatatgttcatcgtacataaggtcaacaaggcatccaaggagtttgtggactctaccatccttcacgaagaaaatctggatgactacatgtaagataggaaagttggcgaagcatttatgagacagatggagtttaagatggagagacagaatctggttgaagtaggacagactctctcggtaacagaaagcaaactcccgaattcctactactatacgctggagcatgcctatgccatgtctggcaactatacgaccttggaacgtttgaaatcgcgtcagggcaaggtcgtggatatcaaggaaacgccaaaaggtttttttgtaaccatggaatttgacgaataaagaggtaagataatgcgatatgttccagcggggcagctgcagccgggtatggtcctggggcaggggcttcatgatgcatcggggcggatgcttttggctccgaatacatcactgacaaatgaaaatattacatacataaagtttttgggaaccgctggggtctatatcgatgatgagatcacaagagatattcaggtaacggacgtggtgcgtccggaggtcaagagcgaagcggtatccatgatccagcagtttttttgccgttcggcagagaatgtggaactggatgcagaggagcgcctggtacgcctggtggttgagaatgtcgtaaatgatgtgctttccaacgaagccgtcatgtataatatggtcgatatcaagacctataatgattatacctattttcactccatgaataccggggtgatggctggtattttaggtgtgaagatggaactgccggaagatgatctaaatgacttggtgacggcggcgtttttgcatgatgtcggaaaggtcttagtcctgccggatcttgtcaatgcgacacgcaaactgacaccggcagaggaagaagaaatgaagaagcacgcatgggcgggctacgagtatctgcgcaaagaatattcttttggcgaccaggtcaatgagacagtctatcagcaccatgagtggtacaatggcggtggctatcccaaccacttaaaaggcagggaactgttgcgcaatgcaaggatattaaaggcggcagatgtctatgataccatgacctcacagcggccgggacgtaagtcctaccagccggcagaggtgatcgaatatatcatgtcgcgcaccggcatggagtttgatcctaaggtcgtggagactatgaacgcaggcttttgtatctatccggtggggagtgaagtcgtcctgtcggatggcaggcatgcgatcgttgtggaaaatcatccgggatttgtgcaaagaccgaccgtccgcctcttggaggatggcaaggaaatcaatctgcgcggagataggaacgcatacaacattaccattgtaaaactaatgatctaggagagcatatggcaaatcagggcaagaatgggatcgatgtgattcttgcggaaagtctgaaagaattaagtaagacaagacccatcgaaaaaattacaatcaaggaaataacggataaggcgggcgtgatccgtccgactttttataaccattttcaggataagtatgaattgttggagtggatcgtgcgcgaagatctgatggaatcggcaatgccgcttttcgataacggacttttgcgggaggggattacctatctctttactgccatggaaaaggagcgggatttctatgagaaggcagtccgcttagaggggcagaattctttcgtggggatgatggaagatgctgtgcaggagttgatcttacagcggatgaacaaggataaactgcgggaaaagattacctattcctggctgagcccggagagagtcgcggcttattacgcccacatggcatgcaatgttgccgtgcagtggatcgagggcggcatgcaggtgccgatagcagaattggtcgaagtttatgtgattatggcgcagaaatccatgatcgaaatcatcagttgatatatacatatcagttaaaatgtatagtgctttattacagtggtctgtgtttgcatatgtaatggagcaaacaagtctcttatactaaaatagcggtttcggcagagaccatagtttgattctaagttatcggtaggaggattccatgagttggattgaaaatatattgatcattgcaggtatcagtcttgatatttttgccgcaatggagatcgagggggctatgcttgcagatgtcaagcgtaagtcgttgatgatcgcaagtacgatcgtgaccgtattacagttgatctttttctttggcggctattttgtctgctatgagttggaaaaacatcagatcattcagaatgcagaggaaatcggatatatcgtggcaaccgttgtgtttgcccttctgggaatccgcctgatcgtcaaggcgatcaaacgtgaatttgtccaagaaaagcgcagggatgatatccgtgtgcgtgactatatcaagatcatcgccattaccagtttttataccctgtgtgccggttgtgcctgcggctttgtcggtacatccgttgcaatgatggggcttgttattctggtatgttcgatcttagtcgttgtttccggtatctacacgggatatcatttcggttttgagtccaagaccggtgcttatgctgcaggagcacttttgctctgggtcgcaggaggcgagatcttactgcgcaatgtgatgcatatgatctaataaaataagcctgtatatatcaaataaaactttggtatatacaggctttttgtgtcttaatttttgtttatctcaaaattttccggggtttttacgggaccgtctgtgctgtcttcggacaaaagcccccgcaaatgccgcaggatacttggtgccagcatgaggttcctggatttgacctgttcgatcagataagagatcttgtctgtctttccgagtgccagataacagtcgcccagcatgttgtaattctggctgatgtcggtgccgatggcaacgccaaattctaagacgctgatggcatctgccaaaagaccctgttcgatcagggcagcaccataatccttgagggtaatggtcaaaagatcaaaatcctcgccgatggactgcatggtcgtcaagttagcaacgccgtaggcttccttcaattcggtgttagtcttaccggtcagatttaagaggcgttttttagataaatctctcaggatattttccagagaacaaatcgcgggatcttttgagaaacccagtggaaatttatccagaggaatggtaatatatttaatattgtcaagattggcagtgggagccgcgttggcagccgcctctctttcccagaaagattgtgtgacttcatcctgcttcttgttgaggcttttataacggatggcaagaaagatgccaatgccgagaaatatggctaaaaaagggaactgcataccctgtcctttctgaaacaaagtcgtatttacgatatgtttcttaaaataaatgaaaactaagcgaggtgtttgaaatgacatactataagcagtcaaaaaaaagaaggatcgcatctgctgtgatcattttggtgatcatcggatgtatgcttgctacgatgcttcttgcctgtcttctttaaaaatatactaaaactgccagaccacgtcaacgatattcgtctctttgaatattgaaaagcgggggcaaggtagtataaaatgaattctgaaccgatagaatagagataataatgatgagaggttattatgaaaaatagaatgagaatgttagttgcggcatttgggatcgtatgcggtataggtcttgctttcccggtgcagcaggttgcagcagaagagaataccgatgatacaacacaggacagtgcagttatcccggagcatatttccattggcggaacggatgtgtccggtatgagcctggacgaggcaaatgcggttgtgcagcagtatgtcgaccagtatcaggatgtgactttcacactgaccgcagatgataagagcattgaggcggatggcgatgacatcggtctttgtgccaagaatgcagatgtgacagagcgtgcccttaattatggaaaagaaggcaatctgatcgaacgcttcaaggcaaatgcggatatgcaggctggaaaggaaaaggacttttctatttccctgacttccgatacggcaacggtcgaggctttcttaaatgaaaacaaatcagaccttgttacagaggcagtggacaatacggtaaaacgtgtggatggcaagtttgagtacgtggaaggatctgagggcgtgacccttatgaccggaaaatctgcggtcaagatcgctgatttcatttctacagactgggatggcaaagatgcttccatcgaacttttgacagaaaaagatgagccgagaggcaccaaggaagaactggaaagcattcaggatgtacttggatcttatcatacagactttggtacggtggtaaacggacgtaccaacaatatcaagaccggcgcaagcaagttggatggtcttgtggtatatccgggagagactatctccgtttccgaagccatcggaccgacaaccgcagagaacggctattatccggctggctcttatgagaacggaacgacggttgagacctatggcggtggtatctgccaggtatcgacgacgctttacaatgcagttatccgtgcagaacttgagatcgtgaccagagccgcacactccatgatcgtttcctatgtagaaccgtccatggatgcagcgatcgcagatggcatcaaggatctgcaatttaagaacaatcaggaaactccgatctatatcgagggttacaccagtggcggtatcatttacttcaatatttatggtaaagaaaccagaccttccaaccgtcgtgtggattttgtcagtgaagtgacaagccagacagagccggagaaggaatatgttgccgttggcgatcagccggtaggctacatcgagacaacgaccaagccgcacattggctatacggcaagactttggaagatcgtttatgaaaatgatgtggaagtcagccgcaaggtatttaacaacagcaaatataatccttccaaggaagtgatctctgtaggcgttggcggtgctacgccggaagcggcagcagccatcaatgcggcgatcgcaaccaaggatgatgcaacgatccgttctacgatcgcaagttatacaccggaagcccaggcggcagcggcgcaagcggcagcagacgcagctgcggcacaggcagcagctgctgcagcagcacaacagcaacagcagcagacacagacgactacaacgccatctgcagcgggaacgccagcaggtaccactacgggggcgacaccaggtacgacatctggaacagcacagtaaatgatgtgctgtgataaatgaaacaaataaggataatgcaacaaggctgcttggtttcaagcagccttatggtacatatatatagggaatagaacaagaggatagaacgaggatgaaaataggcaaagttccggaaaacgtgttaaaacgttctgttatgaaacaattgcattacaaacgcgatgaagtcgttttgggaccggggatcggtgaggactgcgccgcattggcactcgcggaggatgagatccttgtcatgtcgacggatccgatcactggtacagccaaggatatcggtaaacttgccatccagatcacggcaaatgatctggcaagtgcgggagctgagccgatcggtgttatgctgaccatactcttgccggatgggacgagggagattgccctcaaacgcatcatggagcagatggaatgtgcatgcagggaagccaaaatgcagattctgggcggacatacggaagtcaccgcggtggtaaaccaaccggtggtcaatgtcgcgggtgtcgccaaggcgaagaaaggaagtctgatctctaccgcaggagccagggcgggcatggatattgtcgtcagtaaatgggtcggtattgagggaacgatgatctttgccaaggaaaaggaagccgagttaaaagaacatttcccggcagactttgtggatactgccattggctttgaccgctacttatcggttgtgccggaggctgcagtcgccacccagtccagcgtcgcggcaatgcatgatgttacggagggaggacttttcggtgctctctgggagatggcagaagcatccggcgttggactggaaatcgatttaaagaagataccaatacgtcaggaaacggttgagatctgcgaatactttgatgtcaatccttatggcttgatctcaagcggcatgatgctgatggcatcagcagacggaaatgccctggtactggcattacaggaggcggggatcccggcgaccgtgatcggcaaggcgaccgagggcaatgaccgcgtgatcatccgggatgaggaacgcagatttttggaaccgccaaagacggatgaattgtataaagtcttataggaagatgggaaaatgaggagagatagtatgagagagaagattttaagttatatcgaaaccaatagcagaatagatatgcatgatctggcgatcatgatgggaacggacgaagcaacgatcatgaatgagttggaggagatggagcaggcacatatcatttgtggctatcataccctgatcaactgggaaaaggctgggatcgaaaaggtgacagccatgatcgaggtgcgtgttacaccacagcgtggcatgggatttgacaaggtggcagagcgtatctacaactatccggaagtcaattccgtttatctgatctccggtggctttgattttatggtgacactggaaggaaagaccctgcgcgaggtttccgagtttgtatccgacaagttatccccactggattctgttctcagtaccaagaccaactttattttgaaaaaatataaggatcatggcacgatcatggcagaacagcgcaaggatgagagagagttggtgagcctatgagaaacccactgtcaaagaccatcgtagaaattgagccatccggcatccgaaagttttttgatattgtcagtgaaatgcaggatgcgatctcactgggtgttggtgagccggattttgatacaccatggagagttcgtgacgaggcaatctattctctggaacgcggacgtacgttttatacctccaatgcaggtctcaaggaattaaaggtagagatcgcgaattatctgcatcgcagatttgatctggaatatgattatcgggatgagatcctggtgacggtcggcggtagtgaggcaatcgatattgccctgcgtactatgttagatcccggggatgaggtcctgatcccacagccgagttatgtctcttatctgccatgtacggttttggcaggaggcgttccggtagtgatcaacctgaaagaggaaaatcagttccgtctgacggcagaggaattggaagcagccatcacggataagaccaagatcctgatcatgccgtttccgaacaacccgaccggggctgtcatggaaagaaaggatctggaagcgatcgcggatgtggtaaagaaacatgatctttatgtcttaagtgatgagatctatgcagaacttacctatttggaaaagcatgtgtccatcgcatctttgccgggcatgaaggagaggactgtccttatcaacggattttccaagtcccatgccatgaccggatggcgactgggctatgcctgtgcgccaaagatcattatcaagcagatgttaaagatccatcagtatgcgatcatgtgtgcgccgacgaccagccagtatgcggcagttgaggcattgcgtcattgtgacgaggacgtggcacacatgcgggaagaatacaatgggcgcagacgctatctgatccatcgttttgaggagatgcatctgcaatgctttgagccttttggtgctttttacattttcccatctattcaggaatttggcatgacatcggaagaatttgcgacagaatttttgaatcgaaaaaaggttgctgttgtgccgggtacggcatttggtgcttgcggagagggatttttgcgaatttcctatgcctactctttggataatctgaaagtggcattggatcgtctggaagaatttgtgacagaattaagagaagaaagaaaaggtgcgtaaatggcagcgctgaatattattttacatgaaccggaaattccgggaaatacaggaaatatcggtcgtacctgtgtggctaccgggacaagactgcatttgattgagccgctgggctttcagttgaatgacaagactgtcaaacgcgcgggcatggactactgggatcagttggatgtgacgcgttatgacgattggaatgactttttggaacgcaacccgggagcaaagatttattatgcaacgaccaagggaaaacatgtctattcggatgtgtcttttgagccggactgttttatcatgtttggcaaggagagtgcaggtatcccggaggagatcttagtcgagcacccggaggaatgcatccgtatcccgatgatcggtgagacaagatcactcaacctgtcaaattctgtggcgatcgtcctctatgaggcattgcgtcagaatcatttcgaccacatgaaactggagggcgagttgcatcgcctgcactggtaaaaaggaacagatatgggaatcattgaagcaaaagatttagtacatgaatatatcatccgcgatgaagaaggcaatgtggagagcatccgcacagccctcgatcatatggatctttccgtggaagcgggacagtttatcgcggtattgggacataatggatcgggcaagtctacctttgccaagcatctgaatgctcttttgacaccgagcgagggaactctgatcgtagacggcatggatgtatcggacgagagcctgacctatgatatccgacaggaagccggtatggtctttcagaatccggacaatcagatcattgccagtgtggtacaggaagatgtcggttttggaccggaaaatatcggtgtgccgacagaggagatctgggagcgggtggaaaagagcctgaaggctgtcggtatgtggcagtatcgggaacactctcccaataaattatccggtggacaaaagcagcgtgtggcgatcgccggagttatggcgatggagccaaagtgtatcattttggacgagcctactgctatgctggatccgaatggacgaaaggaagttttggaggctgtgcatgcgctcaaccgtgagaaaggtgtgaccattattttgatcacacattatatggaagaagttgtggacgcagactatgtatatgtcatggatcagggcaaagtcgttttggagggcaatccgcgaggtatcttttcacaggtggagacactcaaggatcacaggctggatgtgccgcagatcacgcttttggcgcatgaactgcaaaaagcgggacttgctataccggatggtattctgacaagagaagaattgattgatgccctgcaaaaagtggcagacaagagaaaataaggtgaattatgtcatttatattagataatgtatcttatcgttacagtgaaaaaacagcatatgagatcacagcactggatcatgtgaatttgcagatcggtgacggtgaatttatcggcgtgatcgggcataccgggtctggaaagtcgaccctgatccagcatctgaacgggctgctgaaggcgacggaaggcacgatctactttaatggacaggatatttatgaggaagattatgatcttcgtgatctgcgtatgcaggtgggcatggtctttcagtatccggaacatcaactttttgaggagacagtctttaaggatgtctgcttcggtcctaagaaccagggcttgccggaaaaggatgttacgcttcgtgcctatgaagcattgcaaaatgtgggcttgccggaaaaatattttgatgtttctccttttgaattgtccggaggacaaaagcgtcgtgctgcaatcgccggtgtgatcgccatgaaaccgcaggtgctgatcttagatgagccgacggcggggttggatccgaaaggacgtgacgagatcctggatatgatcgcagatatgcatgccagatatggcaacacggttatattggtctctcatagtatggaagatgtggcaaagtatgtagaccgtatcattgtcatggatcacggacatgtcaagtttgatgatgcgccgcgtcaggtctttcatcattataaggagttggaggagatcggacttgcggcaccgcaggtgacatacctgatgcatgagatgaaggaaaagggcatggatgtgtcaacagaggcgacgaccgtagacgaagcaaaagaggcgatactacgcctgataggatagaattatgttaagagatattacattaggacaatattatccggcggattctgtcattcataaactggatccccggacaaagttatttgcaacacttctgtttatcatcagtgtcttttcttttgacggcattgtgggatttatcgtcatgaccgcctttttatttggcgtgatcgccctgagcaaggtgcctttgtcttttatgctgcgcggactcaaggctattatgatcctgcttgtgatcgcgggtctttttaacctttttctgacacctggacaggtgctctggagtatctggaagatccacatcacgcgggaaggactgcgcaatgcggtgctgatgaccatccgcatgatctatctgatcatgggatcgtccgtgatgacgctgacgacaaccccgaaccagttgacggacggcttggaaaaggcattgaagcctttgcagaagatcaatgtaccggtgcatgagatcgcaatgatgatgtcaatcgcccttcgttttatcccgatcctgatcgaggagacggataagatcatgaaggcgcagatggcaagaggtgcggattttgaaacgggtggacttgtcaaaaaggcaaagaatatggtgccgctcttagtaccgctttttgtatcagcgttccgccgtgccaatgatctggcactggcgatggaagcaagatgttatgttggtggcgagggcaggaccaagatgataccactggcctatcataaggtcgatcgtctggcgtatgtggtcgtgatcgcctactttgtcctcttgatggtcataaaggtggtgctttaatgcgggtaaaactggttgtggcatacgagggaaccaactactgcggatggcagatccagccaaacgggattacgatcgaacaggtgctcaatgagaccctgagttctcttttaggggaagaaatcacggtgacgggagccagccggacggatgccggtgtgcattctctgggcaatgttgctgtttttgaaacccataccaaaatgccggcggagaagatctcttttgcactcaatcagcgcctgccggaagatatcgtggtgcaggagtcctgccaggtgccagaggattttcacccacgtttttccaaaagcaggaagacatatgaatatcgtattttaaattgtcgtttccgccagccgctggagagaaggacaagttatttttatcactatccgctggatgtccgtgccatgcaaaaggcggcggcttatctggtgggggaacatgactttacttcctttgcgtccgtgcatgcgcagaccaatacttatgtgcgcatgatctatgcactggatgtggtgcgtgagggagacatgatccgtatccgcgtgcaggggaatggattcctttacaatatggtgcgcatcatagccggaaccctgatccaggtgggcgcagggatcaaaaagccggaggatatggaaagcatccttgcgggaaaggacagagaactggcaggaccgacagcaccggcgcatggacttaccatgatcgggctggaatatttatagaaaagaattgacaaaaagccgtgtgcgtaatataatgtaacggctgatgtagtttagaagcacagtttcattagccccgaaacgtgttttgactatagacatgtcagtgatcgtatttcggacattgtacgagactgacgctttatgttatttaaggaggaaaccaaatgaagacttatatgccaaacccaagtcaggttgagagaaaatggtatgtagtagatgcagaaggacagacattaggtcgtcttgcttctgaagttgctaaggtattaagaggaaagaacaaagcgatttacacacctcatgctgattgcggagattatgtgatcgttgttaatgcagagaagatcaaggttactggtaagaagttagaccagaagatctattatcatcattcagactatgttggtggaatgaaagagacaactttaaaggagatgttagctaagcatcctgaaagagttatcgaacatgcagttaagggaatgcttccaaagggacctttaggaagagagatgtacacaaagttatttgtatacgctggcccagatcacaagcatgcagctcagaaaccagaagagttgacattttaattcggtaaggaggtaaatcacattggctaatacaaagtattacggaacaggaagaagaaaatcatctgttgctagagtatatttagtacctggaacaggtaagatcacaatcaataaaagagatatcgatgagtatcttggacttgagactttaaaggttgttgttcgtcagccactcgttgctacagacaatcttgacaagttcgatgttttagtaaacgttaagggtggcggttacacaggtcaggctggtgccatcagacacggtattgctagagcattacttcaggtagacgctgattacagaccggttctgaagtctaacggatatcttacaagagatcctagaatgaaagaacgtaagaagtacggcttgaaggcagctcgtagagcaccgcagttctcaaagagataggattttcacaattcagaacatcctacgatgtttcagaagagtatattacacctcaggacttttgccctggggtgttttttagttagaaaatatccatcttctaatcgcatcttcttgcagaaattgcggatacaagtacaagtacaccgacaaatgtcataccaacatagcagatctgcattgccgccataatacctatactatcttctagtatggcttccagagacataaagatggtgctgccgagcgcaccggaaattgtgcgaagggatgtgatcaaagactgaccgaaaaaccggttgaaagttgaaagatcgaacctttaccgaggttgctgataccatacaaaataccggtaaatccagtaactgcgagaatggcagataaaatatccagtttactatgttcattttccagaacattatccatggcgaaaaaagcaaccacaagagcaatgatacacaaaactgccagactataaaagatcatgcgccagccccagtgatcgacaatgataccggcagcctgcattattctgccaagcatcatgacagtaaaactttgtgccaatccattcaaaatcaccccgatagaaaacagcaatgaactttgctatgcaacaagtcagaactacaatggaccttaccattttggcggaaccattatttccaatggagatgtgggataccacggaagaagtgggggaaatcgcaccaatcagacggcaaacgaccatggaagtctggcatgcataaaaggacagtggtatattttccaccacagacagacgcacagtggtactttcagccgacaggcatgagcagaaccggtaaggatcgcagaggatggaagtattgtccaggtagaatgtacttctatgggattccataggggagcactggaaacgaagggatcttatccggcaattatttcctgtgtcttgaccaatggtgctatgccgcacattaccaacactttgatacaggaggatatcatcttctctgcccgaccgaagatgtggtgggtattattgcggctaattttgagtggcgctttcgtaccataccggcattgaagccgcaggctggacacagtatggaaaagagttatgaagaaggttgtaaactcttagaactcatggatattgacgatgtaccgctttaccatggagccaaagattttatagaaaacagggcagatcttccaacttccgagggatcgcgtttcattattgaagaagccatgcgggagtgtgaggagccgttgtatactgcactgctggaaaacgtcgcaggacaaaggcggcatatagaaaaagcaccgcggatcctggatgacatgacttacgcggcaaatcctgagggcaaggatatctatgtctatgatgatattgaccgacgcctgcttctggatgatttttttgccagattaaaactttgttatggcaatgaataaattcttaagaaaatcttaaagacttgcctcattgaatcttaatgctataaaagccacaatggatatgtaagaaaaacatatctcttgtggcttttttatatggatcgtacatctgtttccaaagaaaagatttagaaaagttaagaagtgtttttaggggattgttaagaaataaacaccatactataggacgaaaaaagattgtaacaaatgataggtttctgcgtctaatgatagaagacaagagagaaaggacagaaaagatggaaaatgtactggattatttggaaaaaacggccaagaagtatccgacacagattgccgtggaggacgaaaatacatctttgatgtgggcggaactggtctatcgggcaaagcggatcggcagtgtcctgtgtgatcagatgaaaagacaggatgccgtggtcatcgttgcggaaaagagcacacagaccctggcacttatgtttggcgttttgtatgcaggaggcttttatgtgatggtcgatcctatgcagccccaagaccgcatccagaggatcttttcggttttacgaccaagccttgtgatcgcagatgaaaaatacatggaaaatgtaaagcagatcctgagtactatgcaaaagaaagagacagaagacagaccaaggctcacggctatgcaaacgctgctgccttcctatgatgtgacggataaggttacagaagatagtggcactgcggaaaatacagccgaccagccttggaatgatttggtcgcagaagtcaaattacagaagatccgagccaagagccggccgaccgatattctatacggtattttcacttccggctccaccggcatgccaaaaggaattgtagtcagtcatggtgctgtcattgattttatttcacattttacacagaccttttccatcacaaaagaggatcgtctgggaaatcaggctccctttgactttgatgtgtcggtcaaggatatctactcctgtgtgatgaccggagcaaccttggtactgattccgcgtacctatttttcggcaccaccactgcttttggactatttgtgtgaccggcatgtgaccagcctgacctgggcggtatcggcactgaccattatttcttctctgggaggcttgaagtaccgggtgccgacagagataaagcgtgtcatgttcagtggcgaggttatgccgaacaaacagttaaaactctggcaggaggctttgccggacgctatgtttgtcaatctctacggaccatcggagatcacctgtaactgcacctatcacatcatcgaccatgcggtgaccgagggtgaaaaactgccgatcggaaaggcatttgtcggaagaagcgtctttcttttggatgagcatcataggctcatcacagaagccgggcgacagggggagatctgtgtaagcggtcagtcccttgccaacggttattataacaatgaactggagacaagaaagcaattctgttatctggaaaaagagcagttgccaaccgacataacaggacaagttctgacggagggacagcgtttttatcgcacgggagacttgggatattttgatgaggaaggactgctctatttctgtgggcgtaaggattttcagatcaaacacatggggcatcggatcgaacttgaggagatcgagcaggctttggatatggtgccaaatctcaaacgttcctgctgtctgatggatacagcgcacaatcggatcgttgccttttatctgggaaatgtgaaaagtgcagagatccgcagggctctgaaggaacatgtgccggattatatggtgccgcgtaagtttatccaggcagagacttttccgctcaataaaaatggaaagactgaccgtgcttattttaagagcatattggaatcggcataatgaaaaagataggagacaggaaacatgcaagaagaaaaatttccttacatagaccggttagacgagaccgttttagatgaagccatcctgcgctttggtacaccgacctatgtctttgatgtagagcaggcaaaaaagcgtgcccgggcattccgggggatcatagggcaggcggcggatctttgttatgccatgaaagccaatccctttttggtaagagccatggcagaggaagtcaatcgcattgaagtgtgttccatgggcgaattccgcatctgtaaacagaaggagattccggcggagaaacttttgatctccggcgtgatgaaagaccgggatgatctgtgggagatcttggagacttatggaaaccgctgccattatacgatcgagtccttaaatcaatatgccattttaaatgaatgggcacgaagcagcgggaaaaaggtttcggtatatttgcgcctgacttccggcaaccagtttggcatggatgaggaaacgctgaccaatattgtggaactggaacaggataaagatcttttggagatctgtggcatccactatttttccgggacacagaagaagcggaaaaagaccttggaggaattgacatatctggatgaagtctttgcccgattaaaggaaaaaacaggctatcaggtgacggaacttgaatacggaccggggctggcagtaccttattttgccagacaggcggatgagcgttttgagactttggaagccattgcggatgccttggcaaaaatgcagtggcagggcaaggttactttagaaatgggacgtgcctttgtggcggattgtggctattatattacgacggtcaaggataccaagcgaagcggtgaccagaattactgcattatcgatggcggtatgcatcaggtcaattatgacggacagattcggggcatgtatcagcccaaactgaccatccgtccgcagggagccagaggaatctatcaaaactggacgatctgcggcgaactctgcacgggaaatgatatcctggtgcagaatatcaagattgatgatctgcgggtcggctcgaccatcatctttgagaataccggagcctatgcagtcacggaaggaatggcacttttcttaagtcatgtgcttccggcggtcgttctctacgatccggtcggtggttttacgcaagtccgggcaagacgcgagacttatgtttggaactcataaaatacagaataagaggagaaataaaaatggaagaattacttactatcttaaatgacgtggatgacagcattgattgggaacatgaggagggattgatcgataatcgcatcttagattcctttggcgtgatctcccttgtggcagaattggacgagacttttgatattgagatcgaagcatccgagatcatcccgcagaatttcaattctgtgcaagccatttatgctatggtaaagagattgcaggagaactaagatggcttaccatgaagtgacctatctctttctctttttgccactggtgctgatcgcttatcagatcgtgccacaaaagaggcgctggtgtgtcctgcttctggcaggatatgcattcttttggtctttcagcaaaagtctggtattggtgttgatggcaacgtccatgtttacgcattatatcggactttggctggaacgggtcaaagaggacggagataagaaaaaacaaaagtggattttatttttcggtgtctttgtcctgctggctgtcttgggctatttaaagtatgcaaatttctttgtagaaaatgtaaatggtctgctgacggcagtgggtaagtcaggcatggcactggagacgaaaaaaatagccgttcccatcggtatttctttttacaccttgcaggcgatcggctatatggcggatgtctactggggcaagatcccggcagaacgacatcttgggaaagtggcacttttcctaggctttttcccgcagatcatggaaggacccattgccatgtattcccagacagcggatgcactgtggagtggagaaagcctgaaatccgaaaatctggcgcagggatctatccgtatcctctggggactttttaaaaagatgatcattgcagatcgcctttattatctggtaacagaggtctttgaccactatgagaactacagcggtgccatcgtgatcgtggcagctgtttcctatgccgtgcagttgtatatggagttttccggctgtatggatatcgtgatcggaagcggacagatgtttggtgtgagactgccggagaatttcaaccagccctttgcctccaagagcgcggcagagttttggcgcaggtggcatatgacactgggcgtatggtttaagacctatgtcttttatccggtatctgtttcaccattcatgcgaaaatggaataaatttggaaaaaaacatgtgggaaaatatatgacaaaactggtggggtctgccatcgctcttttcccggtctggctttttaacggactttggcacggaccgcaatggaactatatcttttatggtatgtattattttgtcatcctcttgctggaagtggcatgtgaaccgctcaaggagaagttttatgctaagaccggtacaagcgagacaaccggctggtggaatgtcctgcggattgcaaagacctggatcattatttttaccggagaacttttcttccgtgccaatacgctgacggcgggcttttccatgtttgcaagcattttccggggatttgcaccggaaaggctctgggacggaaccctgcttcgcatgggactggacctggcagattatagcattatcattgccggctgtatcgtagtcggtattgtgggacatttgcgggaaaagaaaaaattgagtctggatcagatcgctggcatgcgtctgccggctcgctggggactttattacgcgcttatttttgccgtgatcctattcggcgcatatggcgtgggttatcaacaggtggatttgatttatgctggattttaaagaaaaaatgaaaataaaaaaatatagaaacagcctattttttgtcatactggcactgctgatcatcggcagttctgccgggttgtcctatttgtccatgcaggacgatcatctgctccagagccgcaataagagcatgatccgtattcaaaaacagagggaggactcactggatgccctcgtggtcggagacagtttgagttacagtgctatctctcctatgaaaatgtgggaagagaagggcattgcatcctatgtctgtggacaatccgggcaaaagctacaggagacctattccatgctggagatcgcctttaagacccagcatcccaaggtagtagtcatggagacaggacctctctttcgtgtgcgcggtaagagcgaggagatcaagtcaacgctttccgagatgggcaaccgctattttccgatctttcgctatcatgatgtctggaagaccctgctctttggcaaaaagtatgcagaacaggattttgagggctatctggtgcgcgggacaaagatcccttatacccatggcgatacttatatgagcaaggcaaagacgctggaggagatcaaaccaagcattgatctgtatatgcaaaagatcattgcactgtgcaagcaaaatgatgccaaacttttgttggtaagcgtgccatcaccgcacaactataatacggcacgctgtaatgcgatcgcggcatatgcaagggaaaatgatattgcctatctcaatctcaatgatacggcaaatccggtcgggattgactggtcaaaggactgtctggataagggagatcatctgaatgcatccggcgcagagcgggtcagcatctatctggctgcctatctcaaggaaaactatgatctgccggatcacagaggagaggaggcttatgcgtcctatacacaaatggaaaaacagtacgatcggatcgtgaatgagaaaataaaagagatccgtgagtaaggaagaaaaagacagggagttcccccttgtctttttttgtatttttggctaagatacagagtatagagatatagaaaagagcaggaggtttttcatatgaaagtaacaatttcagatgctattcgatacatcggtgtggatgataccaccatcgatctgtttgaaagtcagtatgttgtgccggagggcgtttcctacaattcctatctgattctggatgagaaggtcgcgcttatggatacagtggatgccagaggtgccgaggcatgggaaaagaatctcatggatactttggcaggacgcaaggtagattatctggtgatctcccacttggaaccggatcatgccggaagcattggcagactggtggaattgttcccggaagtgacgctggtgggcaatgctaagacttttgccatgctgccacagtttttcccggatggtgtgatggagtgcgaaaaattaacggtcaaagagggcgataccttatctttgggcagccatacactgacctttgtcatggcacccatggtacactggccggaagttatggtttcctatgagtccagtgaaaaagtcttattctctgcggacggttttggcaagtttggcgccctgtctttgacagaagatgcggactgggcttgcgaagcgcgcagatattactttaatatcgtaggaaaatacggcaatccggtgcaggcacttttaaagaaggcggcaggacttgatattgccacgatctgtcctttgcatggtcctgttttaaaagaaaatctgggttattacatcggactttatgatacctggagcaagtatgaaccggaaagcaagggcgttttggtggcatatgcatccatccatggaaacacgaaaaaggcggcagaagcgctggggcagatgcttcgggaaaaaggcgtagaaaaggtggttgtcagtgatcttgccagagaggatatggcagaagtcatcgaggatgctttccgctatgaccgtatggtactttgcgcagcatcttatgatggcggcgtattcccatgcatgcaggacttcttacatcatttgcagtccaaggcatatcagaagcgcacgatcggcatggtagaaaatggttcctgggcgccatgcgcagccaaggcaatgcgtgagatcgtggatactttcaaggatgtgactgtggtagaaccgcttgtgacgatccgctctaccatgaaggactctgatcgtaagaccatggaggctttggcgaccgcaatcgcagaggcatagactttgggtgaaaatgaaagagagagattatttatttgataattacaaggcatttctgatcgtactggtggttgttggacattttattgaagtggcatcggatgacaatgtggtgatggaaacgacaaagtggatcatcttttcctttcacatgcctgcttttgtatttatctcagggtatttctcgaaaaaaacacagggcatctacaagttgttacaacaacttgtggtgccttatcttgtgttcgagattctttactacatactttatacttacattctgaatagggacacggaactggcgtttttatatccaaaattttctctatggtatctgcttgccatgtttatgtggaagatgattacaccgctgtttcgtcgactgccgggttatctttggattgcatttgtgctgggacttttcgtaggggcatcatccttggatgataactatctgactttgccgcgtatgtttaccttttatccctttttcctattggggatggacttagatcggaacaggattgacctacttcgtgcgcgcatccgtcgtatgtgggcatttggtatatttttagccatcaatgcatttttggcatgggttgcagtaagtgatcgtatttctatcaaaattttttatggcaggtacgactacgaatatctgggattgtctgtgcccatggggatcgcacttcgcgcagcctgctatctgatttcctatattatgatctatgttgttgctatcatgattccgggagcgaaaaacagtctttctgccctggggcaaaagaccatggcgatctatctgtttcatggattgatttttgcagtcttccggcgcggagaaatctggtatcagagtttgggggagattgtggaggatgctattttggtggaggcatccatcggaaccatctggcttctctgccaacggccattcgtagcatttacggattgggtaacgcatatcccgatgccgctgctgcaaaaaatcgctaacttcgggtttataggtcatttggaaaaattacgtggtgtagggcaacaaaaattgtaaggaaaacaggagtcttgtcttgctatgaaccaaatcctagtataaaataggaaaagatggtaaaaacactgtcaaacattgcggtgatcaagatagcacagataaggaggagactatggaacaaaatacgatttgtgtgcagggaggttacacaccgggcaacggcgaaccacgtcagatcccgatcattcagagtacaacctttaaatacgatacgagtgaggatatgggaaaattattcgacctcgaggcagaaggctatttttacacgagattgcagaatccgaccaatgactatgtggcagcaaagattgcccagttggagggcggtacagcggcaatgcttaccagcagcggacaggcagccaatttctttgccctctttaatatctgcggagcaggggatcacattgtatcttcgaccagtatctatggcggaacttacaatctgatctcggtgacgatgaagcgcatgggaattgacgtgacctttgtagacccggatgcatcggaagaagaactcatggcagcttttcagccaaacaccaaggcaatgtttggtgagacgatcgccaacccggcactgacggttctggatattgagaagtttgcgcgggttgctcatgcaaatggggtaccgctgatcgtggacaatacttttgcaacaccgatcaactgccgtccgtttgcatggggtgcagacattgtgacccattctacgaccaagtatatggacggacatggcgccggtgttggtggcgccattgttgacagtggcaactttgactggatgaagtatgcggataagtatccgggactttgcacgccggatgagagttatcacggtgtgacctatgtggagcgttttggtaatggcggtgcatttatcaccaagtgtacgacacaactgatgcgtgatctgggatcgatccagagcccgcagaatgcctttatcttaaatctgggcttggagagtctgcatgtgcgtatggcaaaacattgtgaaaatggacaggctgtggcagaatttttggaaaatcatccaaaggttgcctatgtcaattactgcggacttccgggggataagtatcatgcgctggcagaaaagtacctgccaaacggctcctgtggcgttgtctcctttggtctggtcggcggaagggatgcggcaagcacctttatgaagcatttaaagatcgcagccattgagacccatgtggcagatgccagaacctgttgccttaatcctgcatccagcacacatcgtcagatgaatgatgagcagttgaaagaggcaggtgttcctgcagaactgatccgtatcagttgcggtatcgaagacaagcgtgatctgatcgcagatctggcacaggcactggaagccatctgatgacaagaattcctatcggtttataggaaaatgcgagaccccaaaaaatcagggctggggcattattcctcaaggcgaaaaacagtgaggacttgtacgcaaataagaacacaatcggcgcatttgaatgggagaaattctgttgaaatgtgccgatttttacgttaccataaatgtagatatacacgtctcttttggactttgttttgtcaaaaaattaacaaagcaggggctttggtgagtggggtgtgtgataaatttatgaggaggagaataaatgcaagattacaaggtcatcgaagtaaagcgcagtatctttgaggacaatgatgcagatgctgccagacttcgtgatgaattgaaagagcaaaagacttttcttttgaacctgatgtcttcaccgggagcaggcaagacgaccacacttcgtcagactatttcccgtttgaaggatgaaatgcgcatcggtgtcatggaagcagatattgattctgatgttgacgcagcaaccatcgcagagacaggtgcaagagccatccagatccataccggtggtatgtgtcatctggacgcagacatgaccagacagggcatccatgaatttggtaccgatgatctggatctggtcgttctggaaaatgtcggcaatctggtctgcccggcagagtttgataccggtagtgtcaagaatgctatgatcttatcggttcctgagggggacgataagcctttgaagtacccgcttatgttttctatctgtgacgtggtactgatcaacaagtgcgatacacttagcgtatttgatgatttttcaaaggaagcagtagaggagcgtataaagaaattaaatccaaatgctcaggtgatctttgtttccgcaaagaccggagagggatttgatgcctggtgtgactggcttcgcaaggaagtagcagactggcaaaataattaataagcataagaagagaaatgtggaggaaagtatggaaagaagtaaggacgaaaagtatctgatgacaccgtattcattggatgaggatcgtaacaaaaaggatccgagagcgggatattgtatcgaagagttaaagaataagccgttccgtgagccacttgcaaagtttgcaaaggctgttaccgaccgtgcaaaggtacaacttggcaaggaagatatcacagcagaaagcccggagtactggggactttacaatcttgttacagatgagcagtgcgagatcggtatcaagatggagaagcgtcatccaagaacacttgctgatatgaaggctctttgcccggaatattctgaggaagaactcttgaagcagttggaagaaatgtcttataacggtgtgatcgagtggaattatgagaatccacagcatgagaagcagtgggtacttcctatgtatgtaccgggttctgctgagttcggcaacatgaatgcagaccttttggagagacatccggaagtaggaccattcttcgagcgtatgagccgtatcccattggaggggctgacccagatggtaccacaaggcggcgcaggcgttggtatgcacgttatcccggtagaggatgctatcagcatggagaacaattcttcttcattggagcatatctcctactggctggacaagtacgaaggaaaatatgcagccagcccatgttcttgtagaaagtcccgcaagacttttgaagaaggctgtgcggatgatccggaaggctggtgtatcgcaatcggcgatatggctgactacgttgttgagacaaacaagggtggccgctatatcaccaaagaagaagtattagagatcttaaagaaggctgaggacaatggttttgttcatcagatcaccaatatcgacggcgaggaaaagatctttgctatctgtaactgtaatgtcaatgtatgttatgcactgcgtacatcacagttatttaacacaccgaatatgtcacgttctgcttatgtagcacatgttgtaaaggataactgtgttgcctgcggacgttgtgttgaggtttgccctgccggtgccgcaaccttaggacagaaactctgcaagaaggacggatctgaggtcgtatatcctaagatgccactcccaaccgagcagaagtggtctccggatatgtggacagaggattaccgcaatatcaaccgtatcaatacacacaagaccggtactgctccatgtaagacagcatgtcctgcacacattccggtacagggttatttgaagatggctgcacagggcagatacgaagaagccttggctctgatcaagaagtacaatccacttccggcagtctgcggacatgtatgtaacagacgttgcgaggatgcatgtactcgtgcaacgatcgatgaggcgatcgctatcgatgaagtaaagaaatttatcgcaatgcaggatctcaaggcagacaagcattatgtaccaaagaaggtcattccaaagatccagggtggtttcgacgaaaaggtagccatcattggtgcaggtcctgccggtatttcctgtgcatattatctggcagaaaaaggctacaagccaaccttgtttgataagaacaagaagccgggtggaatggttacatacggtattccttctttcgttatggaaaaagatgttgttgaggcagaggttgacgtactccgtgagatgggcgttgacattcgccttggtgttgaagtaggtaaggatattaccttaaagcagttgcgtgaggaaggctacaaggcattctatatcgctatcggctgccagggtggacgtggtgtcaatgttcctggtgaagatgcagaaggtgtaatgaagggtgttgaccttttacataccgttattgacgatgagtcttacacactttccggtgacaccgttgttatcggtggtggtaacgtagccatcgatgtatcccgtaccgcagttcgttgtggatctcctaaggtaacacaggtttctctggagacacgtgatatcatgccggcacttccggaagagatcgaactggctgaatccgaaggtatcgcattcgcaggcggatggggaccaaaggagatccttacagaaaacggtaaggtgaccggtatcgtattcaagaagtgtacacaggttaagaatgcagaaggacgttttgatccgaagtacgatgagaacgagacgatgacaatcgcatgtagcaacgtcatcctttccgtaggtcaggcaaccatctggggtgacctcttagaaggtgaaaatgtcgagtttagaggaccggctccggttgcagacaaggttaccttccagacaagtgttccggatatctttgtcggtggtgatatgttctacggaccaagatttgctatcgacgctatcgcatgtggtaaggaaggcgcaatctctatccatagatatgtacagccgcattcatcacttacgatcggtcgtgatccaaactacttcttagagttggataaggatgatatcaaggttgagaactacgacaacacaggtcgtcagacagcagtgatcaagaagaatgcagatggcaagttgaccttccgtgatatgaaggaaacctttaccgaagaacaggtgaaggcagagacaagccgttgcttaggctgtggtgcgtctatcgttgatccgaacaagtgcgtaggttgcggtctttgtacaaccaagtgtgaatttgatgcgatcaaacttacaagagacaatccaaaggcttctactatgcgtaagtcagaggataagttgaagtatattctgccaaatggtgctgcacaggcaatcaagcgtccatttatcagaaagacttcgaaagagactgcttggtatgttgaaaaataagatataaaaagaatagacactctccctgttggtatgtgatactgacagggggagtgttttgtatttgatgaaagtaaaccagaagttagttttgcaataaacttctctttcaaaaatataaaaatcagggaaccaaatggagtggtagcgactctaatatatataacaggttaaacttatcaagaggacatgcatgaaatcagtgatcacggaggatgaactgacggggctcatccaggagaatcgcagagagatgtattattttgccatgtctatgatcgcaaatccgacagaagcacaggatgtggttggcgaggcgatcatgagggcatttgaacaccgacatcaactgcgaaagaaggattctgccaaagcgtggctgatgcagattgttgcgaacgaagccaagaaaatcctgcgaggcagaaaaagaattgttttattagatgcgatggaactggaacaatccagtgaagagggagaaagttatgaggatgtatggcattacatacaggcattgccgtcaccttttcaaagtgtgacggttttgtattattatgatcagttatctgttgaggaaattgccaagatattgaatgtttctgcaggcacagtgaagtccagattgagcagaagcagggcaaaacttgcagaaatgatggaaagggacgggtattcgtatgagtgaacaggataaaaagatagatgctgcaatacggatataccttcgcaagcagccgacagagtcccttccaagagattataatgcatacgttgaccaacagatttggagcgccaagaagaaagtaaggcatagaaaaaagtgtttgcggatagcaatcatgcttatagccatctgtggtgtcggcacagtagcattaactacgaatgacagcgttgcatttgcatctggttttatccagaaaaatataagtgccatagttcaagatgtggagaacataggcgttgacgcgcataagaagaaagcaataagccttgaagagggcaggagttatgctgaagaatgtgtgaaagaaatttggaggcttaagggtaggttagaggtagacaagatagaggataggcaaatttcgaaagatgggaaaatagtagatgaatcgacctattattttggtgccggacaaatagtgtatgtagtaggtttgaatcgtacagatggcgaactgatagagatttactgtctgaattcccatttacaacaagatacttgtttggatgaacaggcactgattcaaaaaatgtacgatcaaaaaagtaatgccatatattttaatggtggagagcaggtagaagaatggtctctgcggtatgagtctttcatggatgaaaaaacaggtgaaatgttgaaagatggaaaaatctattatatttatagaactgacaaaaagatgatagagttggcatatgatgttgatcatgactgtgtggattcgattgttattttcgaggattatagtcagtatcgaagcgagcatgaaacgtcaaggtttttaggaatagaaaatggttactaaaaatgaaaccgaagaaaggggtaaaactgggacatgagtgctgaaactgaaagaagagtttgaaaggagaaacatatgaaaaagttagtaaaaagtttactggttggagtattagcatttgcaatagttttagcagcaaatacacctgtgatggcagccgaaagtcagagcaatgcagatgatgaggggattacatttttgtacgacgatggagaaggtaatcacgaagtttctaccagagccagagccgagtgcggaagatatccaacccatgatatgttgtcaaggggatgggggacaattcgtaaaacaaatggacaggaagtagtctacatgggggcatgtcatcaatgtacgagatgtaatctagtgttgatttgtcaaggagaaccggaatgttcttctattggatattatgctacctatatggcagaaggaccagttaatacaattacggtactgacaactaataatattttgtatacaagcgctaaaacaatacctggaatggattttaggtattagtaaaaaaactctttataggcttaggatatgtaacaaaaaatttaaaagatttttgttgcatatccattatatgggatggtaacaataaaataacggaaacaagataagagattgaagtatggagagcgatatgttacattgaaaaaaacagtagagatttaacaagactatgtcatatgcgaaaggagcagcacatgaaaaaaattggaggaatgggatttttgctatgtcttgtaatcggattgcttggatgtggaaaggcaacaggtgtgtcagaggcagacaagacaaaaaatgcggagaatcttttagagactgtattctctgcggacgaagatatggcagaaggatttcagcagatttctggacaggatgatctggatgcatgggcagaccaatactttggaacttatatgacggatgatggtttgacaagtgctatgcaaggacgcttcttatcagaaggagttacactggtcataactggggtgacggtagaaaaaccagaggttaccgtggaaaaaagagaaaatgccggggacagcgagtggtatgattacactgtagcgttacagacctcagatggccaaaaggagtatcgcggaagtcttcttttgacagagaaagatggtcagtggctggtagatgatgtggcaaagcagtagtgaaaatcagtttttctataaatgattatggtacttaggggggaaaagaattgagaaagaaaaaaatcatacagtggatgtccatcattttattgcttatctatgcggttatctttgttatcatgctggttaatttggggatgatgcagcaggcggcagaggacatgagcagcggtgttcttgcaacgacaagggcagcggtttattatgccctgattcatggtggatgtaatttatgtttcaatgctatggcactcttgtccttgaaatatagaaaacttacgataccaactatatttgtgggactgctaatttctgtcgttatgtgttttgtatcaaattatttgttagaaacgtattggaatagttcactcgcctttgttctgcggatggttatgatagtattactgtccttactttatcgggatactatcaaggacaggtactaacccataaataaagcagatccctgcagggtgcatctttatttctctggcagaatatggtacaatgctctgacagaatgtgatttttaagggagataagtgctatgagtgctatgccgggcaacaactggggagaaattttttacaatctgcttgttatttatttgtttttgtcattggtgctgacttgttattcggtcatccgtatgtatattgttaagcatttctgcaatggcgtaaaatatggcaaggcgcgtatcaagcaattgacagcccagggacgttttcgtcagttgccggtctattctctggacgagatttatgaggataaagacttgggaactgttcgtttgagtgtatttccgaatgattccggagaaaagaccaaatatgtgctgatcttaccgggcggtggctacgcgcattgtgtgacacgagaagaaggctatccgatcgcggcaaagtttaacgagatgggatataccgcgtttgtattggaatatcgtaccggctttcactgtaccccatatgcaccgatggaggatgtatcgcgtgcaatcaagcatattgaggagcatcaggttgagtacaacatcgacccggaaggctatgccctctgtggtttttcagccggaggcaatcttgcgggtatctatgccagccataatcatggatatgaggagtatggcacacgccgtccggcaactatcatgctgggttatccgtggaccaatatgcagcactggctggatcacccatattggaatatctggaaaggaatcatgggtgtctggctgtctgagcgtggctttatctatatgttcggccgttcctgcaatcatgaaaagagagagtctttatgtgtgcaaaagcaggtgcgagatgattatccgccgacctatattttttccggtggacgtgatgtactcgttccggcgtcccatcatgctgaggtcatggtggatgcgctcgaagaccatcatatcaagtatcgctaccgcaggtttttcgccctgccacatggcatcggtctgggactgggaaccagtgcagaaaaatggttgaaagaggctgtggatttctggcaggaaaatgtagcagaaaaagaaaattgagacgaagtaagtgcatatataaaaagtgggtaccaaggatggaaaatccgaggtacccacttttaaaatgcttattttttgttgtagagttcgcagataatgtgaacacaggtttcttcgccgagttccccactatctagggctacatcgtaattgtggtagttaccccactgctgatcggtgtagtatttgtagtaggtcttacgttgcttatcctttttggcaagacgtttttcaatgccgacattcttaatctcgccatagcgtttgagaacacgctctgtacgatgttccatgtcagaatggataaagacgttcagacatttgacgtcctctttgcgcaggatataatccgcacagcgtccgacaatgacgcatggtcctttggctgcacagtcaaggatgacgcgcttttgcgcgatgaagatctcgtcctgtggactttggaaatacatggcactggctgctgaaatgtcaaaccatttattcgcagaggtagagtattcgccctgttcttcgatcaattctttggcatagccactttcttctgccacgcgtgtcacaatttccccgtcataaaatggtataccgagtttggctgcaaccttttcgccaatgctgtgtccgccactaccaaactctctacttatcgttattactgggtacatatgcattacctcccttctttcttacccttattatatttaaaattgtcagaaaaatcaatgcgaaatctcggaagatttgttaaatttgtcctgcaattataaactttatttaataaaaagttaatatccagttcacccacttttaccggaaattggatataataagaaagtaagttagggggattgatagtatgtcaagcgcagcgagagcagtacgaaaacagaccgtggcatctgtaaatatggggacagatgcaaagacaaagaacaaggggaagaaaatgaaaaaggggaaacaggatatggaagaaagacaagaagaaacaatcgaacaggatatagaagtgcaggagacctatgaagaagaacggggttcaacggcataccagaccgtcgatggtagggcagagacgatcgaggtctatgaactcatgacctcacaggcgacgaccggggaagatatgcgtcatatggcggatatccatgatgaatttatgcacaccatggatccgatccttcgcatgtataatgcggctatgaacgttacggaaacccgtatgaacatcatcaaggatgagttcaagtatcgcggactccgttgcccaatccatcatattgatacgcgattaaagtctatgaagagcattgtcggcaagttggagaaaaaggatctggatctttctttgaatgttgcctgcaacaatatctatgatattgccggagttcgtgtcgtatgtccttacatcaaggatgtatatctgatccgtgaccgtttgatggcacaggatgatgtacatatcatggagatcaaggactacattgccaatccgaaaaagaacggctaccgcagtctgcacatgatcatccgtgtgccggtctattttatgaataagaagcagttcgtaccggtcgaggtgcagatccgtaccgaggccatggatatgtgggcaagtctggaacatgatatcaagtacaagtccctgtatcaggatatcggtgtggattttacaggtgagttattggagtgcagcaaactcatctatcaggcagaagagaagatggaatacatgaataatgtgttggagggatagaaagttctattgactgacaataagataaaaagtgtgaaaaatatgtgaaattagcactcacctcttgacagtgctaataaatagtgctataacatagtcagaacaaaggaagagggaataaaaagagaaccagatgttccccgagtttccttaacaacttcgttccaaagaaacaaggtaaacaagcatgaggtgttgccagaggcggcacggtagaaaaggagagatgacttatgttaatgcctagtatttttggagagaatttatttgatgagtttgataactggatggacgcttccttccatgatgttgacaaggctttgtatggtaagcatgcgaagaacatgatgaagacagatgtcaaagagacagagaaaggatacgaagtcgatattgaccttccgggatttaagaaagatgagatccagttggaattaaatgatggttacctgaccatcagtgcagaaaaaggattggataaagacgaggaggacgaaaagaaacactacctgcgtcgtgagcgttatgccggcagcatgagcaggagtttctatatcggtgaaggtatcaccgaggaagatattcatgcgaagtatgaatatggtatcctgaaattatctattccgaaggagcagccaaaggcggttcctgagaaacacttcatttccattgaaggataatcggacgatccagagccggtgctttcgggcaccggttctttttttgtcctttttcctgtttgtaaccttatttgtccgggtgtgctataatgaaatgaaatgttttatgataggagttaatcacacatgaagatcaatgaaaaatataaggggattttctatattatcctggcggcatttggttttgcctttatgaatttatttgtcaaactggcgggagatcttccggcgatcgaaaaaagtttctttcggaatctggtcgccgtcttttttgcctttgttgtcatgaaaaaggagcatatagccttttctattcccaaaggcagcggcaagtatatcttctttcgttccctttttggaaccatcggtatttttgcaaacttttatgcgatcgggaaactctatattgcagatgcatccatgctcaataagttatcccctttctttgccattatcttttcttatttcctattaaaagagaagattcagccataccagttgatctgtgtgatcacggcatttatcggggcactttttatcctgcgcccgggctttgacagcgttgcaactttgcctgcatttattggtatgatcggcggtatgggagcggggcttgcctacactaatgtgcgcattgcgtccaagcatggggccccgggaccgctgatcgtcttttgcttttccgtattttcctgcctgtgtgccgttccttttatcatcgtcgatcaccagcctcttgcctggtggcagttggcatcccttttgatggcgggactttccgcaacgctgggacagttctccatcacggcggcttatacctatgcgccggcgagcgaattatccgtctatgattatacgcagatcgtctttgctgccctgcttggtatcatcttccttggggaagtgccggatgttatcagtattctgggttatctgatcatctgcggcgccggtattgccatgtttttgatccgcaagaaaaaagaagcataagagggtaaatatgaaaaaactcatgattgttatgcatatgtccggggcatatgccgagcagacattttataaagaaaagaaagagggctggcaaatatgtcagatcacttgtcaggatatcgaggggacaaattgctactgcgatgatgcggcaaaagaaagcctgcgtgagagggtaagaccttattcttatgagggcatacattttttggattccggaaattatcactatctgtccctgctctggctggaaaagataaaagaatctttttctttgatcttatttgatcatcacccggacttacaggctccgtcctggggcggtatcacctcctgcggcggctgggtaagggaagcactgctgaccaatgaaaagttgcaaagggtatatcttgtgggtgtggatgcgcatctgattgaggacgtacgcgcagaagatgaggcaagcaataaagcaggcgtgcaaatgtctgatgcgacaggaaatacgatatctgcaaagaaattgtgggaaaagatccggatcggcatgccggattttttacaggaaaagcatcccatctatgtctcttttgacaaggatgttttgcgtgaagaagatgctgtctgcgactgggatcagggagatatgactctggatgaagcagtggaaaaattgcaggagatcagggaaagagcagacaaaattcttggtatggatatctgcggggaggatgcgcgctggaagcagacacaggaggcaggcacctgtcagatcaatgaccggtgcaaccggagacttgtggaaacgctggaataagcacttttatctagccaggaacacaaaggaatgtgccgaaatgcatgttcatgccttacacaaaaaagaaagtgatgcaacgcacacatcactttcaagtaagggggagttatgaaaaagttatgttcttgtctttcgacattatttatattacaggtcagatgtgacgaaactgtgttgcctttattaaagaaatatgaagaatttcagaaataaaatttatagttttcatatgctgatagcaggcatataaaagcgg

SEQ ID NO: 12572 - DNA, 17454 bp, Unknown
  gut microbiota DNA sequence
aggaagacctcatacatccgggtgacggtgtcttggtcggcgtgtcgggtggggcagattctgtggcgctcttacgctttctatggcagatgcgtgaccgtctggggatctgtctgcgctgtattcatgtagaacatggcatccggggacaggagagcctgcgggatcaatatttcgtagaagaactgtgccgggatctgggaatagaggagcggaccatatcggtcaaagaccgcctgcaggatgcggttttagcgcagacggctgtggaggaagcagcgcgggaggcgcgttatgcggttcttacgcaggaagccgaggcttgggaaaaagaactggggcacccggtgcgcattgccttagcccatcatgccggagacaacggagagaccatgctttttcatctggtgcggggtacgggactggagggcatgcggggcatgccggtcaaaaggggacgtatcatccgtcctttcctatcctcaagccgggcacaagtggaagcctatctggcgggtctggggcagacctactgccaggacagcacgaatacggatatccattatgacaggaaccgcctgcgtcatcaggtcatgccggaactgcaaaagatcaatgctcaggcaggcgatcatctgggcagggaagccttatatctggggcaggtggcagattatatccgacaggtggcaaaagacctgcttgcccagtctaggcagggagatctgctcttggcagaacctttgaaagaccagccttcctttttgcggtgtcaggtcctatacctgtggctggcggcttatgtagccggtctgcgggacatcagcacggcacatttggaagccttggatcaactcttttcggcgcagacggggcgcagagtggaactgccttatggcttgagcgttgcccgcacatacgaaggcttggaaatgcgatgtggggacagtggccttgaaaaagaggatctttgccacactttttcggcggaggagatccaagaaggaatccgtatccctttgccggagacaggaaaatatatagaggtatcgagtttttcctatgatcccaagatggaaattcctagaaaattctatacgaaatggttcgattatgataagataaagaatgctattcaattacgctataggcgtaagggagactatctgaccgtgacggcgtccggtggtcgcaagtcattacaggattattttgtcaacgaaaaggtatccaggtgggaacgtgatcgggttccgcttttatgcgatggcgaccatgtgatctgggcggttggttatcggatcagtacgtattataaagtagacgatcatacaaaaagaatattaaaaatacagattttggaggaaaatgaaaatgagtgagacaatcagagagatgatccctgaggcggatctggcagcaaggattgcagagttaggagcgcagatcagcaaagactatgaaggagagagcgtatatgtgatttgtattctgcgcggcgcatctttctttgcctgcgaactggcaaaaaggatcaccgttccggtaacgatcgattttatgacaacttccagttatggttccggtaccgtatctaccggtgaggtcaagatcaagaatgatgtcgagattccggtagatggacgcaatgtcctgatcgtggaggatatcatcgacagcggcaacactctgcactttttacaggatgtatttaaggagcgcaatgccaagagcgttcgtctgtgcaccatgttagataagccggatcgccgtgaggtagatgtggacgttgattatgtcggattcacgattccggatgagtttgttgtaggctatggtctggattatgaccagaagtatcgtaatctgccatacatcggggttgtagagttataaaggaggcaatcattgaaaaagaatagagtgggtctgggcttatatgttgtgctgatcctgatcgtggtatttatctggtattccatttccaatccacagacggcaacttatacttccagccagtttgacaaggcattggcaaagggcgaagtggcatccgcagtcattcaccagaatgaacaggtgccgaccggatcggtgacgatcacgacgactgccggtgggaaatttaccgtctatgtgtctgatgtaggcgagttgcaggataccctggatgaggcaggcgttgactacagtttaaatgatgttcccaacagcggcttcatggagagcctgctcccaatgctgatcgttgttgcggtcgtattcatcctctttatgatgatgatgaatgcacaggcacagatgggtggcggagccaataccaagatgatgaattttggcaagagccgtgctacgatgacaacgcaggacaagatgccggtgcgttttgcacaggtagcaggtctgagagaagaaaaagaagagttagaagagattgtagattttctgaaagatccggcaaaatacaccaaggtgggtgcccgtattcctaagggactgatcttagtcggacctccgggaaccggtaagactttgcttgccaaggcagttgccggagaggcaggcgtgccgtttttcagtatttcgggatctgattttgttgaaatgtttgtaggtgtcggtgcatcccgtgtgcgtgacctttttgcagaggcaaagaagaatgcgccttgtattgtctttatcgacgagatcgatgccgtggcaagacgacgcggaaccggtatgggcggcggacatgacgagcgtgagcagaccttgaaccagatgctggtcgagatggatggttttggtgtcaacgagggtattatcgtgatggcagcgaccaaccgtgttgatattctggatccggcgatcatgcgtccgggacgatttgaccgcaaagtctttgttggacgaccggatgttggcggacgtgaggagatcctgcatgtgcatgccaagaataagcctttgggggatgatgtggatctcaagcagatcgcacagacgaccgcaggctttaccggagccgatctggaaaatctcttaaatgaggcggcaatcttagcggcaaaagagggcagagtttatatctgccagaatgatatcaagagatcttttgtcaaagtaggtctgggtacggagaaaaagagccgtatcatttccgaaaaagagaagaagatcacggcataccacgaggctggacatgccattctcttccatgtcctcccggatgtcggaccggtctattcggtatccatcattccgaccggacagggagcagcgggttatactatgccgctgccggaaaaggatgaaatgttcaacaccaagggtaagatgctacaggatatcatcgtttctctgggcggtcgtgtggcggaggagatcatttttgacgacatcacgacaggggcatcttcggatatcaagaaggcgacccagacagccaaggatatggtcaccaagtatggtttctccgcagaagtcggaccgatcaactacgataatgatgaggatgaagtttttatcggcagggacttggcacataccagaggctatggtgagcaggttgcatcgaccattgatggcgaagtcaagcgcatcattcaggaatgttatgccaaggcaactggactgatcaaagagcatgaggatgttttacacaagtgtgcagaactccttctggaaaaagaaaagatcggacgtgcagagtttgaggctctctttggcggtgatccgatcccgcagccggaagaagaaggcgtggttgtggaaggaatttaagttgggaaaagggcttatgattgttatttgaaagacatttttgtgcatgttgcacaaaaacatctatgcaaaattagtaactttgtgaacacttatgggtggacgcattatataataacaatcgtaaaaaccccccaatacattatataaatatttttgctaaccccatagtaaaaataccttctcctaaaaagacagcgttcgatagctgtcttttttactttctattttattttttctgtatttgagaaaaatctacaaaaatccctagaaaagacaagataaactgagtatgataaaagaagataacatgcgagataagaggataagagtatgaatacagaagcaatttacagcgatgagacaggacagtatgtgatccctatggaggcaaatccgggcgaccgggtcaccattcgtctgcgtgtcgcacatgggcatgcaagggagatctatctgctggcgcaggatacgcattacctgatgcgcccggcacaggcaggcgagcgttttgattactatgagacacaggtgcagttgggagaccagtcattttcctattgtttttcaattcgggagaatgagcaggagcaatgctattttgataaatacggcgtgagtcaggagatccgaccggagtatgcctttcgcatcctgccgggctttgcgacgccggattgggcaaagggcgctatcatgtatcagatcctggtggaccgttttgccaacggagatccgaccaatgatgtgctggacaatgagtaccattacattaagactatgagccgacagatcaaggattggaaccagctgccaaatgccgattttggtgtggctgagttctatggcggagatctggaaggagtccggcagaaattatactatctgaaaagtctgggagtagaggttatctacttcaacccgttgtttgtctctccttccaaccacaaatatgatattgcagattatgaccatatcgatccccattatggcaagattgtcttagaccaagggcagaccctgccggaaggtgcaagggacaatgccggggcaagtcgttttatcaatcgtgtgacggcaaaggaaaatctggaggcctccaatcagttctttgcggattttatcgcagaggcacatgccagaggcatccgtgtgattctggatggtgtctttaatcattgtggttcctttaataaatggctgaatcgtgaaaagatctatcgccctgacaagggctatgcacagggagcctatgaagcagcagacagcccatatcacgattattttcatttttatgatgaaaaccagtggccggacaatggcacgtatgagggctggtgggggcatgataccctgccgaaactcaattacgagggctcggaggatctctaccgctatatcttggagatcgggaaaaaatgggtttctccgccttataatgcggatggctggcgtctggatgtggcggcagacttagggcacagtccggaatttaaccatcagttctggcgggatttccgcaaggctgtcaaagaagcaaacccggatgccatcattttggcagagcattatggggatgcgtcttcctggttacggggcgatgcctgggatacggtcatgaattatgatgcttttatggagccgatctcttattttgtgactggaatggagaaacacagtgatgcctatgagccgggagcacagggcgacagtgagcggtttgaaaatgccatgcgttattatatgaccaaatttacaggttcctctctttatacagccatgaaccagttgtcaaatcacgaccattcccgctttttgaccagaaccaatcataaggtgggcagagcctctgcgctgggggtggcggcagcatccgaggatatcaatataccgctttataaggtggcagtcctgatgcagatgacctggcctggagcaccgaccttatactatggggacgaggcgggcgtgtgtggctttaccgacccggataaccgtcgtacctatccgtgggggaacgctgattatcctctggttgattatcatcgggatatgatcatggtgcataagtgcagcagtgccttgcggcgcggctcctttaaattcctaaagcggatgaagaactttatctcctatggacgttttaacgagcaggagcgctatgtggtggctgtcaatgtaggcgcggagaccctagaggcagatgtaccggtctatctggctgaggtggcagatggttttatggtacaggcgatgctcaccaacgaaaaaggatattcgatcatgccaaccaagtatgccgtcaaggacggtatgatgcatgtcagcctaacggcaaatagcggtatggtctttaagcaggaagtatagagaagaaagtgcaggtggcgaagtgaggacaagagaagaagccttagcctatgggctgtcatttccgggaacttatcaggaagcacccttccatgatccgaattggcagttggtgcgggtgcagggcagtaaaaaggcgtttctatggacttatgaaatggatggactcatccatttgaatgtcaaggtggatccccagtggcgggatttctggcgggatgcttacgaggctgtcctgcccggctatcatcagaataaagagcactggaataccatacggctggatggaaccataccagatgacgatatcaagcgaatgatcgctgaaagttatgatctggtgacggacagtccgaccaagcgtatatatgaagccgtcaagcggatcccaaaggggcatgtggcaacttatgcacaggtggcaaagatggctggcaatgagaaaatgtgccgggcggtcggaaatgccctgcacaagaacccggatccggaccatattccctgttttcgtgttgtcaatgccaaaggacaactctccggtgcatttgcttttgatggaccagaggagcaggcaaggagacttcaggcggatggtattgtggtagaaaatggcagagtcgatctggaaaaatatggtatgaaagacccacacgacgaataaaaaaattcttgcgtgcgtaaaaagcctgtgctataatcttattttgtcaggacatgaatttgttttgaaatgggtggtttcccgagtggccaaaggggacagactgtaaatctgctgcatcttgcttcggtggttcgaatccaccaccacccattgcacataagatttaaaggtatcatatgtgctcgtaacaacacttgactactaagttcgaacttcactgacattcgttctcactaagggtcaagtatgtatcgcactaaactcgaacggcgctatgcttgttctcgttaagtgctcgtaacaagccgcagtggcggaactggcagacgcgcaggacttaaaatcctgtggtggtgacatcgtaccggttcgattccggtctgcggcagtttctgtaaggaggacttctttctgaatagaaagaggtcctcttttgtataataggcaatttatagcaataggagggatcggcgcatggcagaaaaaggcgcagacaatcggaaagaaaaaacttcccatcggatacgctacggaagccttatcgtcatgctggcggtactgattttgggcatcgtatatctgcacggaatggtgcaaaggtcggaagaaaaagcaccggcaagtcagagtgaaacgcccggagcggggcaggagacgaccatcttagagagcatcgaggatctgaaagcagggcagattctagatgcggcaagccttgatctgaatgatccggacaaatattttacttcaagtcagcttactgaggaacaaaaagaagatatgaagggaaaatcttatatagataacccggatatttcttacgacgacctgtcttgccttaaggtcttacattataattatgagcatgagatacaggtgggagagatcgttgtgaatacaaaggtcgcagaggattgccgacagatctttttagaactttttcaggagggatatgagatccattccatgtatcggatcgatcggttttacggagacgatacgacgcgtgatgccgagcaggctgatatcgactctatcaatcaggataatacctccgcttttcattatcgtaagatcgcagggacaaatgtcacatctgagcatgcatatggcatggcgatcgatatcaaccctctggaaaatccttatgtgcctgcaaatgatgtgacggcggcgggagccagcccttacttgcagtatgatctttataaggatcgaagcaatcttcgtccgcacatgatcacgcatgaggatatctgctatcagatttttacaaggcatggttttacctggggcggcgattggaagggaacaaaagattatcaacattttgaaaaggaaatgtagcgaatgaaacgattgaccataggtattctggcacatgtggatgccggaaagacaaccttatcggaagcccttttgtatgagacgggggcgatccgtagcatgggacgggtagatcatggggatgcccatctggataccgatgccatggagaaagcgcgtggaatcaccattttttcaaaaatggcacgctttgcgtatggagatgcggaatatgtacttttagatacaccgggacatgcggattttacagcggagatggagcgtaccctgtcggtactggactatgccattctcgtgatcagtgggattgatggtgtgcagggacatacgcgtaccctgtggaaacttttgcaaaattataatgttccatgcatcctttttatcaataaaatggatgtaagtcacagaggcaaggaagaattactttctcatttgcaggaaaaactagcggatgcctgcatggactttggggctttttatgggaatgcgcctatgagcgatcgagacaaggaacatatcgccctgtgcagtgaaccgctcttggatgcttttttaaataccggtgacctagatcagaaactcctggtggaggcgatcgcaaaaagacagatctttccggttttatttgggtctgccctcaaagtgcagggagtaaaggaacttttgcgcctcatgcaggactatatgcgtcagccgtcctgggggcaggattttgctgccagatgctttaagattggacgggacgaaaagggcaaccgtctgacttatctcaagatcctgggcggggcaatgcagatcaaagataatttggcctatgccattcctttcgcaggggcagaccgtgatgccgaggaggaagcagtggaggagacctgtctggaaaaagtaaaccagatccgcctgtattccggggaacgttacgagtgtgtagatcgggtggaggcaggcgaggtttgcgttattttaggcttgagtcggtcttatgcaggtatgacactgggtgactgcgcgcgggaagaacatgcgatcatagaaccggtactttcctatgaagtgattccgccggaaggttgtgcgcctcatgtcctgctatcttatatgcggcagttggaggaggaagatccgacccttcgtgtgacctggcaggagagggcaagacaggtgcatgtgcatcttatgggaccggttcagacggaagtcctgcagcagcagttgaaaaagagatacggtattctggttacctttggtgcaggaaaagtgcgttataaggagacgatacgcggtgcggtagagggtgtggggcattttgaacccctgcgtcattatgcggaggcgcatatcctgatcgaggaactgccgcagggaagcggcatggaatacgccatggactgtccaccggatgtcctggatctgaactggcagcgcctgatctatacacaccttgcggagcgaacacaccggggcgttttgaccggatctcctcttacagatgtgcgcctgactgttgtgagtggcaaggcacacaaaaaacacacggagggcggagattttagacaggcaacctatcgggcagttcgacagggactgcgcaaggcgcagagcgtgctcttagagccatattaccgggtgcggatcgagatgccgcagcaggcgctgggacgtgttatgacggatatgagcaggatgtatggcaagttcgacgcaccaatcttagaaaatgagacagccgtcttgcagggaatcgcgccggtagccctcatgcgggactacggtgcagtgctggcgcaggtaaccggtggtctagggcagatgacacttgctttggaaggctattttccgtgccacaatcaggatgaggtggtagcagagattgcctatgacccggataaggatctgcgcaatacctgtgattcggtattttgtggtcacggggcaggctatctggtgccttggtatgaggtcgaggacaagatgcatatgccgatggcgtcctatctgtatgagaaaaagcaggaagcgagcatggatcaggtcattgcggcagccaaggcgagggcggaagccatgcggcagggacagccccagggctatgacggttacggcggactggagtcggatttggaagagatctttgtccgtgaatttggggagatcaagcggcgattgccgggcgcagagaagcgtgtgatcgatgcagacaaaaaagaccggatgcaggaagcacgcgaagcctatcaaaaggcacacgccagggacaagaaggttgcgatcagaaagaaatatcttctggtcgatggatataatgtcatttttgcatggaaagagttggatgagatcgccaagaccagcattgacggagccagaggcagactgctggatatcatgtgcaattatcagggacatgtgggacaggaagtgatcgttgttttcgatgcctatcgggtgcgtggtcatgtggaagaagtggtggattatcataatatccatgtagtctacaccagagaagcggagacggcagatgcctatattgagcgcacgacccatgatatggcggataaatacgaggtgacggtggcaacatcggatcgccgagagcagatgatcgtcattggcgaaggggcaaggcgattttcggcaagggatctggaaaaggaagtagaacgcgtcaatcgggaggctatggaagcattcaaaccgctggaatgagacaatttttgacagacaagccataggagtatgtggtatactaatctacatggtatgagacgtttataaatgaggtagcaatatgaaaataattcattgtgcagatctgcatctggattccaagatggaaagcaatctggatcgggaagccgccggcatgcgacgggatgaattgctggatacttttgagcgtatggtggcgtatgcagcagagcaggacgtgcgtgtgatcctgatcgccggagatctgtttgataagcccaatgtacgaaagacggcaaagacccgtgtgatcgagcagatcaaggggcatccgcagatcgatttttgctatatcaggggcaaccacgatcaattggattttgtggaggaattatccgagcaggagaatatcaccaacttaaaactctttggtacggacgaatggacatcctatgattatggggatgtggtcattaccggcatggaactggtcaaggaaaacagtcagaccttgggcatgaatctggtgctggatcagaaccgtgtcaatattgtcgctttgcatgggcaggaatcggactatcagggcaatgaccggacagaggtcgtaaacctatctatgctgcggggcaagtatatcgattatcttgctttgggacatatccattcctacaaaaaggaaaggctggatgaccgcggcgtttattgttacagtggttgtctggaagggcgtggctttgatgagtgcggagagaagggctttgtccttttggatatcaccgagggcaagatccatacggaatttgtgccaatcgcaaaaaggatgctgcatgaagtcaaagtagaggtcgatccgacgatggatatggcggcgatcatccgtgctgccaaggaatgtgtgaaagatatctcatcggaggatctgatcaagatcatcgtgaccggtgagacaaatatagataccgatattgattgcgagcgcctgcgccgcagtctggatcaggacttcttttttatcaaggtatatgatcgcacatcggtacagatcgattatgaaagtttccgtaatgacaagtctctcaaaggagagtttgtccgtctgatggaaagacagcatatgtcggaagatgagagagcagccattattgagttgggcatgaaagcaattatgggcgaggacatagaagtatgaagttaatttcctgttatattaccggatttgggacaatcaaagaatggtcttacgatttttctgacggcatgaatgccctgtgtcaggaaaatggctggggaaagacgacctttagtgtgtttttgaaagccatgttctacggcatggactattcggcacgcaccaagatgctgaccgagcgcaagcattatatgccttgggatggcggtgtctgtggcggttatctgatctttgaggcagaaggcaagcgctatcgggtcgagcgtagttttggcaagacggataaggatgacacctttactctgatcgataccaataccggggcagcctgtgacgatttttcacagaatttgggtgaggaactctttcaggtagatcgggattcttttgaaaaaagtatctttatcccgcaggcatcggtatcgacggcgatgacggacagtctgaatgccaagatgggaaatctggcatcggcaaaggacgatatcaacaactttgatgaggctttgaaccgtgtcagtgaagtgcgtaaaaattataccaggcggagcaaggtcaacaacggcaagatcaatgtcatcaaggaagagatcagcagatgcagtgaagtgatcgataagaaggcggcgatcttagacggctaccgcaagcagtttgacaagttagaggaaaagaaaaagtccttaaattggatggaggcagaaaagaaccgtatcacggaagccatccgcacgcagagcaagcgcgagcaggatatgggggcatatcgccagcaaaaagaatttttggaaaaacagcaggaagaaatgaatgtcctggatgatttctttgcgaccggattgccaagtgaggaagaacacgcaaaactggaagatgtggagcgtcagtatgacatgagccggcggacagagaaagacttagcgatcaaattgccgccggagcagcagatcaagaagtgggaagacctctttggggaccaagtaccggatgaggaggatctttccaagtggaaggatatgtctgtccgcgtgcaggaattgcggatgcagggagaacactccaagttgtctgaggaggcaacggcacagttagatcagttaaaatacttctttgccaataaggtgccgacggaggaagaattatcccagatagaaaaggacgttgtggaactgtcgcgtctggatggtcgtatcgtggagcaggatgagaattatcgaaacatcaaggcacgtgtagatatggcacaaaagaccggcaggacagcgggcaagacggcaggggttctattgctttttattttatttgcagccttactcctgggaggattttctttccggatccttgccccggaagcagacggcagtacgatctatcagattctttgctttgtcggcgcagcagcgacaggagtagccgctattatgcagatcggcagaatacgatctttacatcgcaacaagcaggaagacttgcagggacaactcgcagaggctgcggaggcactggcacagagccgggaaacaagagaagtcttagcaatccgttgtaaagcatttttggctgattttaaactgacaccggcagacagcatgcagcagatggtttatgagatacgtgttaatctggatcattatgtgcgcctgcgggatgaggagcatcaggcgacagcgcagacaacagatgccgtagaggaaatggctgatctgcgcatggaactttatactatattagaccgatatgcccaggtatatcacatggatctttaccatgagggcaatgaggcagaccttttagaacagttgaagaaagataaaaatgcctatgaggaatacattcactgccgtaagcagttggaattgatccgtttgaccatggaggaacagaagcggcttttggaaaaatatctgggcagatttccgttggaagaaggaacttccctgcaggaacaactgcatctgatctggagcaaacggcagcgttatggtcagttacaggaagagatcgctagtttgcaggaaaagatccaggcatttgccgaggataatcaggtagaggagatcgcgctttccgtcgagcagttacaggagaaacaggtacagatcgatgaggagatcaaggatatgcaaaagggaatcacacaggatcgagagtcgctgcaccagttgtcagtcgagttggacggcattgaagatgcggagaaccgtcgtgatgtacttctggaggaaaaggcagagtgcgaccgcaaggtagacctgcttaccaagaccgaagaatatttaaagatcgccaaggagcaattcctgtctacttatatgcggcctttgcgtcagggcatggaacactatatggcgattctggatgataaatataaggactccgtcaaggatatggattttgatattaccatggatctgtccgtgcaggtgctgagtcagggaagcacccattccagtgattatttgagccatggctatcaggatctggtagggctttgtgccagatttgccctggtggatgtcttgtatcataaggaacagccggtgatcgtactggatgatccttttaccaatttagaccagcaaaagattacgcatgccttaaaacttcttgctgacatagcaaaggagcggcagatcgtttactttacctgtcacgaaagccgcatgccatcttagtctgggatgatgattttcccgcctgtcagatatcgaaaaagttcttgacaggcagggggattttcgataaaatcaacttgttgttgtgaaacgacgagcccagttagctcagttggtagagcagaggactgaaaatcctcgtgtctctggttcgattccggaactgggcatctgcgggtgtagttcaatggtagaacatcagccttccaagctgaatacgtgggttcgattcccatcacccgctcttaagaaaagccttgattcgatatggatcaaggctttttacatttatatcttgtagtctgggaaaagcagacagaaaaggggcagatgatggataaaagagaagcaccgatcgcggtgtttgactctggcatgggtggagtcagtgttttgcgtgaactgatcaaaacgatgccggaagaagatttttattattttggtgattctaagaatgcaccgtatgggacaaagagtacagaaaaagtgcgcgaactcaccattgcacatacagaagattttatgaaaatgggagccaagggcgttgtgatcgcctgcaatacggctaccagtgcggcggtgcgcgtcttgcgcctcatgtacccggaactgccgctggtagggatcgagccggcagtcaaaccggcagcagaaaagtatcctcagggcaatatccttgtgatggcgacaccgatcacgatccgggaagaaaaactgcatcatttgattgaaaaatttggcggtcatgctaacgtgatgccgcttgcctgtccgggacttatggattttgtggaagcgggcaatattgacagcccggaactctatggtttcctgcgcgatctgttggaaccctatcaaaagaatctggatgcggtcgttttgggatgcacccactatccttttgtgcgcaaggtcatcgaacggatcgttggcgatcaggtggagatctttgacggcggtgccgggacagcgcgggaaatgcgcagacggcttgctgtggacggtcttttgcgggaagcgaccggaagacaaggaaaaatcgaatttcacaacagtgatcttaccaaagaaagagaagatttatttgaaaaattattgcactactaggcagtaagattatgggaataagaggcgaattcatcaaggtgtggaaaaacccataaacgcttgcattaggaatatgataggagtaaaataattgcggttcaaaggaaaccatatggttttacaaatatataaaatgaaagaaagaaaaggtgagcgttatgaattacgaatttttactttggattgctttgattttaatttcgacaaaagtattgggactgctgtgtaaggcagtacatttgccggaggttgtaggagcactcttggcaggtgtgatcttaggaccttctgcactgggacttatgtctatggagggcgataccggtacactgcttacatatgtggcagagatgggcgttattttccttatgttctccgcaggtctggatacagacttaaaggaattaaaggccaatatcggagcctcttttgttacggcattgatcggtgttattgtacctctgatcggtggtatgatcggttatgccctttactttggagaagatctgagcaattacgatcagatgttacagagtctgtttgtcggtgttgtactgacggcgacttccgttagtatcacggtagaaactctgcgagagatgggcagattgtccggcaaggttggtatgaccatcttgggtgcagccattatcgatgatatcctgggtatggtcgttctggctgttgtttccagcatgaaggatacttctgtaaagccaacgactgtattgatcaagatcgtattatactttgtattgatcctgatcctctttatggttaccagccgtctggagtttgcgatcgaaaaaaatgaccacaagagacgtgtggcgatctttgccattgcattctgctttatcttagcctatgtatcagagatcggttttggtatcgcggatattaccggtgcatactttgccggtgttatgttatgccagtcaaagatcagagattatgttgatgtcaagatccatgatgtatcaactgtattcttctcatgtatcttctttgccagtgtaggtttaaaggttacccttggtggtatgaccttaaaggtatggatgtttgcagtgatcctgacacttatcgctatcatttccaagatggtaggatgcggacttggcgcaaagatctgcaagtttacctggaaagaatcattgcagactggtgttggtatgatttcccgtggagaggttgctttgattgttgcagaaaaaggacgtcaggtcggactgatcagcgaagatttgtttgcaccgatcattctggtcgttattgtcaccacgctgatcaccccaatccttttgaaggtagtgtttaagggtgatgagccggcagaaagtgcagtagagaaagcataagtctgggaaataaatatgaaatggaatccgacagatgtggcatgtgatattgcccgactgtcggattttttgtataaaaggcacattttttctatgtatttaaacatacaaaaacaacaaagcgtatgataaacacacataaatgcttttttaatggtgggaagatgtcatagaacctattatattaatcctagaaaaaataatttttaggaggtcaatgatggcaagtcaagaaatggaaacattaaaaacaggaatgaagatgatgatggagaaaggctt

SEQ ID NO: 12573 - DNA, 7924 bp, Unknown
  gut microbiota DNA sequence
cttctatgacacgctccatgcaaaatctggagaaatgtttcggggttaaactttttgaacgccagagaaataaaatgacgctgaatgaaacagggcagtttgccttggtctatgcgtccaccctgccctgctttaccacagactatattgtcgatcgggagtcagtctatgcagaccgcctcatcctgtcaatcgcagatgaggatgccaatatctgtttctttctatatatgaaaactaactataggtagacgtaccgttccggtcgtcctataagatcaggaaatgccgcaggtcaggcacacttccctgacccagcggtcggcatccaagagtagttcctcatgccgcaggtcaaatgcgcggatatccggatcggcaaaatgttccaaatagcgtttttcatacttttgccccattttcatggcatagaaaacatggatggttgttccgggtacgcggatatggtcgccgactttggtataaagatccgtgtagaactgatttttgaccgattctttggatataaaggagaagtctctgtcggtgccgattcccataaaagccataaattttttggcatattctgcttgctcatcattggcagcaagcattttgtccatgcgctttttcatgaatttgcccggatgtcctgtcatgacaggataaatgagaggcagcataagggatgtctccagataggcgagccactttggcgcctggtccatgtcgctggagccgatgatggcatgatcgatatggatcttttgcctgtctaccagcagggatacaaaggatccgcccagtgagcagccgtatgcggcaaagagtttgccatccagattttcttctatataatcttcgatcttagcgacttcatccaattctgagatgaaagttgtcttttccgtctcgtcaaatccgctataactgacaaccagcgtgtaaaaatgctcttccgtgggttttatgacatgaccgaaattatttttccagtaacagcaggttcccggaaacaacatgatggtcggtttttccttatctccaaatgtatatactttcatatgataaatctccctttgtgtgttagtttatactaacccaatagtagcaccgtgggatttttctgtcaaataaggcaggaaaatgcaggaaactctaagaaatatcacagaaattaaacattgtcatctttaaataattaggaaacgatgttacactataaatgattttcttttttacaaatgaaagaattttttagtttggagcgcctttatgaaacaagacacagaacagttgagacaacttgcctatgactatttaaaagatggtcgtctggagtatgagagggggaataccgatgacagtattaccctgaccgaaaaggcaaaaaatacatttgaaacaattggtgacaaggaaggatgtgcttccagtctgaatatgttggcggttcttttgggagcaaccggcaacggtagtatggcgatcgaccagctttttcaatgtattgagatcgcgcaaaaatatggctatccgatctatgagatgatgggctatgtcaatatcggttgcgaatatcaggtcattggcgcgcatgaaaaggctttggtctattttaatctggcagaggaagtcatccgcaagtatcatttagatcaggatccgaaccaaaaggagcgcgtgctgggtgcatacatcaatatgcaggactcttatatgtccttaaagcaatatgacatggtggaaaagtttctcattctggagcgaccattgattgaatatatgccagatgaggagtggatccgttttgattatgatgtgatggaaagccgggtaaattgggttcttggcaagaaagacctggtctatgagaaactggattatctgataaaatgtgccacagaatatactgcgattggcaattatgtacaaaactttacggaattatgccaattattgatagatatgcaggaatacgataaatggaagcaggtcattgagatcatggagagatattcgacgaaggcaaacgtgcttgacctcaagttgtttgtcaacgagatgtggcgtaagtggtatcagaccatggatgatatgccttcctatacgaaaaaatgcatggaattgacagatctttacaatgagaagattgaaaaggacagatatgacaaagaggcagcctatgatgtcagggttgctttggaaaataatgagagggagcggaaacaggcaaaaaagaagtctgataccgaccagttgacaggtgtattcaaccgttacaagttgggcgaagatcttgccggtttctgcaaaaaggatttacagcgcctttgtgtaggtattctggatattgactgcttcaaggaaaagaatgatacttacggacatctgagcggagacgactgcttaaaagatatcgccagtattattcaggacgttgtcagcaagcactctggcaaggtttaccgttatggcggggatgagttcttagtcgtcatcttaaaccatgaaaatgaggcgatcaaggagatcgcagaccagatccggcagaaattgatggaaaaagccattccgaatgaaaactcgctcgcaggcgtccatgtgaccttgtcgcagggttacaagaatggtaagttgtcagaaaacaaggatttccgaacattttttgacgaggcagacaagatcctttatcgcgtaaagcggggcggcagggacaactatatcgtagaagaatagaaaagttaaaggagggttttataaatggaacaaagagacaatatgcacaatggaaagttatatgatccgaacgatgacagcgttatggaagaacagatggtatgtctggatcgtttgtatgatttcaaccagaccagaccgtcggaaatggataagcgcaatgctatcatgaaggaaatgatgggagatgtgggaaaagattgttacatagaaccgccttttcatgcaaattggggcggcaaacatgtacattttggagatggagtttacgcaaatttcggcttgacctgtgtagatgatacccatatctatgtaggcagccatactctctttggaccaaatgtcattttggcgactgcaggacatcctatgatgccggaattgcgcaaacatggcatccagtacaatatgccgatccatatcggggagaattgctggctgggagccggtgttatcgttgtgccgggtgttacgatcggggacaatgtcgtgatcggtgccagtagtgtcgtaaccaaggatattccgtccaattcggtagcaatgggtacgccatgccgtgtcgttcgacagatcaacgaccatgataaagagtactattttaaagataagaagattgattggtcagaaatgcagcagtttttagattagtcatccgtttttctattggaaagtttggcaagacagggtataatgtctttaaatgtacaaatatgtcttaatagaggaaaacgggggacattcatgaaaaaagaaaaaattaccattgcttttgccagtgtgatcgaggcattatttctcttgttggaaatttactttatgatacacgccaaaggcaattttccggttttactgattgttgccatttgtatggtggcggttctcttctttcttgttttatcgatcatcgaactgagccagaaaaataaagaaaaagagagactggattacgaggacatctataaggcgcaaaaggcatcttatcttgcacagagaaaatactttgatgagttgaacgaacgcctgaaccagttagaggaaaatacgaattttccggcggaagatattatcacagcacaaaaggcagttgcaaaggtaacgatttccagaagtaaggaaaatgcagacgcgcttatgaatgccaatgatgaactgatccagcgcgtgtttggatttgaggaaaaactggcagacaataatgatgcccttcttcgccagcaggagacactcttgcagcagacgagagaagaacttgtggctaataatcagggaatgcaggatcagtttgctgccctgcatcaggcattggagcagatgaagcaggagatttccgatctggaactccgtcaggcagcacagccggcggcaagtccggtagcagaaagcccggcagcggaagcacaagcaccgattccggaggagccggtagaggatgatgcttttgcagcagccgaggaaactcttgcacaagagactgtggaagaacctgtaatagaagaatccgtagctgaaccgattatagaagaagcggttgaaatgccggaggaagcagaagaagtgacagccgcaccggaggcagagcctgttgacaatggcggagagatctcgcaggcagagatcgatgccatgcttgcaagccttgcatcggatacagaggaaatgcgtcaggatgagaccgtgatcgaggaagatgctccgatggtcgatgagggaccggtcgcagccgaggaggctgaggcgatcgaagaagaggcaggggagacagaagaagtacctgttatggaggacatgccatctgtagatgatctgccaagtctggacgagttggatgatctggatctgccggatcttgaggaatatacagaaagtgcagacgatctgccggatctggatgctatagcagagccggaaccaatgccggagcctgccgctgaagaaaagccaccaatgccggatttgtcagatccgaataaggtcttgtcaccggatgagatcgcagccttatttgcaaatatgtaaaaaatcaggggtcgtgatgcgaaatcacggctcctttttgaatggcatataaatatatttttatcaaatttgagaaatcaaaatttatttagaaaaaaatgaaaaaagtacttgcttttttcatcgagtcgtagtaatatattttttgtcgtcaggaacgacagacaagtatatgcgcgattagctcagctggcagagcacctgactcttaatcagggtgtccagggttcgaacccctgatcgcgcatttgaagagtgtcggacttagaaatgtctaggtttggcgcttttttattttccagaaatttccctgtcggtcggcagaggatctccagaccagtgcgataaaaaagtgaactaaattcgttaataaacgtatagtggaaaaaaaccggcaatgctatactaaatgcagaataaggatcataggtcttataacagagccttgtataattttaaataatttgaggaggtacttatgggaaacataggggaattgattgccggtggaaaggcaatcctcggaattgaatttggttcgacgagaattaaggcagtgctaatcgatgaggcgcacaagccgatcgcaagtggggaccatgtctgggagaaccgtctggaaaatggtttctggacctaccatgatgatgagatctgggcaggtttgcaggatgcctatgccaatctgaaaaaagatgtggtagacaaatatgatgtgaaattgacaaaagttgctgcacttggtttttctgccatgatgcatggatatctggcatttgataaagacggaaatctgctggtgccatttcggacatggagaaattctacgaccggtccggctgccgcagaattgagtcaactgttttcatacaatatcccggagcgctggagtatctcgcatttgtatcaggcgatcttaaacggcgaagaccatgtaaaagaccttgctttctttacgacgctggctggctatatccactggcgcatgacaggagaaaaggtgctgggtgtcggtgatgcatccggtatgttcccgattgatcctaagacaaagcagtacgatgccgtcatgatggataagtttgaagatctgatcgcagaccgccactttgcatggcatctggcagatattttaccggagatccgtcttgccggagaaagtgcaggaagtcttactgcagaaggtgcaaaactcttggatccaagcggtgaattagaggcaggcattccgatcgctccaccggaaggagatgccggaacgggcatggctgcgaccaatagcgtcaaacagcgtacaggtaatgtttccgccggaacatccgtatttgccatggtggttctggataaggaacttaccaaatactacccacagattgacatggtaacgacaccggacggaagtctggttgccatggtacatgccaacaactgcacaagtgacctgaatgcatgggttggattatgtggcgaagtcttagatacttttggtgtaaaggtgtccggggatgaattatatggtacgctttatcgcaagtccttggaggcagacccggattgcggaggattgctttcctatggatttttgtccggcgaaaatatcatgaactgcgtagagggacgtccgatgttcgtaaggactccggagagcaggtttacactggcaaacttcatgcggtctcatctgtatgcaagtttcggtgctttgaaagtcggcatggatctgcttttacaggaagaaaaggttgagatcgacgctatctatggacatggcggtatctttaagaccaagggtgtagcccagaattatctggcagcagcactggatacaccggtttctgttatggagacggcaggcgaaggcggtccttggggcatggcacttctggcagcctatctggtcaataaggaagcaggggagacacttgccgattatctggcagatcgtgtctttgcagatgcggttggctcatccgttgacccgaatccaaaggacgtagagggctttgatgcatatgccaagacctttaaggatgcgatcgcagtagagcagacagcggtagagaaactgtaatttttgacaaaatgaggtgaggatcttatgttagagcaattaaaaagagaagtttatgaggcaaatatgcttttgccaaaatatcagttggtgacatttacctggggcaatgtcagtggtatcgacagggaggcaggactttttgtaatcaagccgagcggtgtagattatgacaaactgacaccggaagatatggtcgttgtggatttgcagggcaataaggtcgagggcaagtacaacccttcttccgatacggcgacccacatggtactttacaaccgtttcccggatattggcggtatcgtgcatacccactctacctgggcgacatcttgggcgcaggcaggaagaaatatcccttgctatggtacgacccatgcagactatatttacaaagacgttccatgtgtccgcaacttgactaaggaggagatcgatgaggcttacgaactcaacacaggaatcctgatcgctgatgagtttgagagacagggcatcgactatatcgcaacgcctgcggttctttgcaagaaccacggaccatttacctggggcaaggatgcacatgaggcagtacacaatgcagtcgttttggaagaagttgcaaaaatggcggcaaattgtgagatgatcaatccaaaggttgctccggcaccggtagaattgcaggataagcactactatcgcaaacatggagcaaacgcctactacggacaaaaatagtcttgcacactagatcaggtgttttaagtcgttgctgagacagcgaaaggattttcgcaggcatttacagatcttaaggcagtgaaaagaccgatagaagtaaggaatataaaaacagcatttcatataagagaaagtctccgggctttctcttattttatgcataaattatgcttgtgtgctttggcaggaaatttcaaaaaaagatccttcccatgcttttcttaatttttgcagagtgctataatgttatttgtaccaagattggtaacacaggcaggattagtctatcggtagggcgccagcttcccaagctggataggcgggttcgactcccgtatcctgcttttcgtattttatgaggggatctta

SEQ ID NO: 12574 - DNA, 781 bp, Unknown
  gut microbiota DNA sequence
ataatgtctcttacacacgcccgcatggctgtaccaaaggctaccggattttctttatactcctgcttcatcgcttttttgatagataaaaactggactgcataaatacctgtcagatttgcatcattctgcgcatatgtcgcctgtaaaggattcatataacttccatacagaccatgtacggaaaagtctgagatcacataatcagaatagccccactctgtacgcaaaagatcctttaacagtacatcatttccgccgcaccaggtctttcccaaacggctgtaagcagacatgacacctcttgctccgccttccttgatcgctatctcaaaaggctttaggtatatctcccgtatcgtctgttcatccgcccaggtcaaaatcccccagcggtttttctcctgctcatttaagaccagatgttttactgtaactgtcaggttttgtgactgcgccccctgcacaatggcacttgccatctttccgcaaacgatcggatcttcggaaaaatactcaaaatttcgtccgccctttggatttctatgaatatttgccgtcggtgcataccagatatttgtacctatattttttgcctcgataccacagcgcacgccatgtgcataagcaagatctacattccatgtgcaggcaagacacactcccgccggccatgccacaccggagtcccgatacaaaagaccgcctgctccttttacggaagccggtccgtcattatcattcgtctttggaattcccagacgatctacgcccggtgtct

SEQ ID NO: 12575 - DNA, 3687 bp, Unknown
  gut microbiota DNA sequence
atctgggcaatccacatccggtttttaaaaagagaatacagatagcaaatgatctgaaagaattttaccaggcatctcttgccaaaggatatcggcctattttgttaggggtatacacctataagcaaacggtattattctgtgcctttcggattgaggatttcatatacaaaaaagcccacaactcctctgcccatgtgtacagcagtgacctgtccgatgcagcagagcatgattattttcaaaaaacagattattttggcaatcagatcactgtcttttcgccaaaaggagttgaagttttcctaagggaactgtttgaaaatacagggcagacctggggtacacccgacctattttctgtggatgtttctaatcctatgccgcagcatattgtgcaggagattttgacattttttcaagatgttaacaaagaatggcacggaatagactgctaccgacagatgatcgctgccaattatcgcaacaaatatcaaccggaatgggctggattttatctggaatttttgtttgaacaatatcttgtggagcatcaactacaagatgatatccgctatgcacaggataagtcaaaaaacggtattgatttagacctgtattttccaaccataggttgctatggagacttaaagacccacagcatagaatctcgcggtgtgcagggcaacgattgggatacggtgttttcactgatcgacggcaatcccaggggacacctctattatctggtctgtgaacacgagacgatcaaagatagggtgtgcaattatgaagtgacagaatactggaatcgcgcactacacaaagataatctgcgtagttatggcggacggatgaagaatcaggtgacgctggcagatttttatctgctggatatcaatgacggtaacaaacagttcttgtcacagtttaaacagggcatcaacagtaatggaaaaccgagagcgcccaagatcatggtcgagcgtgatcaatttaaaaattttgcgatagcggaaatgcccttgttataaaaatttttaatcatatcaaaaaagtctagctttccaaaggcggctatgatagaatagatatgtttgagcgtaataaatcagaaggaaacgatattttggaaagacgagacaagggtacatacaatttcaaatttatagatcttttctccggaattgggggctttcatcaggcgatgacgcaacttggtggagagtgtgtgcttgcatcagaaatcgatgccaattgtaatcaggtatataagcagaattatcacatggattctgctgtaaatgtacgagatctgaatgaaaaaacagacataccggatcatgatgtactatgtgcaggatttccgtgccaggcatttagcaaggccggaaaacaggcaggcttgaaagaccagacaagaggtacactattttttgaaattgaacgtattttacgtgaaaagaaaccggagtatatagtgttagaaaatgtacgaaatcttgtcagtcacgatcaccataatacctggcgcattattcatgccgtgcttcaggattgtggatatcgtttgacggaggcaccgctgatcgttagtccacatcagtttggaataccacaattgcgagagcgcgtgatcatcttgggaaaatatgatcccaagcatgtagatgagccgctggatattcagatatcgggaggttacaaaaaagaagataacagcatttatgaaattttagatgagcagaaagtagaggacaagtattacatatctgcgtatgagaagtatgtactgtctgcatgggatgagttttatcagggaattgatttaaaagtgatcggttttcccatctgggcagattatttcaaatacaaggcagttccacaagagtatccggcatggaaacagaattttgtaaagaaaaacatggaactctatcaacgcaatcaagtctttattgacgcgtggctggaaaaatataacaacttacaggattttgttccgacgcatcataagatggaatggcaggctggaacagccatttccaccctttgggagggcattatacagatgcgaccatcaggcattcgcgtgaaagctccaacgtgtttccctgcactcgttgccatggtacagatcccgattattggcagatacaagagacgattaacggtggaggaggcagggcgtttgcaaagttttccgaatccggttcgaacgccggaggcaggagaaggatttatatgcgatagcagtgatcaacaggcatataaacaatttggcaatagtgtcaatgtggaagtgatgcggcgttgtacacaggaactttttgaccgctactaaattgcaataaaattttcttgcataatttgtcataacgactataataaaggtgttgtccgaaagaatgacatctttattttataaaaaggggagcttgcaagtaggcaggctgagagtaagcgagttgctttgacccataacctgatttggataatgccaacgtagggagatagagagttgcagaaatgattatttcgcacagaaatccatcgttggtttctgtgcgttttttgtataaataagaaaatcctacgaaatcgcttatgatacaaaaggcaatttgtgctggagatacgcacgcgcgcgagcatgaagcaggtcacaggcgcgcgaaggagaatacatggaatttagacgagaacaattaaaagtatatgcgattacagaccgcagctggctgggcgaacagacacttgcacaagcggtggaaagtgctctggcaggcggtgcaacaatggtacaactccgtgagaaacacttagacgaagagacttttattggggaagcaaaggaattgcttttgctctgccatcgatatcatgtgccgctgatcattaacgataatgtaaaagtagcaaagttggtcggggcggatggtgtgcatgtgggacagtccgatatggaaatatccaaagtcagagagattttgggagaaaacgccgtaattggtgtgactgcaaagacagtggaacaggcaaaagcagcggaggcggctggcgctacctatttgggcagtggagcagtctttggtacgagtacaaaatcagatgccaagccaatgtccttcgaactgtttcgacagatttgcgaaagcgtaagtattccggtggtcgcgatcggtggcatctgcggagagaacttaccacaactgacaggtcagaaaatggcaggcattgctgtggtcagcggaatttttgccagcgatgatatcgaggcggagacaagaaaactgcgtcaaaagatggatgacatcttagaaaaacacatataatttctccggccttttaaaagaccggtaagttatagatatatttacagcggcagattgggggcaccaccttaggtcgctatacaaaattaatgcagaaagagtacgaggaggaaaaattatgtacacagcattaacaatcgctggaagtgattccagtggaggcgccggcatccaggcagatattaagacgatgacagcaaatggcgtatatgccatgagcgccatcacggctttgactgcccagaatacaaccggcgtaacaagtattatggaggcaactccacagtttttggcagaggagctggattgtattttcacagatatttatccagacgctattaaaacagggatg

SEQ ID NO: 12576 - DNA, 273 bp, Unknown
  gut microbiota DNA sequence
accatattcctgcttttttgtcgtaatattcatgatcatggtgtttgccatattcataaaaccgatgagtcctacaaccgctataaacagataacagccgagcttcatcatgcgggctgcgacttcggcattttgtaactgtgcatgataagtatccatttttatatgtgaagtattagaaatcaaagtattcagactctgttccacagatgccacatcttttttatcacagtccacccacagatagccataggctgttcctctcggattcat

SEQ ID NO: 12577 - DNA, 1470 bp, Unknown
  gut microbiota DNA sequence
gaaatcacttttccatcttctaccacgatctgcacctgattttttccatcttctctggaaaaaaagcagacctgatcgatatatctgctgatctgataacgctccatgctatcttcccagccgcgcctgcgcaccagaattccaacatcaataaaggaataaatatcattttccatgcgtccggcatcccgctcatttcccgccatatttaacatacgatccggtatctttctcacatccgacgtgtgcagagtcgtcatgccgtgtacccccgtactcagacactccatcagatagaccacttccttagacctagtctccgagagcatgatccacttaggattcaggcgcagacaggtcttgatcgcctgcgtgtagtccatctgccggttgatccgcagttccagacaatcatggtctggatgcatactgggataatgccattccgtcgtatcctcgatcgtgatcacacgctcatcctccgggatataaccggataaaaatttacagagttccgttttgcccgctcccggttcgcctaccactacaatatttttatggtctgccacacaggacaaaagcaggtctaaaacctcctctttgcaatagccttctgcgatcatctgtctggcatgcagccgcacatagggcagggacttgcggatgcagatgctgcgcccggtcagacacacagactcatgcacaatggtaatgcgcagacttgccgtctctgcctccaagaccggattttgccggttgaatgccttgctcacaccatttgccacgcgcccggtaaactggtccacgaaatcctgacttaagatcagatctttgcatacatgacgacaattatcgctgtccgtgatccagacctctctgccgttgtaatccacatccgtcacatcatcatcgataatatagggataaagcggtccgaaaaaatcaccacttttacccaatgcgatcatccgttcactcatgtcgtcccccttacagcgcattcttcgtgaagaaatacgtcagtaactgggaaaaagccccaccgacaatactgttttgatccttaccgatcagtgtcgaaaccaagatcaacattgctccgatcacaaccacggtgatcatagctggtccatattctttaataatatcctgcatattctctcatcctttcatttttgcataaaaggacataaagcatacccaaatcggaataagccggcgatacgccgtcgaaaaaagatgccatctcataagatggtgagattgatattaacaagtctttttccttttggcaagacctttttgaattatttcaaaagtctgacaaaagccaatattattttttctttactccatccctcatatgacctataatatattgcatatttcgttgttgctatcggcagcgacaattttttagaaagaagaggtatttcatatggcacagaatcctatcgtaaccatagaaat

SEQ ID NO: 12578 - DNA, 787 bp, Unknown
  gut microbiota DNA sequence
gcatttatcgcgaacgagacgatttcaatagttgagaacgcaggacttatgggggtaccaatgccagcggtcatcaccaaggcaattgatattttacaaacaaaagcaaatgaaggaggaaaagaataatgaaatttaatgtacacgcaggacataatccagaaggcaagattgcttgtggagcaaaggggattttagacgaatcccgcgaaaacagaattgtaaaggataaagtgattcagttgcttcgtgcagcagggcatgaggtatatgactgtactgtaaatgatgggaccagtcagggcgatgtgctgcgacgcatcgtggaaaagtgcaattcgagatccgtagacctcgacatcagcatccactttaacagcggtcgcaatgactatgtgggcgatggatctattggtggaactgaggtgttcctgtacaacattgcagagtccaacaaggtagccattcagtacggaaaagcaatcgtggaaagcatagcaagccttggattccgcatccgtgatgatgctatcccggatcatgttaagacggattcacagctatatgtgctgaagaataccaaagcaccagcagtcttgatcgaatgctgtttcgtagatgataaggatgatgcagatctttacaatgcagatcagatggcaaatgccattgtatacggtattctttcgttggctggttccacagcaccaacaccagcgccatctccgacaccgacactagtgcaggcaggacatagcgtaggagaggctgtatcttttaacaagat

SEQ ID NO: 12579 - DNA, 12436 bp, Unknown
  gut microbiota DNA sequence
gtaaccaatgcccaagttcttagaacctcttataagtggcgcccctgaatatctggcacaggcggacacatcctgccggctgtcgaagccgtgcaagagacagttcctattcaaacaaattgcctctttcagagacgcgacgaattggctcccaattttttacatgataaaatgtgccgtgcctctatctcctgttacgtgcctgcgccaaccggagtgcctcccgccttcttaccatatcccacatctgtcctgctgcgtttactcctctgtcatgaagtagagtcttgacgcatagtccgggaagtgacggacttcatcactgtagccggttcccacaaaggactgcttcagtttcacaccatcgtacatgatggaatctccactgcacagatagtcttctgtctctccatccatcttgacaaacttagcaagcacattgtgtaccagtgaatccggttttacatggatcggcgctgccgtattgaccagatcgccaaattccttgatattatacttgcgcggcagcccgacaaaatgataggtctttgccggatctaatcctcttgcctgatatttcttgaacatggtatttggctgcacttctctttgcatgatcataccgatagccgtctttttatcctgggataccacattccactggtaatgatttccgctttctacccggtaaaaatcgccaaactgccatacatttctgtattccttataaagtgcgatctgcgccttgatgctctccagatcttcttttgacatatcacacagattgcactcgtagcccagtaccccaaaggatgccactgcaaaacgagattccagcggtgtcacacgcagggtctgatggttcggacatgccgatacatgggcagatacacaggacatcggatagccataggaatagccattctggatgttcagacggcatacggcatccgtattgtcactcgcccagatctgtgggaaatagcagagcatccccagatcaaaacggttgccgcctgctgcacaaccctcaaacaggacctccgggaatgcctgtgtcagttcttttgccagacgatagacgccctgaatatagcgatgtgctacttcctgctgtctgtccttcggcagatactgcgaataataatccgagataatacggttcatatcccattttacataagcgatatttgcagaaccgatcacctgcttcatctgctcgatcatatgatctaccactgccggattggcaaaatcaagtacacgctgattacgtccttcggaatggtccttgcccgggatctccatgctccactccgggtgtgcacggtaaaggtcgctatccgtgttgaccatttccggctcgatccagataccgaaagccagtcccagatcatttacctttttgcaaagtcctgccacaccatttggcagtttcttggtatttggtgtccaatcacccagggcacgtgtatcgttgttacgctcgccgaaccagccgtcatccatgacaaagagttccacgccaacgtcttttcccatcttggccagacgaagcaaactggactctgaaatatcaaaataagaagcctcccaactgttgagcagtaccggacgttccttgtgctgccaacttcctcttaccacatgctctctgacaaaaggatgcatatgcgcgctcacgctggaaaatccctcgtgtgaaaatgtcatgaccgcctcaggtgactcaaaagactctcccggtgccagcaaaaaggcaaagttggtcggattgataccggtaacgatacgggtcttttcaaaactgttgacctcgacagcctcatagtggtttccactgtaaaccaggttaaatccatagcaatcgcccatggtctctgacgtatccggctcgcttaccatgataaagggattgcagcggttagaagaagatcccgtataggacgcattgacgaacttaccgatattgacggtcgtatcatagcggttcatctcctttgtccagccgccatggaaagaggtgacgacataaccggaccggttgaggtctaactgcatactcataagacgcgtcaggcgtaccggcttatctgatttattgatgaacttggcggaacgcgtgatgacatcttcctttggaaatacgctatagaccagttccagaaaaaagccctcgttcttatcgcgcagatgcaccacgagttgttccgcttctttggaaacgtcataggtacttggcagggtctcaagtgctgcttttcccttcttttctgccgcatccacaaagacaaaatccgtcgtagaactgccattgtcgcagatcacctcaacaaaaggttcgcggatatcgcccttaccgtagccggaaacttccaggcacatatcttccagtgtaaaattcaagtgttcctgatcgtaggcaatcgtatttcccggagcaaaggcatgcttttctacaaggctgctgccatcccccaaggaaatctttctgccataatacaaatgttctaactgtcctgtctccatcacacgaaaggcataggtcgtatgcagggtgtgcagggcataaaaaccatcccgaatttctatcatagttctcctacctcctaatccttttagtccaaaacgactctcctatcattataataggaaagccgctcggattgcaaaaatttaattattttctttttcgttttatgcctgctttttcgcctctaattcctgggtgatctcttccagtttctcatcggtcaacttgtaattcttcttatatacgatataaccgatgatcagaacaacggtcggaagcagggtcatacagccacggagtcctactctctgaccgctggcaagttgtgtcagtgtaccggtttcatccttcttgatgttaaatacggcaagaacgatagatgctaccaatgctgacagaccggatgctaattttacaacgaatgtctgcatagaaaagataacggattcatctctacgatcattctttaactcaccgtaatctactgtgtttgcaaggaagatcgtgataatgacattcaacataccgatggcagccatgataaggaatgccgggatcagtaacagatatacgttgctggatccgcttgcagaaattccaaggatgatcacgtaacctgcaagtgccataacaaaactcagtgtaaagatcttcattgtgttcatgaacttacggaacaatgggaagaggatcatcattgccaggatctggaatgctccaccacaggtattgaacaatgtatagtttgcttcccagtttgccgggctgaaatcatacttaaagaagtagatcaaaagattctgggtaatgtaaagtgccgtgttgatcataacgatcgcaacaacgacggtcattgcctgatcgttctggatcagagccttgaacatatctttaacagatgcggactgcatttctacagaggacttttccttgatcgtcacacaggtaatcgtgatgaatacaacaaacaggactgcaacgataagtgccatgtacttgtaacctacctgctcataatttgcatctgtaccaaaagcatgaccaagggcagatactgccataaccgtcacgatagagatcaatgcggaaccaacaccggcgcaagatcttgcgagtgctgataaaccttcacgttcctttcctgcttcggtgaaagccgggatcatagaccagtaaggaatatccatcatggtgtatgtcattccccataagatatatgtaacggctgcatatgctacgagtccaccaccattcaatgcaggcggtgctgcaaacatcagatatagcatgatggcattggtaagggttccgatcatcagccacggacggaatttgccccattttgttttggtctttgcaacgataacgcccatgatcggatcgttaaaggcatcaaacacacgagccaccagcaaaatgatacccatggcaatggcacttacgcccatgatatcctgatagtaataaaggatataagacgcagacagcatatagaccatgtcttttccaacggcaccgataccgtaagcaaatttctctttgccattcaagttcttcttttcttccattttagaaaacctccttaaaaacccctttgattatttattcttctcttttaagcccatagcgatctctactactttatatgcaccgtcataaagaccaacggacttgttcaacctgatactgtcgcacatttctcccagcagtttgtcatccttcataaagatgtcgatcatctgcaaagtatgtgggatatcgcgacattcgagtgttccgtcacccatctctgcagaatggatagctccccacatttcatgctttccgacacgcttgataaaaagttttggcaccggataaaaagcaagttcacttggctttgtcacaagcacatccgcactgcgcatcaaaaggttggtgcaatatacggcttcaaaaatgttttcatgatagaaagcatggatgcctgtcacctcaccggtcagtgcctcttcagcaaactttgttgttgcctcaaactcattaaagtgctcggttgccacgcctgccatttccgggatatccttggaaagatcatcccagacattcttgtaatctccgacattgacataaagggctgccttgttgtccttgatcatcggaagcagatatttgataatggctgcaaagatctctttctgtgcgcctgcaccaccgatggtaagaaggaaacgcattggtgctccctttgcctttcttgccattctcgcatcgcaatctgcctcgatattcgataccagttcatgatcgatataatgtccggtgtagaccagatcttcatttggcatctccttgcagacctcatcgccgttcatgccgttacagataaggtagcccatgtaagcatttttacactggatggtatgtacacttccctctgcgaaatgcagtgccattggccagttgtcaggaatggcattgacaacgtttttcatgcctgcatgaatggctgcctgcgccggccatacgtgtgtaccgatcaccgggatatcctttggcacattgcggtaaaccggagccatcagttctgcattcttctgatcggatgcattgtacttcaactgacggaaggtctcatagttggtcggctcccagaccagtttgttaaagagtgcattttttgaaagacgtgatcccaaagaatagagatcgttctgtgcactgatcaccttggtacaggtggtctgtggatagccgttgagatccatccagtacggggtatatcccatagcttttgcagcggatgccattgccatagaaatacggtaatggccgaatcccatacggatattcccaacaatgatacccttttcatgatcaaattcttccgggctgtccccctcttttaaaaggatgtcatagacaccaagtgaatcgccgatatgctcattcttctgaatgtagattgggtaatctacattggagtcatctccaaacttcttgataaactttttcttagatttaacagcgctcttgtaaaccttgtcgctcatgacattgccaaagattacttttgatttttcttccatattaattatcctcccttgtgctttgcacttctaatttgatcgtgatcggatccaagcctgcacacgctatcgtgacagatgcttctcccggctcccccatggattttatataaagccctgtggctcctccgcgaagtggcactgcatttggaccgatcagttcgaccggaccgcttattgtgacagaaagtgattcctgcatataataaagttgattgccatattcatcgacggctcgcacgcgcgcctctatgacatcataggtaatatcttccaccagtgtcgttgccgacaggctaaccgccaaagatgcttttttcatcggtgtcttgatcagggaacggacaaccttgccatccttgatcgcgtcaaagcgatactgcttggactcgcctccccaatcgcctacatatttattgtaaagacctaccgcatcgtttgggttcatatggtagatacaaatcaactgaaaagcattccagacaagttttggtgtgatctgcataccatgcattgccacatggttcatacaatccttgacgatctttgcctgtctcttggaatagccttcttcttttgcaatggcatcccccacataatcattgatcaggatcggtccatgttttaaattctgatacttagaatcactctgtttgtattccttgatcaggatgttgttcttatacatccgtacactgtctgcattggagatcagataggtatcgccccggttacaagccggatgctcgccgatatccatagtcgatgacagttccaagaccggattcctgtcttcttggcttgcataaacagcagctgccggttttggatttcggaacatatccaaaacgccgtgataacaaatgcggtctccgctgccaaagtccttgtgggtgttgtagtcaaacatgcaccaaccaaaggaacctgcgatatcttcctgtcctgcaacagcatcgaggacatttgcatggcggatcatatgctcgcgtctgtgttcttcccaatcaaacatcttggtcggatacatgtgtccgttgtactctgtgatcagataaggcttttctacatcggaagtgaccttttcctttggttcacaaccggcattggcaccactgtggacaaaatcgttgtaggtgtaaacgtcttccagaagatgactctttttcatagcacggacaccgccggtctgtctcgtatcatccaaggcatgtgccgtggcattggttctctcgtaaaaagcatcattgtcctgcgactcgttgatgcgcacgccccaaaggataatggacggatgattgcgatactgcacgatcatgtctttgatattttccactgcctgatcctgccaagcctgaccaccgatatgctgccagcccggcatttccgtaaagactaaaagtcccagtctgtcgcaggcatccataaagtagtgcgactgcggatagtgtgatgtacgcacggcattgacggcaagttcttcctttaaaatcttggcatccagccgctgcatggattccggcatagcatatccgacataggcataagactggtggcggttgagaccacggatcctgacctttctgccatttaggtaaaagccgtcttttcgaaacagggcttcccgaaatccgaccgtcaccctcttttcatccacgacctgtccctggtagagcaactgggtggtcacctcatagacctttgggctttcaatatcccagagcatgacatccgcaactggtgtgctaaaggatgtcgttgcgatcggggcttccaaaacgacctgatcatccacgatctgacggataccgacctgaccggcactgatcgcttcctgtgctttgaccgagtaagtaacttccgatgccaagataccggatacctgcatctgtgcgattgccttggcatccatacccttggtcgttacagtctctgcaaactttggttttaagaaaatatcttctatataaatagaattctttacttccagataaacatcacgataaataccgccataggtcatatagtcgatcacaaatccaaacggcggctgatccaatgtctcattagagtctacccgcaccgtcaaaagattgtcggcaccataattcaaggcttctgatatatcgatcgtaaaggcggtgtagccacaatggtgttctgccatctttttgccattgacataaacctctgcctcatgtcctaccgcctcaaaagtcaaaagcaggcgtttgccctgccagccttccggtgcgtataagatcttttgatagcaggataccatctgataggtatgctcatcaaaataatgataaggtgtttccttacaggtgtgtggcagagaaacggtctgtgccagggaaacatccatggtatcgacgatcatgtcttctgtaaattcttcggtaaaaaaccaatccctcatcaaatagatgcgatctttcatatttgccatcctctttctatctgtgtaccacaattccatcaaccataatggtcacaagttcttctaatgcctgcatgtagtcgatttcctcgcgttcaagttcgtctcccataatgaagcgctctaccgcagactcaaataccaactggaaaacccggaaatcgaccgaacggatcaagccttcctctacgccttgttccaataggcggttggtcatctcccatccgctctccaaacgctgtctgacgcgttcatagacttccggatgcttatcccgcaaaacataaaactgggtgaaatcaaaatccgtataattctccggcatcacacctaagatcttgcgaatcttctgtaagagggataagtgcttatcctccatgaccaaagcttcgctttccttaatataatcaaagacgtaatcgaccattgctatcaaaagttcgttcttgtctcgaaaaacggtatagatcgttttcttgctcatgccgagttccgatgccaactcgtccatggtaaatttgaccccctgcttttctacaatatgtaaagcgccttctataatacgtttctccatcccgcgtcctcccttttcctctttaggaaaccagaaaactaaaatcagtttcttcgtttcctatattgtaacaccggtctgctcctgccgcaacatagcatatattacaaatttaacgccccttttttggcaattatttcaaagaataaatttttatgcaaaatgtacgaattcctcgttttctttttcacagcctttccggttttcgtatctattattgtgtttatgcacaatttatgcgctactatattgtgcatttttaccacagtgatttttcccccacttgttatcttgcttgtaaacgctcctatttttatgcacattacacaattttaacataaagtttttgttgacattccctatatgcggtgctatagtaaggtcatcaaaggaaagcacctttgaaaaagaaaaaacgaaaggagagaaaagatatgtataacgaatttgatgcattcggtgaattgttcagccagtacaacacatacgctaacaaaacaagcgcaaatggtcagaagccagtttcactcttaaaatttgctttaggacagttctaagagatacgaaaagttacagtatgatttgattcaattttaaaagcatgatttgaaaggagatatgaattatggaattctcaaatagtcttggatatgtagtttacaattacaataagtatgtagaggcacaggaaaagaacggcgaagatgcagtatcattcttcaagtatgcttttggtaatatgtaatttaccaaaagcacctactttagaaaacaatcggcgcaagccgttcatctgataaacctaagaagacccggcagatcgccaggtctatttttgtgcgtaaaaagtgcgtgagggacgttccttttgccacaaggagtgtccctcactctatcctaaagaacagcaataaatctacggaattcttccagtcctttttcatcacatttgaagacaccggcatcttccagaacctgacagaagaccttgccaacttcctgttccaaaatgccatcaacattggtcgcatcaatattaatgccctgcttctcatatgcggcagtaaattcatctacccagtctgcatgctttttcaaggtctcatctgcacggatatccttaccatttacgatcgcatccgcaagggcttccatctcccctttcagacgggaaggaagtacagcaagacccatgacttcgatcagaccgatattttcctttttgatatggtgcaacttggcatgaggatgataaaccccaagcggatgttcctctgtcgtaatgttattgcgcagagccagatccagttcaaacatatcaccgcgtttcctggcgatcggtgtgatcgtattatgtaactctccgtcagtctcggcaaaaatgaaagcatcttcgtcagtataagttctccagcatcccaagatatgatctgccagatcaatgatacgcttttcatccttgcaggaaagccggatcacggaaagtggccatttcacaatgcctgccttgacatcttcaaaaccttttaccataaattcttcaatgatcggtgccttttccatagcaaaggtatagtgaccgccctggaaatggtcatggctgagaatggatccgcctacgatcggcaggtctgcattggagcccaagaagtaatgtggaaatgtctttacaaaatcaaacaatttcacaaaagtcgcacgctcaatcttcatcggtgtatgctgaccgttgaaaacgatgcagtgctcattgtaatacacgtatggagaatactggaatccccatctgctgccgttcatagtcagcgggatgatacggtggttctctctggcaggatgattggcgcgtcctgcatatccctcattttctatgcaaagcaggcacttgggataagcagactgcttggcattcttagctgccgcgatcgcctttggatccttttccggcttggaaagattgatggtgatatccagagtgccgtacttggtatccacggtccacttcttatctttctttacacggtaacgacggatataatcactgtcctggctgagtttaaagaaatagtcggtggctgcctgtggtgactttttgtattcttcggcaaattttgcctgcacagtcgccggacgtggcatcagacaattcatcagacgtgtatcaaaaaggtcgcggtaaacaacgccatcctcgatcagtcccttttctactgccgcatccagaagatcttttaagacatcctccaatacaatgtcagacagatcacaatccggatccgtgtactcatcctccttcatgacatccaaaagcaggttggtcgtgtaaatgcgctcgcactccggggtcaatcctgtgttgatgccgtattgtaccaactttttaatactttcttgtaacatatttattcctcctcctttttattgcttagataacaatgtattttgacgtgtattgggtaaattagattactttatgattgccaacaagaaactaaatcctaaaatttcgtttccatatgcttaactatacttaaatcctacgaattttgcaagagcagattctgaagttctgcgacggaatccacgatataggtggcacctgcatctgcaagttctgcccggtctccatagccaaaggtcaccccaatgctgtccagtccattggcgatcgctccgtcaacatcatgatgtctgtctccgaccatgacgatatttccctttgccacacccgggatctgctccatcgcataggcgatcacttcgctctttgccgtcctggtctcatccatcgttgcccccgcaacataggtaaaatacggacgtatcccataatgggatatgatctgctcactaaagaactccggcttgcttgtcgcaaccagtaactgctttcctgcactttttaaggtaagcagaagttccggtatgccgtcgatcagtttgttttcaaacaagcccttggtgctgtaatactctctataataggaaacagcctgaactgcctgcacctcatctaatccataatatttctgaaaagactcgatcaatggtggtcccacgaagcacaaaaggtcatttttgtcttctacatgtattccaaatttttccaaggcatgcgccgccgaattgacaatccccggtgccgactctgtcagcgtgccgtccagatcaaaaagcactgttgtatattgcatcttattccctttcatttctatatttgcgcgcatcctgtcccaacttgcgcgagctatcatgtataattttccatcattggtaacaaattaaccatatgtagtcttagtataacacaaatcacagatttttttggaggataatcaaatggatcaagaaaatatttcacaggatagcatcgaactcttacatgaatgtgacaaaggcatacagatggggctttctgtcatgcatcaggtggcagataagatcagtgacgaccagtttcgctccgtcttagaaaaaagcagaaatacgcatgagaacctgaaggataaaatacagtccctcttgcaaaaatacgggcaggaaagcgacgcgccgaatcccctcctctccggcatgtcctacctttccaccaatctcaagattgcactggatgccgaggacaccaccatcgccgacctgctcacagacggttgtgacatgggcatcaagtccctgcgcaaatatttgaacgaatatgaacgcgccggggacgagatcaaagatctttgccgcaagatcatttctgccgaggaagaactgcgcaatcagttgaaggcatttttgtaaaatgattgttttttcctcttttttttgat

SEQ ID NO: 12580 - DNA, 16527 bp, Unknown
  gut microbiota DNA sequence
ttttttgatagtctgtttttagcaaaaaaattgtaaaatgttcataacaggaggaacaaaagatatcatgaactttttagaagaacgaatcgtgaaagacggaattgtaaaagaaggcaatgtcctaaaggttgacagttttttgaatcaccagatggacattgccctctttgatgaaatgggtgctgaattcaagaaacgctttgccgacgcaaatatcaataagatcgtgaccatcgaggcatccggtatcggtatcgcctgtattgttgcaagacattttaacgtaccggtcgtatttgcgaaaaaatccaagagcatcaacatcgacggcgacgtctataaggcagaggtcgaatctttcacacataaatgtaagaacaacgtcattgtttcccgcaagtttttggggccggatgaccatgtgctgatcatcgacgactttttggcaaatggctgtgccctgcagggactcatctccattgtcaacgaagccggcggaaccgtagaaggcatcggtatcgctgttgaaaagggcttccagaacggcgggcgcatcattcgcaatctcggtttccatctggaatccctcgccatcgtggagagcatggacgctacaagcggagagatcgtctttcgtcagcagtaggataagcaaacaaatacactaagagaaaggacttgtatggaattgttccatatataataagaaatgacatctacaaaagaaaccccgtctattgaaaatttataccatcttgatggcaagatttccgtaaagcaggcagtaccatttggtctgcaacacattcttgccatgtttgtatccaatatcgcaccgatctttatcgttgccggagccagcggactttcttcccaggataccgccatgctcatccagtcagccatgctgatcgccggtattggtacactgatccagttgttcccgatcttccacaaggttggatccggtcttccgatcgtcatggggatcagttttacctttgtttctgtctttacctatctgggcgtcgcctatggctataatgccattgtcggagccgtcattgtcggcggtatcatcgaaggtattctcggactgctggcaaaatactggatcaaactgatcacaccgatcgtatcttcgaccgtcgtgaccgctatcggcttttccctgctttctgtcggagcatcttctttcggcggtggcagtggcagcgaaacattcggttccgctacaaactggatcttaggaagcatcacacttttatgttgtatcctatttaatatttttgcaaaatcttatttcaaacagttatctgttttgttcggacttgtggttggttatctgattgccattgctatgggcgcagttgatttttcttctctgcagaacacagcgatcattgctttcccgtcactcatgccattcaaaccggagtttaatatcaacgccattatttcaacgaccctgatctttttggtgtccgctaccgagacgatcggcgatacctccgcacttgccgcttccggtctgaaccgcgaagccactttaaaagagacctccggctccatcgcctgcgacgggttcatcagtgcactctccggtcttttcggctgtatgccaatcacatctttcagccagaacgttggtctggtcgctatgacaaaagttgtcaaccgctttgccattgctaccggtgctgtgatcatgatccttgccggtatcttcccgatctttggttctgtgcttgccacactgccagatgccgtacttggcggttgtaccctgatgatgtttggtaacattgtcatcagcggtctgcaaatgatgggcaaagccggttttacacagcgaaatatcacgatcgccgcactctcactcagtgtcggcatcggctttacacaggtaccggaaatctttgctattttcccgcagatcatccagaccgtgtttgcagaaaactgcgttgccgtcgtatttatcgtttccatcattttaaatcttgttttgccaaagaatatggaagcccataccgaggcgtaaaaattatgtataaaaagaatgtgctttggcacattcttttttattgcggtgcgaaaaatgccagcgcgatcgctcccggtcctacatgggtaccgatcgccgccccgacggaaacgatcggcaattcctcttttgtgtgtgccttttcccaaagcatacgactatcctcgatatacttgcagatcaacttatccgaaagcccggtatatcctaaataaaaaggacgtgaaaaatcaattcctcccgcctgcttggtccgctgcatcagcaggttctttccattctttgatccgtgcgcttttccaagtacaaggatttctcctgcacctactcccacaaccggcttgatcgataatgcattaccaagtgcagcagatgctgccgagatccgtccaccctttttcaggtattccagtgtatccaataatgcgatcagttggatctgtttcttttcctcctccaaaatccctacgatctcatctattccataatcagcctcgaccagttctaccgcacgcatgacaaggcatttttgtcccaccgtgacgttttcactgtctacgacatagacctgaccttcaaattcctctgccgcgatacaggcgctctggtaagtaccggataacttggaggaaagcgtgataacaaggatctgcttgtcgctcatctgtccctctcctgccgatgcatcagcatccagttcctgccgataagcctccataaattcataaggactgatctggctggtctttggcaaaacatccgtctcgatcagtttttcataaaaggtctcgtgtaaaagatcaacgccatcacggtaatgttcttctccgaaagaaacatgtaatggaaggacccgcaccttgtcacattcttcctgtaaaatatccgatccggaatctgtaattatcttaatcatggtatttatacctcacttttgatattttgtgtattactcgtgctagtataaccaaaggagatgaggctgtcaagtcgatggcataaatatggcggtaaggaaagcgaggaaagggggaggtgataggggcagaccggctaatgcctcccccttcctcgctttcccttctacactcaaaaagtcccgagtgagatacctcactcgggactgcccctcaaaaaaagatttattaattttcctgctctctgcgctttgcaagttctgcgtagacatcaaccagtttttcttttgaaagtttatagccaaatgtcagtaataagaacataaccaaaagcacgatcgccggaaccagtgttgccatatcatataattttgcaacaacttctgctgactgcttgcttgcatctacattgtagccgatcactgcaagtaagatcggtacaccaacacctgctaaggtctgacctaactttctggtgaaagaatacaatgcataagatgtaccttcttcacgtctgccggaaagaagttcatggtaatcgataacatccataaccaatgcccatacttccagtgtcaggaatgtctgtcctgcgcctgagaagaataagaggatcataaagacatatgggttgtttaccatcggtgtaaacttgaggaaatacatgataaagtttacaacagcggcaaaagcaagaccaaatgcacagatctcctttttaccaaacttgcggactaacttaccaatgatcggtaagaacaatgccatcggtacataagtacaaacggtcacaaaactgtaaagtcccggcttctcatagaagttcaggaagaggtagttgtaagtcgtctgtgtgtacatctggaatgcgatcaaaagcatggataccagacatagaaaaatgaacggcgggttcttaaaaagatccccaacggtacggaatacatgcataccttcctgcttctgctttggcggaactgtgatacgttcctttacatttctaaaatgtaggctgtaaataccaatagataccactgcgatacaaagtacggcaaatcctaacttggtcggatctaagacctttgtttcggtaccatctgcaccgatcacagtagaatataccaaaagcggcagtaagatcatggatgggatattaccaaatcctgcacctacggaacgccatacagaaagagacgaacgctccatcggatcatcggtcataacggatgccaaagatccgtaagggatgttgacacctgtgtacatcataccatataagatgtaagtcacatatgcgtagatcagatactggttggtcgtcagtccgggaatcttgacaaacatcagtaccgctgctactgccagtgggatggatgcccacataacataaggacggaagcgcccccactttgtcggctttctggaatcgataaagcccccccagagtggatcattgattgcatcccaaattcttgccacaaacatcagaatggtaatctgtgccaacggaatatgtaggcaatccgtataaaacattgttaaaaaagatgaaatcagagaaaaagtcaaaaccccgccaaagtcaccgcaggcatatgccattttctccttggtcgtcagaccatgtgttttttgttcccccattataactctccttttttgtaataatataatgtcgcgagttgtattatttaactcatttaatttattacattttactacgtttctttccatatggcaagttactttgtgcaattttttaacattttttaattcttttaaaaaatcctgtccacactgggcttttcgtgctagaatacagacagatccaaatttaggagtataaataaggagacgattatggagaactttatcacaacccagaccaaatgcggtcagatccgtggcatccactgcgacggctacgataaataccttggtatccgctacgcaagcgccgagcgttttgcctatgccgagccggtagaacactgggacgacgtatacgatgccacccattacggcaatgtatgtccgcagaaccgcactttttacgaacatttagaaatcccggaacggcttttctatcacaatgaattccgtcaggggcagaccttccactatgacgaggattgcctgaacctcaacatcttttcccctgccggcgacggacctttcccggtactggtctttatccacggaggcggctttgattccggtgccaattatgacagtgcgatcgacggtactgcctatgccagacgcgacattgtttttgtatcgatccactaccgtgtcagcatcttcggttatctgacgcatccggacatccgggaaaaatacggacgtgacggcaactttggactcgacgatcagttcaccgccctgcaatggatcaaggcaaacatcgctgattacaagggcaatgccaacaacatcactgtcatgggacagagtgccggtgctatttccatccagtacttaagcctcagtccaaaatgccagggactttaccagcgtgccatcatgttatccggtggcggcatgttcccgaaatttgccctgccacgctcatcggaaaacacccatgaatactgggaagatctgatggtgaccgccggtgtttcaaccttagatgaactaaaggtcttagataccaagaccatctttaccgcgatcgaggaactgaaatcccgtcgcaaggacaacacctacaacaccatgccggtcgtggacggctatctgatcagcgcacctgtggatactctgatcgatcaccctctgccgatcgactacatgctgggctacaccaataatgatatgtatgccatcatcatgggacatatctcccacaaatatgccaagacaaatcacgcctatctttactactttgacattgatgctcccggcaatgaccataatggtgctttccattccagcgaccttcgttatgtctttggaaccctgaacgcatcccaccgaccttacgacgccgaggataccaaggtctctgaggcaatgatctcctatatcgttgcttttgccaaaacaggcgatccaaatacagaccatcttccaacctggaagcctgccggtcgtcatgcactgcatatcaaaaaaccggcaagtgctattgccatgggtccgaccaactggttcaaattattgcataatacattaacaaaaggcgatcccaaataagggaccgccttctttttgtcagaaactactctgttatccaacgtcctactttataattattcttgccgtcttttttgacctgatacaggagtttgtccgccgttgccagataatcccacaaacggttctttgtctccggcacgcagtggcaacatccttgcgataaggtgatataatctacgcccacagggcttgtgcccggcagtgcgatacgctccatgttgcttttgagatgtgccatcatctgacagatctcctcgtctgtcttgccggtatagacaaggacaaattcatccccgccgtaacgtgcggcaaatacatcctcattttcctgcaccagactgctgagagcatctgccacatgcaccagataatgatcgccatcgatatgtccgtaagtatcattgaccgatttgaagaaatcaatatccaagatctcaacgccaaaagtcgtaccattgcggatcgcctttgccaacgcatcttctgcataactgtgccaataagcacggttgggcagtccagtcagggcatcatggttggacttgatcatgagtttttcattctgctctgtgatctccttttgcatatgcatgatgcgcttgtgctcattgtgcgcactctccgcctgcacgacggcttccagattgtagatgccacgctcccagtaactttccagaaaacacttggtatattccagatagccgacctggtcctttaggatagcggcacaacgaatacgtttttccataaacatactatagataaagaaagacgcattgtcctgctcgcactttttgatgaaataattgaggatccttgtcacttcatcgtactgttccagatccatatatacctgaatataggcgcggatatcatccagataatccgtgtaattatcactctggtggaaatccttttgcgccatgccaagatgaaactctgccttgctccgctcatcacgcgccagatagagagtcgccaaaaaggtgtgtacgccaaactggacataaggaatatccgggttcttgtaaatattgtctatgatgcgctcaccgcattcagtcgcctcatcgatcttgccgatgttcaaaaggcagtagcccttattacaaagcatgcagttcatattattaaaggtcgtttccttggtctccgcttccccgctctttatgatgtactcctcagcctctgcataatagaacatggctctctcgtagacattgttgtagcggaaaagatctgccagattggatgctgccatcccatggatctgcgcgaaacgatattccttgctgtaatcaatgctggataaataataatcgaccgccttggtaaaatttcccatgacaaaattgcatacaccaagtacattgtatgtccgtgccaccaactcatactcttgcgttgccaactggtatttgataccctcatgcccacaactgatcgcgttgacacagtcattgtccgaggcataatactccatcatgtaaaaatacgcaagcgcgaagagataatcagactgttctctcgccgcatactcaaacaacttttcgcaatatctgcgaaactgccgatacaaaggggtaaagatcattggaaatctctcttttacctctgcaacgcatgcctcgatttccggttcaaacctttccatgataccgtttgtttccttcctcatcttatgtaaaaatagtacgaaaacagcaggaacacccaaagaccgcccatgatctcacatattcctgctgctcctaatccatttccccccgaattagtcatctataactatgataacactattttcacatttttcaaggatttctctactctattggatcgtaatcattttgccgataaatatgcggttgcagagaagatccaggcagaactttttgcaaattttaccgaatttatggaagaaaaagtgcctgcgaccttcctgatatactatagttcgtcctcctccacgaccagattgccgttcaaaaagcccccggggtaagcaaaggtcttgttgatgccatcaaaagacacacggatctttcctgatttttccaaaagggctcctacctcgcccctgccgtatttgctatggagcacgatgtcgcccggatgcacggtagggatgatgccctgcttggaataggactctctgctggacgcaaaacgcgccagtgccttttgtccatctgcctgtagacttgttttctttggattgggtcttttggctatatgttctgcctccgcctcacttccacgcagatccggcagaaactgctctaacaaagtcgatttcgtctttgcatgaaagaggatcagattttcttttgcccgcgtgacccccacataaaagagccttctttcttcctcatacgccgcaatctcctctttgtcagcactgcggtaagatgtcaggactgtctccgggaagatcccatccgccacatccagaagatagacagtgtcatattccaagcccttgctggagtgtatcgtggataagaccagttttgcctctttatcatcttccttattgcgcaggatctctgccaatgcatccagccgttctaccaatgccaaaggtgatctttctccctgtgctagcatctgtaagatctccgtcttggtattttttaatctggaacgctcgacatagtccagatatcccatgggatttaggatacggaacagtgccttatctgcgggctcccgcatcatatttgccatatgggtgcgcatagctttgacttttcctgccgtccaatcgccctcgccataataagaaagtgccgcatcaaagacactgatctcctctctttttgcctgggcgcagatggcttccgcatccgcctttttgataaagaactgtaatttatagtaaatctgcaaaaagagttccgtattggtcgtatctgtggcaaagaggatgatatttctgatatcatttacaatgcggtgagagaaaaaagagatctcagcattcttgatgcggtaagggatctcctgcttttccaaaagatcgatcagaggcagtgcgctctcattatcgcgataaagtaccgccgtcgttttttgatcctccgcatccttttccatcaggttccgtgccactttgagcagatatccatactgcccttttctgcgggctatgtcgatcgtacggatcgtgcctgcctcctggtgccaaggacgcatatgtttttcgtgacgcagtgaattctgccggataaaggcatccgccgccgcgacaataccggcatccgaccggtaattggtctccatcaaaaggacacgcgcccccggatagcgatcttcaaaggaaagcagtgcctccggataggcggcacgaaatccatagatactctgatcttcatcccctaccataaagagatgatgctccctgcctgccagaagttctatgatggcatgctggatcttggaggtatcctgggcttcatccaccatgatataagaataacgatcccagaaggcatccaagagtgccggggcactgcgaaacatggtgtaggcataaaccaactggtcgtcaaaatccatgagactgcgtgcgcgcatttcccgccggtatgcctcatagatcttggcaagatcatagtcgcactctgcattcagacgggcaatttcttccttagacagcatgcggttcttgatataggtgatgcgggttgccagatctgacaagtcattctcacttggaaaatcgtgttcgatccgctgatagatccctgcaaggatccgcgccttttctccctcatcactcagcagttcaaatgcctgcttccctaccatacggctatacatggcaatcgcctttgcacaaatgccattgatggtacgaaattccacgcgcatggataaatcctcaccaaacatctttttacagcgtctttgcatgtcgctcttggcggcaacgttgtaggtaacgaccaatatttcttccggtgcgatccccttgcagtagaccatataaccgatgcgggtcacaaggactgtcgtcttgcccgatcccggaaccgccaggagcagggtcggttcttctatggcttgcaccgccgccagttgctggtcatttaacataatatgaaattctttgataaattcgtctagtgtaagcatatttttgaattatagcatacttctcactaaatgaaaaagcatgcatttgcacataaaaataccgcccggggagtttcattctgccccgggcgatatctaatgcactgtgtctgattatgcctctacaaagtcagccaaaatctttgcgtcctcctcagagcattcaatgctgcttctcaagagaatctcaggctttgcaaccattgccacacatacatactgagataatgtagattttaagttcaacttatccccctcacctgtatgaagaatgacttcaccggcacactcctttgtctttttgatcaactgcacaatatcagcaccatcttttaaatcatgcatcttttttcctcctctgcacttcgttttctatatcataacgcaggcaaataaaatacaagtacacattttctacatttcgtataataattcaccttttttctgataaatcttcgttttctgtctttgaaatcatgaaagaaagtgtcaatgattttttctcacgatcaggcatgccagataataagccatgcgctcctcacccaactccagatcagcctgcagcaattccttgatcttgctcatacggtaaacgatggtatttttgtgaatgaacatctcatccgcgaccgctttcacactaccattatttttcagataacaaaagagtgtctccacaagatctgcatgatgtcctgcatcatagtccaaaagaggctgtaatgtctgactccccatctgctgcatgagtagttcatccgttaccgaatacaggatccgctcgacgcccagtttgtcaaattgtaaaaaggtctgttttctttgcatggctgatcttagggcatattccgctctgtcgaaggaaatatgcacatttgccacatccaaaacggcagatccttccccacaataaatcgttttatccggcatacggtgtctcgtccgcatgagaaagccctgtatgatgtcttctttctgcgtttcgctaacttcgttcatgatgacggcaaaatagccgttgtagtaaaagaaatgcgcattatgtgatacattttccatataaatctgcaaacggtagccaattctcttgcgatccagcgtatccatgctgtccaagccctccgttgtaatgagcacgacttgaaatttcccgtctacatcaaaggatgccgataatctttcacgatattcttcgatgcgctgtggactctcgatggatttgataaaggcagacgaaatctgttcatctgtctccgtctgcaaaaagatccgcaccgtcagatccttgatcatctcggacatctcgatcacccagggaacctgtagcaaaggcagatcatgggcattgcagtaggcgcgcacacttgccggtatttcctttacataatatccggtatttaccacaagtcctgctgcatgatgcctgtccaagatctccacgagggaaagcagatcttgctccgtgcgaaagcccgcccccatggtaaccgccaattccttgcctttaaaattctccataatggtcgtatcttctaccatcaacagccaggagatcgaatttgcccagccattttgccctgccaccaattccattttatacttgtctctggcaatgatcagcatatcttccactgtaaatcccatttgtgttctcccaaagatcgtctcttttgtcctgcgttttcctacttcttgctatagtatagcatctttttgtgccatcgtcacaaaattcttgctttttttcaagatttcaacccatggtcttctctatttcttgtgctacaatatagatgtaaacagaaaagaggttcaacgaaaaagttgaaggaagatcgatggaggtgtttggtatgcttactgtaggttacattgatagtttgtcagaacttggatttcgtactcctactcctgagtgggtaaaaactgagcgctatgattattgcgatcagttgatagcaaaaaaggagaattttgtgcagatgctatcggcgttcttttctaaattatttcgctaatttcacatctttttaatattttttcctttaataaaaacgcctgacggataaaccgtcaggcgttttgcattgtcttcttataacatatgtgcacgtaattcttctgcagaaagtgggctcagatatgccggagcaatatcaaatacggtcttacatccgcttaccccttcttctgacaaacgatagatggctctggaaaatgccaggataacagaagatgtaaattccggattggaatccaatttcaaactatattcgattacatgcttgtgctctttttcaagccctgtcacacctgtgcggaagacaaatccaccgtgtgggatgcctgcatgatctcttgcaaattcctcctccgtgataaaatgtaccgtggtatcataatctgcaaaatagtttggcatcgtcttgatctcttcttcgatttttgcaagatctgccccttcttccggtacgacaaaacattctctggtatgtttctcgcgcgtggagagttccggattcttgcctgcacgaaccgcctctaaagcgctctctaccgggatcgtgtactgtttgccgttttttacacctgcaacacgacggatcgcatcagagtgtccctggctaacgcccttgccccagaaagtatagtcctgaccttccggtaagacgctggcaccatataagcgcatcaaagagaacatgcctggatcccagccacaagagatcaatgccacatgtccattttcttttgccactttatcaactgctgcaaaatgttccgggattcttgcatgtgtatcaaaactgtcgatcacgttaaaatactttgcatattccggtgtctgttttggcaggtctgttgcggaaccaccacagagcaccagtacatcgatctggtcttttaaatcttcgatctcgtctacagaatatacttttactccctccgttgcgggtgtgatggactttggatctcgtcttgtaatgatacaggtcaactccatgtcatcattctgacggatcgcactttctacaccacgtcccagattaccataacctaaaattcctactttcatgttgttacctccgtattctatttctatctatgctatctttgtcttaggcaagttctgcgatcacatcaaggatcacttcaatgccgacctgtgctgccttttctgcaaaagtagcatagtccatttctgcgccttttccatctgaaatactgcgcaaaatagcaaatggcacttgattgacataacatacttgtccgatacttccgccttccatctctcctgcaatggcaccaaactgctcgtgcagatggttcttggtgctttcctttgataagaaaagatcaccggttgctattgtgccgactttatgattgatgcccttggctgccacacatttttcaataacagaataaatcttttcgtctgccgacagatatacttcatttaaaccggataaaagtccaaccggatctccaagtgctgatgtgttcatatcatgctgcacaacccggcttgcaatggcaacatccataacacccagttcatcacacaaagttcctgctacaccaatgttgatcacacagtccacatgataagtcaggatcattgcctctgcacagatggctgcaaatacttttccaacgccgcagaccgccgcgatcacttcttttccaccgatcgtacccttagtaaaagtaacaccactgacaacttcctctgacacatcttccatatgtgcttttaaattgtcaacttcgatctgcattgctccgataataccaattttcatattgcctttactccatttctcttgttttcctattgtggataggtaaattccatatttgtctgctttttcagaacttccagataagtcctgcactcctccttggctgctgcaagttcaagattgcggtaatttccacattctacagccgatgcgccaaagaccggtccttcatggtcaaggatctcctgcaagacctttttggtgatctcaaagacctgcttatcatccgcattacggatcagcagataaaagccggtctgacatcccataggtccaaaatagaccacatcatccgcgatctcggaattacgaatatatgtagcaaacatatgttccacagaatgcatggtcagatctgacatataattgcccatatttggtcgtctggtccgcatatcgtatgtggtaatgtcgccatcgacgcgggaaatataaaatcccggcatcaaaatatcatgatttatggtaaaactcttgattctttccatttttccatcctttctactacattttatccgtgaatgattataacacgatttgtatagatatcctactttttttgtatattttttcacaaagacagttagcaataaaaaagcagggatagatctttaaagatccatccctgcttttcctattcttatcataaaccaaaatacgcgtctatcccgtctgcgattccctgcaccatgcgtgcctgataggctggatcttccatgttgacatcatctatcggatttgtcatgtagcccatctccaaaatcgtaaccggaactgtactccagttgatgcccgtcatggtatcactggtgctgacaccttgattgcgcatgccggttgctccacaataagaatccaagatgcacttgctcaaattccaactgctgtctgccagatatgcgatataagggttggcagaggacggtgccagtgccatcgccccactcacagatgcattatccaccccattggcatggatgcgaactgcaatctcaccacctacatttgttgcgtactgcgcacgctccatattgctgatattgacatcatgggatgtgcgtgtcatatagaccgtatagccccggttttccagttccgcctgcaactgctgggagataacaagggtcaactgatactcatagacacctgtggtcgtaccatgtgtaccgcctgtcacacgcgccttcatcgtggatgagcccggtccatttggctctgtggaagaatcacctctgccctggtgtcccggatcgatcacaaccacatgggaattggcggcaggttcttcggtcgtcatgtcagatgccatatcgtcctgtttttgctccttatcggtatccgtttggtctgatgttgtcttatcctcttctgttacagaatcatctgcctgttcggaggtatccttttccggcaatatccccttatactttttataggcaaagccagccagcagtatcgcacatacaatggcaagcaatataactaacgggatccatcgttttttctttatcatcattttcacatattctagttcttaaaactatgtaccggtgccggaatgcgtcctttgcggtttacaaaggcatcacatccatacggattgaccggcataatcggtgcatatcccaaaagtccaccaaactctacggtctcgcctacgcccttgccaataaccgggatcagacgaacagcggtcgtcttctggttgatcatcccgatcgccatctcatctgcgatgataccagagatcgtcgttgccttggtatcacccggaatggcgatcatatccagtcctacggagcagacacaggtcattgcttccaacttctctaatgtaagcgcacctgcggtaactgcatcgatcataccctgatcttcgctaaccggaataaaggcaccactcaaaccaccaacgtatgaagatgccatgataccacccttcttgacctgatcatttaaaagagcaagcgctgctgttgttcccggtgctcctgcatactccagaccgatctcctctaaaatccctgctacactgtcaccgatcgccggtgtcggagccagggacaggtcgataataccaaacggaatacccagacgcttggatgcctcctgtgcgaccaactgtcctacacgcgtcaccttaaaagctgtctttttgatggtctcacaaaggacttcaaaactctcgccacgcacagcttccaaggctgtctttacaacgcccggtccactgacaccgacattgatgatagcatctgcctcggtcacaccatggaaagcccctgccataaatggattgtcatccggtgcattacaaaataccaccagtttggcacaaccaagagaatcctgttccttggtatattgtgcggtttcttttaccatctgtcccatcagacggacagcatcc

SEQ ID NO: 12581 - DNA, 4498 bp, Unknown
  gut microbiota DNA sequence
cacgatatttcaaaataatcgcaaccgtctccgaaatcgtccaatttgttagtcgaacatcaggtaaacaaacttaccaagaggctatccattcatctccccttccaataaatctaccttctctctcagggacatctggttatgtttactttttgtttcctcaagaaaactttgaagtctcttccaagtctctgactgttgaattaagcaccaatcgtcatttaacactccgaaagacactgtcacttgagaagagtttacatatcgctcggtagaaaacacttcactatccaatcatctttcctcctttcttttggtcgtaacctttcaagttactctttggcaaaaaaaatagaaaccggatcttcaatgtgcagttcgttgatcataatttgaatttcatcactgccaaagacaccatttttcattttttcgtagaaagtttttggtgtgatccctattttgattgccacgtcagattgcgaaagaccattcttcgcaataatacctcttaattcatctgttttaatcacaatatcgctcctttccgtaacctttgaggttactctaactatatcacacttttgtaacttgtcaagatatttttggttgcttctaaaacttttttgtgctattattgagttacttcataagaaggaggtgttcaatatgacaatcggggaacgaataaaagatgtccgcactcgacttggaataagtcaagttgcctttgctgataaaataggtgtctcaaaacaaactttatataagtatgagaataatatcattaccaatataccatctgataaaatagaggctattgccaaaatcagtggacgctctccatcatatctaatgggatgggaagaagtagatgaccagcctcaaacaatagccgcacatttcgacggtaatgaatataccgaagaagaattagatgaaatcaaggcttttgctgagtttgtgaaatctaaaagaaagtagtcccattattgggatatacatattgatatactgcttgcaggaggtattgttatgaacgtatatgaagaattacaggacatcgcctgcaatgatggtatagaagtcgtagatgactatccttttaacagtgaccgcatagatggtctttactgtgataatgtgatcgctatcgcaagtcatttgaagaatagttccgagaaagcatgtgtacttgccgaggaactcggacatcattacaccgccgttggaaacatcatagatcaatccaatgacgaaaacagaaaacaagaaattcgtggcagagtgctcgcatacaatcagttggtcggactaaccggactgatcgacgcatacaagaaccactgccagaatgctcatgaggttgcagaataccttggagtgaccgacgagtttctgcttgatacattagaatactataaatccaaatatggttgctgcaaaaaggtacgaaatcatataatattctttgagccgaccattgctataatggaagttttataaccataagacaggtgtaactatgttttttgataaaatacttgatgctatgaatttagagcaaattgaagccaaccgtctcagcaaatttccggttgacgaacctgatgccgaaatcatagtagatccagcgatcgaaatagagccaaatgctgacgcaacaccagaggaagaacaattaccaatggttgaacctcaaccaatagttgcattagaacccgagattacaacagagccagaaattgtgccacccacaaaggtctcaccagattgcaacgttgaaactaaaccagttgttgcacccgagacagaatttacatcagagtcagaaactgaagatgtacaagaactcgatacaccttctaagcccgagaccacaacccaggatgatacagtgccaacggttaaattagatccggcagacgacactcctgctccctttatttcagatagagtttttattaggggtctcaacaagcgctttatcagcgtaacaagagaaatcattaacaccggaaaagtaattccaatcgctctaatgcgagaatttcatatagaccatgcaaatttacagcaaattctttcagaggctcaaacagcgcagttattagatgataataacaaagtccagtgttcaaaagatttctatgaacaatttatagaatattatgaaccttctctatataaatgtaagcactgcacctttgacaaagaattgctcatttgcataggtgaaataacattagaaaaaggtgccgacgatttatacgaagaatttgatgccgataccttacttgattatcttgaaattctggaacaaatgcatatcataaaatacgaccctatagataatcaatacacatctcttgtatcggtcgatgactttcgccagaaatgcttatacattccagatacatactgtagacaatcctcactagcaactgttgcagatcttgataaaatggaaggtcacaaatttgaacattattgtgctgacctactaagagataatggttttttagatgttgaggtaacccaggaatctggcgatcacggtgttgatatcctagccagaaaagatgatataacttacgctatacaatgtaaatgttactcttcaaatagcgttggtaatgatgctgttcaacaagcaaatgctggtaaatcaatatacgaaaaagatattgctgttgttctcacaaaccaatattttacacaacaagccaaggatgaagcaactcatcttggtgtaaaactctgggatagaaataaactccgacagtttattgaacattccaacgcaaagaaaaaataaaaagtccccggtgctaccaacaccgaggacaagcattgctccgaagatacaataccctacacaagtatattgtatcattcggggcagccattcgcaagcggaacagacgttccttgctggctgttatttttgtacccatttttaaggaggatgatactatgtgggctgaaagtaccaaaaacggaaaagttcgatttgtcgaacgttacatggagcctctaaccggtcaataccgcaaggtatcggttgtcatgaataaaaataccgccgccgtgagaaaacaggcaacagagatcttacagacccgcattgagggcgcaatagccgccactgctgcatatacgaagcaggataacctcacactgcaagagttggtcaatctataccgagaatatcagaaatcggcagtctctgcatctacctaccagcgcaatttctttgccacccaatccatcctaaaattgctcggaccatcaacattagtagaccaactctctgccggctatgtcaaaacacaatttatcaaaaaccacgatacaccaggcactatcaacgaacgaatcacacgctttaaggctctgatccgctggggctatgataacgattacatatccgatatcaattatctcaaaaagatcaagcctctgcccgataaagaggcacgcgaaaaactagatcataagtttttagaaaaatccgaactctccaccctgcttgatgccatgcgtgtcaagcactggcactacctaactgcgctcatggtcctttccggcttgcgcgtgggtgaggctctggctcttaccatgaatgacatagattttgccaacaaggtaatacatatcaccaaaacctatgatgccgtaaaccagaccgtcacaacacctaagaccccgacttccaaccgggatgtattcatgcagccagaattagaggatctgatgcatgaaatttgtaacgacaccaaccaaaggaagaaactctgtggctttcgcggaaatcttctcttctgcgataagaacggtcagtatttgcgatactatgcatttaacaaatatctgaaagaaacatcagcatctgctcttggcagattgatcacaacgcacgtactccggcacacacacgtttccttgctcgcagaggctggtgtgccgctggaaacaatcacaagacgtgtcgggcatgaggacagcgacataaccaaacgtgtctatcttcatgtcacaaatcgcatgatcgagcgtgataacgaaatcgtatcaaaaatatctttactataggagagttgaaacatggaagcaaaaactatcattatcaataaagttattatggaaatggaaagaatattgtcccaggatcaattagatattctctacaatgtcctcacgatcaccttatacgactgtgaaatctctgagtgcaaaaatgaaatagtcgaatatgatgattatgatcgctttttatgtgaacaatactatgccaccttaaaggtcgagggtaagtccgaaaagaccattgagcggtacatggatcaattacgcttgatgatggaatatatgcaaaagccgctcaaggatattgactcaaaggacattttatattatcttgccttgtatcagaaagaacgtggcattgccaacagtacactggatggtatgcgccgatgtatctggaagaatatct

SEQ ID NO: 12582 - DNA, 1113 bp, Unknown
  gut microbiota DNA sequence
ataactctgccccctttcctacaaattccccttggtaaataatatccgttgatatgctactgattgtactatcccctatcagaaattgcaagaaactttttcataaatgacacaatgcgtgtatcttcttataaatcccattccgcctgtctggtgtgcaaaagttcatgcgacttatgcgacagtggccgatctaagaatttatcataaatctgaacgatcgccggattttcatgtgaaaagcgcaactggcttcccttatccagcgcatacaacttctgtccacgctgacatgccaattccaagccatcatggatcggttgtccaccgcctccggcacatccgcccggacaggccatcacttctacgaaatcataagagacctcgcctctgctgacgcgctccatcagatttctggcatttcccagtccactgactacggctgcatgcaccggcgtaccggcaatatccacggtcacttcccgaatgccatcttctccacgtacaatagaaaaatcatctgcccccggattctttccggtcacaaaatagtatgcactacgaagtgctgcctccatgactccaccggtcgcaccaaagatcacacccgctccggtaccaataccaagcggttcgtcaaaagcatcttcttccaaggtatcgatattgacctgggctgcacgaagcatacggataaactctcgcgttgtaagcgaaacatcgacatcccgatctgctccactgtcattgacctgtggcactgcacattcatactttttggcagtacaaggcatgatggaaacacaggtgatcttgtccggtgtcacacccaagatatctgcataataagtctttgcaatggctccaaacatctgctgtggcgattttgctgtagataaattgtctacataatccgggaactgcgatttcataaagcgtacccagcccggacagcaggacgtaaacattggcatttttgcatctttttcatgtgaaagacgctccaacaactcatgtccttcttccataattgtcagatccgcagaaaaatccgtatcaaaaatataatcaaatccaatctgtcttgcggcagacaccattttccctactgtc

SEQ ID NO: 12583 - DNA, 10980 bp, Unknown
  gut microbiota DNA sequence
cttattggtcaatgcgtccaggatgtccgcaagatcactcgatccgcccggcatggtaatattgttgccagccttgacacagcctgcggcagatcctgtctcatacttgttatcacggtgttctgcaccattgcccattccaccggtcacaaaccagtctgtcatgacaatgccctcatgtccccattcattcctaagtacgtgggtctggatatccttgctgttgcaggtatgctcgccatttaccaggttataggatgacatgatagcctccggctttgcacttctgacgcagatctcaaatcccttgagatagatctcacgcagggcacgttcactgacaacagagttggacaagaagcggttggtctcctgattgttgcatgcaaaatgcttgatggtaaccccgcagcccggatgcttctgcacaccgcgcgtcacggcagcggaggtacgtccgctgacgatcggttcctcagaataatactcaaagtttcgtccgcaaagcggggaacgctggatattctgtgccggtgcaagccacagatgcacaccgaacatttccatttcctgtccgaccatatcgccacagatctccgcgacatcatcattccaagcctgtgccaaagccgtgccgatcgggattgcgatacagtactggtagttttccggtgctgcaagttccgcttccgatggctttggtgccatagacgccatcatctcgagttcttcctcgcccataaattccataaagttggcaaaagcattggcattgcccttgatctcgccatccacgatcttgtaggaagtagcaagacgcagtcctgccggaccatccgccatgtaaagtccgccaacgccaagatcttccagacggctggtagattcgcctgcggcacctgccacatgggatcctgctgcaccgatgactgattctgcccccgcgccttccggtacatccttataattgccaatggcaagataagccagttgcttatccgaaagtcctgcgacaaattcctccaaagtctttttaccggaaagcacttctgcaaaatcaaaagtctgtccctccgggatctccgctgccacttccgggtaagtataagtcgcggtctcaaacttggctgcggataatgcaatatgttttgcagcctctttctgttcttcctcgccatctgggttgaaagcaactttttccggcacaagatcatcaaagccccagccttcacagatgtgcttggtcttttccaggactgccttgtcatctaaggtcaggatgcctgctaccatggtatctctggaatgacttcccagacggatgacatattcacctgcctccatgatataggcgctgtccttctcactaaaggaagcaagggtctgggttgcaaaagtgacagaaacttctgtgctctctccggctgccacttccttggtcttggcatagccgaccagtttctgataaggctggtcaaggtctccttccggcaggctggcatagacctgtaccacttctttgcctgcgcattttcctgtatttatcacctgggctgtgactgtgacttgcttttcatctgcgacaatatcctttgtctcaacagcaaatgtcgtgtaagaaagtccgtaaccaaatggataggtcacttcttttccgacagtatcaaaataacgatagcccacatagataccctcacgatagtaggtatcatccggatcgccaaagccctcggttgatggatattctgcgatcggcgcccatgtcatagccagtttaccggatgggtaagacttgccaaggacaaggtctgccaaaacatcgccggtcggtgttcccaactgtcctaagagcaggatattttctacggtatttaccggtgtcagatctaccatgccaccaacatttaataccaaaaggaacttgtcatactgcttctgtaatgccagaatatcgcggatctcggtctcggtcagattgatatcgcccgctaccatggtacggtcagcgccttcacccgaatttcttgccagtacatagatggcgatgtccgcgtcgctttccaatgaaaattcataggcagtttccggcatgacctttcccatgcaatacataacaccattgatgcctgcggctgccgcctctgccttcatggcggtgagccattcttttcttgtctttgtcatatgttcttcgtaagcatccagccaagccttgctcaccacctcaaagccagcattctccaatccctgctctacggtcgtataggctctgacattgacatccccggatccggttccgcccttgatcgtccttctggcgccactgccaaagagcgcgatcttgcctgctgcatccaaaggaaaatctccattgctctttaagagtatcgcacattccggtgcaacctcgcgcacctttgcgatatgctctttttcaaatttctgcatacttgcatctgtaatatgtaccatcttcttgtctccttttcttttattctcatacaaggttgcttgcagtttgaattttctacaccagatattttcggaagaatgcacattcatcctgattgatctcttttgcctcttccagattcatattgacatggcagacatgcgccatatattttttatcctctgatccatagcatttccatgcacaagggatgcccttgccttttaaaaattcatacataggctgggcgttttccttcaaaaagtcataataggatgtcatgacataagtcggcggataatcggcggtgatatgccccagcacatctattttttcattggaaaaatcaaaatctttgcccagataatcgccatataattccttgttcatcttgttgaccttgccatccttacccagaatggtcagggtgtacataccacaattcagaccaagggcacgtatcttgatttcctccggcaccgtaaaagggaataattttgcgtaatctgcattggtcgcgatggctgcgtactggcttgtcatctgggatccggcagaatcgcccaccaaaatgacattatttagatccagatgatactcatcagcatgatcgcacatccactccatcaccatattcgtttccgtcaactgggtcggaaatttggcttccggtgccagatggtaattgaaattgacaaaagtaaatccctgctgggctaaatacataccgtaatatttgtagatttctttggttccatagacatagccgcccccatggatgctgacgatgaccggcaaaagatgatcggtgtcctttggataatacacatccagtaagttataagcatccgcattcccggcgtaattgatgtcatagactgcggttacatcctccggtacgactaagtttgcgtcacgcttggcatctgcctttccggataccatgcgaaacatttttgctgtaaatgacataagactctcctatctctgcgctttttatatttcaaaaagtacagtctctgctatttgttacacgcattctaacagacactgcacttttgacttattaaatttttacgtttttttgtaaattattcgttttcttcttactgtgcctcatgcttttttgcaaggtcagccttgatctgtggaagttctttatccaacttgtatgcaataccaaggatcaaaagtacaaccatcagaaccataggtacatagttaaagagtacctggatagaggtcagagcggatgctgactgggttgcaagacttccatcatatccggcaagtcccataatcagtcctaccaggccagatgcgataccacttcccaacttagaagcaaaagagttgacagaagcaagcataccttctactctggttccggtcttccactcgccatagtccatggtatcgatcagataaatagagatcatcatggtaaccggtaaaatcgcaacaccaccaataacagaaccaagtgtcagagtaaccagattggttccaccaagaatacggatgccataaccaacaacgcctaaaacagcacctgcacgcaggatcggaacggttccgaactttctggaaagtaccgggaagatcagcatgatgaccggtgtcagcatactaccgatagaaaccagtgttgccagaccgatattacccatgatgtacttgaaataatatgtatttacggctgtaccgatattggttgccaactgtacgactaaggtcataccagccagaataaagatgtatttgttagagaatacacactttaaactctgcttgagcgggatcttctgtacctcctctttctgctggtcggatggctgattgtcatctaccacttccttgacaaagatgaaacggaacataccgataatagcacatggaatggcaaagatcagtgccatggtcgtccagccttccttggtagatcccatgcctgcgatcaactgtggcaaaagcatgctgattacgatagaaaacagcatgatgataccaccattaaaggacataacggatacacgattcttctcgcttcggatacttcttgccagatatacggcatcgccaccatttaagaaagtagcgcagacggaattgatcagtgtataaagtacaaatacaaagattgcttttccggtcgtactcatctccggtgcagagaaaagaagtacggtgagtccccatacaaagacgataaagatctcatacggtcttgccttgccccatttggtatgcgtcgcatcgatgataaaaccaacaaacaaatctgtcacaccgtcaaagatcttggatgccagaagcaaggttccgaccagtgttgcccccatgcccagcatgtcggtacaataataggtcagttgcatgatcaagataacattgagtgccagagacagtcctctggatgtccatgcccacttcagatagcccggcaggacttcattttcggctgttgtactcggattcagccaatttgcttttttcttcataagtaataccctccttgtaagatcatgtgctttcacatgaccatttcttgtatttatcataccaattccttgtgttttaccctgttaaaatttcgatatttctaacaatatttcattaaacattatagaaaatttaacaaaagcgtgctaggatatggataatacaagatgagaaagaaaggacttagcatgtatcagacacaaaaacttacttatttattcgactctttatatgcagtaaataatatctgcttctggcattttacaaaggattgggaactcctggataccaactgtccctggatcaacgaagtccgcaacttcttttttgactccaaggatgatgccttaaagacctatgcttccaactccaccatgcccatcctctacccggaccgcctctgcctgacctgggcgatccagccttatattgtagatgacaatttagactctttctacgtcttaggtccctttttaaactcctccgtatcggagatcaatttcaagcgcctgctggacgactggcatatgtccatatcctctcagcaccgcatgatggaagtgcagaaggagattccggtcattccctatagcctctttttgcagagcgtgcgcatgctctactacactctttatggaaaaacaccgggaaatctgaccaccacctcttttcccaccctcaatccactcagttccaaaaataccttggctccaaccaagaaaaatggcagcacagcacacgatattaccatcaccgaacacagtagttatgccatggaatgtgctatgctaaaacatgtcgagaccggcaacatccattatcaggacgaactgcaaaatacggaattatctgcagacaactaccttgtaggacttatgagcccgggcgatatcgtcagacaggaaaaggatgcgatcattgtctttgtggcactcattacccgcgccgccatccgtggcggtatggatccggacgaagcctactctctcagtgactactatatccagcagatcgaatcccctgactgcacagacctcaacaatatcatggatatccattttcttgcctatgatacctttatccaccgcgtgcatgagatccagttacagggaaaggaatactctccttttgtcaatgactgcatcgcactgatccaccgcaacatctatgaaaagatcactctgaaggatctggcagaagccctaggctattccacctattacctgtcctcccagtttaaaaaacagaccgggcagtccatcggcgattacatgacagatctgcgcatagaaaaagccaaggaaatgttgacctataacaacatttccctgactgatctgagtgccaaattacatttttccacgccgtcttatttttcttctgtctttaagaagcgcaccgggctgcccccatccgcatatgtgcagagcctttctaagcctgcttcttcatcgcaaccgtgatcttaaagagatcaccgtcaatatcgatggtcagttgtccgtccatgagtgcggtcaggctggatgcgatggaaagtcccaagccgtgaccttcggtatttctcgatgcatcacctctgacaaaacgttccatcaactcgtcactgctgatgttgagcggatacttggaaatattcttaaagatcatgcgcacctggtcacctgcatcttccacattgacatagactcttgtatgttcctgtgtatatttgcaaatattgctcatgatattatcaaatacccgccacagatgtctgccgtctgccatgatgttggcaggattctttgcttcatttaccacaatctcaatatcctgtgcttgcagtttatcctgatactctccgaccacctgcgagatcatcacagcggcatcacaggcttccatatgcatctctacattaccggtggatgccttggatgcttctaagagatcttcaataagttttttcaaacgagcagactggcgatccaagacctcgacatactctcttactttttcctcagaaatcccctcctttttgatcagatctacatagttgataatagaggtcagcggtgttttgatatcgtgcgacacattcgtgatgagttctgtcttgaagcgttcactcttcatctgttctgccactgcaatcgcaattccctcgcccacatggttgatatcttcgccgtgttctctcataggagcaatcatatgtgtggtatcgatcggctcattataattgccactggcgacacgctttccaccatcttttaatttctttgccatcaagaccagatagaagatcaaggctgtctcggctatcttatataaaaagaaaaggaaaacgcctgcgccataaataccggttgccagtaaggccatcagttccaccaaggctaaaatggcaagccccaggcctaaacgcgtgcttagttttgtattttcatgtattgcacgatgcagccgtctgataggattgatcagccattttctaaaaaaggctgcaatataatgccaaagtgtatgtttccagaattgacctgacttgatacgcgttgccgtactcatgcaaaatgccagtgcaagcaatgtccaaaggattgcaagcacaatggacaaagtaacgaactctgccaatgccagaaccccactataataggccatccacaatcctatattccctatcacgcctaagcatacacctgttgcaactacaatgccgtaaataccataaggtacgcgatccgcccatcgtaggtaaatcgcatcatcttccttgcgatgtccggacatggtcatcagaaaaacaaaggaaacgataaacaaaagcaacgataccagaaggatcggcagataaaccttctgcagcatagtcagtatggcagtaagtatatacggaatccacagataatcactcatgccattggcaaagaccagatcatcttcatatttttgcagacgattgatgacttcaaagaaattgcctgaatccaaagcactttttccataagaaaaagatcccataatggtgattgccgcatcgcggtaattctctttgactacatcctgctgttcatccgtcaattgcgctgtatcatttgcctccagaaatacatcttccagatttggaatcatataaatacggtagaaagtatacgttccttccggcggcagttctcctgcaagaaggtctcctgcattattcccttcattttcgacatcatccgacatattgtcttcatctgtcagattttcttctatattatctgcatcttcactgtctacgtcataatcataatactccaaccgatctccatttttgctttcatccagatagacttcatcatttccaacatatccatagacattggtctgcatggctcccaaccaggtatccgtgttataatggtattcatttttatcgaaaaatacattttcatacacgccattcatttcccgatggtttttatcctgcagccactggatcagataaggagatccatagacaaaattgttgttccgcacaacattgagtttgtcgccatctcctgttacctgaaaatcaatctgctctactgcgtaggtcagcaaagagccatccaaagcatcccaggagccgccctcttcggttgcactctccttcaaataggctgcatagttggaaaccatatgttcctgcatgagttctgcgatcgtatcattttgattcccatattcggcacgtaaaccgatactgaagatcatcatgatagcggcaagcagtgtagttattccggttatacaagcaatcaaaagcgcaaaagccttatacgccgtttgtcctttccaattttttttcatatcaaattcctcacatttcttcctgttttatttcatcgtggcagtttgtacggacgggctctatttgtcttcaaccttgtaccctcttccccacacaaccttaacataccttggttctgccggatcatactccagtttttcacgcagatgacgaatgtgaacagcaacggtattttctgtgccaaaggcatcttccttccagacctgttcataaatttgtgccggggaaaatacttttcccgggttttccatcaaaagatgcaggatatcatattctgtccttgtcagattgaccagttctccatctaacgtcacttctttagcccgatcatttaatacgatcggaccgatcgcgatgatgccatcatcaccggaagcgcttgcatggtttccccccagttgcatgtagcggcgcaactgtgatttgacccttgcctgcaattctaccggattgaaaggttttgtcacataatcatctgcaccgacattgagtcctaaaaccttatccgtatcctcactctttgctgtcaaaagtatgatcggaacattagatgtctcgcgaatctttgccatggtctggatcccatccagccgtggcatcatcacatccaggagcaccaaatgtatttcttttgtttccagcacttccagcgcttctaaaccgtcatatgccgtatagacctgatagccctcactttccagataaatccgcagtgcagaaacaatatctttttcatcatcacaaaccagtacgtttaccattttatcctccagagaattttgttgtgttttttaagatgatatctgatgccttgcaaaattatgcatccgacacacaaaaaccgccacaacatgtattgattaatcatatacatattgtagcggttcatcatttaatttccaagtagggaagtctttaagactttcttaagttatcccttattttcaacttcatatttcagaaattcgtaggaatactctgcctcccctcctgtaatagagtgaagtgttgtcccgataccatagagtgttgcatagggaatctctgcctcaatcctttgcctgccattctcctgctccggattcatgcccatgatcctggcacggcgcttgctaagttctcccataacatcgccaactttatcctccggcacacgcacctgaagcgatgcgatcggctccaaaagaacaggatcggctttcatgagggcatcctttaaagccatggtggctgctgtcttaaaggctgcctctgacgaatccaccgaatgagatgagccgtcgtaaagattgacatggatgccgaccaccggatatcctgcgagcggtcctgcctgcgttccctcggcaatacccttttccactgccgggaagaaattcttcggtacggctccgccgacaacagtctcttcaaattcatatgtgctggtcagatctcctgacggagatactttaattttgacatgtccgtactgtccatgtccaccggattgcttcttgtgcttgtattcgacatccgcactgccccggatagtctcacggtatgctactttcggtgcttctaattgcatctcgacgttatatttggctcttagtcggtctgcgaccgcctgcaaatgttgttcactgatgccatatacaagcgtctgacggttttcactgtcattttccacccgaagtgtccggtcttcttctgccagttttaaaagcgactgcgtcagtttgtcatcctccttggcatctgccgcaaaatagcgcattgcacaatatggcgtggaaattgcggtcgccggataaagaaccggcgttgccttggtcgaaagtgtcgtggaggtctgcaagcccgacaccttgctgagggcacccacatcgcccgcgtgcagttcctctacttcttctgccttgcttcccttcatgacatacaacttactgatgcggatctcctgtcctttgactgggtcgtataggttatcgtctgacttgataacaccggacatgaccttaaagagggaatactttccaataaaaggatccatgatagtcttaaatacataggctgtctttgccttagcaaaattataatttgcctcgaaaagttcctgggtcagaacattcataccggttgcactgcgctgatccggtgacggcagatatttgatgatgtctgccaatagtgtatacatacctctttccatggtatt

SEQ ID NO: 12584 - DNA, 1655 bp, Unknown
  gut microbiota DNA sequence
gcaacatgtatctgtatgtctgtcatatcataacctctcttcattagcaatcagaattatagcatataaaatatgggttgagaagaaaaaagtaatccacaaatccagtaaaatcaagggctggcgggaacttgacttttgtggataagtacaaaaaagagcgggcttaagggcataaataatccacaattctgtggggataacttacccacaaaaattgtggattatgtggataactcttattttaagaggtcttctccaatatttacaacgtttccggcacccatagttatcaacaaatcgccgttcatacatttttctcttaaaaagtcctcgatctccgcaaaagaagggaagtaataggcttctacctgtttttcttccagcaggcgcaggatatccttggaacttacgccgtaaatgtcctgctctcttgcagcatagatatcagccagtacgactacatctgcaagggaaagtgcatctgcaaaatcagataagaatgccttggtacgtgtataggtatgcggctggaatacgcagatgatacgctcgtgcggatagttctgcgctgcactcaaagatgcgcggatctctgtcggatgatgtgcatagtcgtcaatgacggtcgctccatggaatttgcccttgtactggaaacgacgatcagcaccaccgaaacgctgcagtccttctgcaatctgctcccaaggaagatccatatcctgacaaagcgcgatgcaggaaagggcattgccgacattgtgcagacccggaacggaaagggacacgcgaggaagatcctcgcccttgtgtaccggtgtaaaagtggcacaacccagttcattataagtaatgtcctttggataataatcacaggcatcggtaaagccaaaggtgatgacctggcaggaaagaccttctgtgatctcctgatagtccggaatctcaccgttgatgatcaaagcaccgtctgccttggtattgcctgcaaacttgtggaaagaggaacgcacatctgccagatctttgaagaaatccagatgttctgcttctatatttaaaataatgctgtatttcgggaagaaagagtggtaactgttggtgtactcgcatgcctctgtgataaagaggtcagagttgccaacatggatgttgctgccgatcgcctttaggataccgccgacagagatcgtaggatcttcctgtccgcacaggagtacctgactgatcatagaggtcgttgttgtcttgccatgggttccggcaaccgcgatcgagcgggcatagtgagccatgatctgtccgagcaactgcgcgcgtgtcagcataggcacgtctaattccttggcgcggataaactccggattgtccggatggatggcagccgtgtagacgatgatcctggtatcgtccgggatattggcagccgcctgcggataagcgatctgtgcgcccagttctgtcagatgctgagttagaggagactccttgctgtcagaaccggatacacgaaagccctcttttaaaaggatctctgcaagtccgctcatgctgataccgccgataccgataaagtgtactgaagttggttttgaaaaatctattgtatacataattttgaccgtccgttttctttgatttcttatttatat

SEQ ID NO: 12585 - DNA, 4816 bp, Unknown
  gut microbiota DNA sequence
atcgaacccacaactagcgcttaggaggcgcttgttatatccatttaactaagagaacaaatacaggtctgccaaaacagacctttttattaaattaaaactccacggttccctgcatccaaatgttgcccttaaatctacgaccaacctccgggagtcccaatagatcttttgcattgatgcaaacatcaaactccagatcattactttccagatgcatcacatacaactcttccatggtaacataatttgttaatttatggaactcttttatttgaccgatcacagcaaatttatcactttcaataccatatggcataaaggttgtctttacaatgctataaacatcttccttcgtgacacgctttgatatcatggaataggtatccatatcatcgatcgtcagactctcgatcgcattctcatccccttctctggctgccgccacgagtgaagtacgatctgtcgtctttttatctgtcttttttacggtaggctctgccaccggaagtaatatctttccctccagcgaaagtcccgtcagataagatctgcgaaaacgatttccatcataaccatggctggacttttgcagatactcgatcgcattctgtaagtaaaagatcagatttacgccaagccgcatctcatcacaaaatccctgataactttctttatccgattgcttgatgatctccagttccgcatctgtagaaaaattaccgcccttacaataaggaaagtaataatctactttgaaattgtcatccgtatcatatacaccacgaatggcaattcccgtatgttcgcacacttcaaaatcaagttctacaaattcatttccatcagaatccagggctacttcatggctatcaggcttgcgtatcgcttcatagatcaaatgatccagttcgtcttttgtaatattggaaaatccaatcgcctgtaaataactatgcataaattcctactttccttacttgttactctcaagcgcagcatcgagagcctgttgttcttcctctgcaagcgtaatgatggaattgccgtcaatgatctcttttacatatgtatagcagccctcacgactgtgaacagcattgaggacaaatccgtcattcttctcatttaacatggcaagtgaaaaggaaagttttcctcccatctcctgaaaagcatcatacttgatgagtccatacttctgaaaaccaaacttcattctcttgaacaaagcatcaatgtttctctcatttgccgcattattctcgatcagttcatctacctgctccaggcgatatacaagtgtatcttccagtgacttggcattcttaccactcataaagattgcatatcttttctttaacttgctcatctgcaccacattgatgatcatgaggatgatcaaaagcaagataactgctgccataccaatgacaacataatcggtactgattcctaaatattcttcaaacataataacaccaacttttctttctttgtattttacagaacatttgttctattcatgacggatagactgaaacagacctacgatacgatccaactcatcctgtgagtaatactcgatctctactctaccctttttgttatcctttggcacgatagttacctttgttcccagtgtctttttcatctgctcctgcaattctgcataaatagcctcaagtctcggatcgatcttcggctcttttaccttgtcactgtctttctcattttgcagacgctttacttctttttctacatcacgcacgctgagtttttcatcaaaaacgcgctgtgcaaaatcgtactgcttatccttatctgtaataccaagaatggctctggcatgaccggtggaaagcatttcgtcaatgaccatctgctgtacacgctcatccaacttcaaaagacgcatagagttggtaacggctgttctactctttgacacacgctccgctacttcatcctgtttcagattgaactcatccaaaagtttcttataagcaagggcttcctcaatcggatttaagtcctcacgctggatattctcgatcaaagaaatttcaacgatttcctgctctgaaagattcataacgataacaggtacttctttcagtcctgctttctttgccgcacgccatctacgctcgccggcaatgatctcataataagaatcttttccgttctttacttcatgcacccaaagtggtgataagacaccatgctgtttgatagagtctgctaattccatcagagcatcttcatcaaatgcttttcgtggctgctctgcatttggctcgatcttgtcaatgcttaccattgcttttgcattttctaccgcattctgatctgatacttcttttgcactttctattggtttacttggaattaaggaatccagtcctttacctaatcctttttttgctgccatgcctagacatcctttctctcaataatttcctttgccaaattacgataactctctgctccggaagactttggatcgtaaagattgatcggcagtccatgggaaggagcctctgccaaacgaacatttctaggaatgatcgtctgataaaccgtagcattcagattttctttgacagtatctacaacatctgatgaaagatttgttcttgcatcgtacatggtaaataccacaccatcaatcctaagatttgaattcaatctttcctgtaccaggtcgatcgtatggatcaactggctgattccttccaatgcataatactcacactggattggaacaagaatggaatctgctgttgtcatagcattgacggtaagcatgttcaatgatggcgggcaatcaataatgataaaatcataatcgtcacgaatgtaatctactgcattctttaaaatatattctttttcattgatgcccagcaattcgatctccgctcctgctaagtttacattagatggaatcaaagataaatgctcaatattttccacttttgtcatactctcgcgaatggaacattctcccagcatcaactcataaactgtattttctatttcttctttatcaataccaaatccactggtcgtatttccctgcggatccagatcgataaccaataccttcttacccaactctgccagacatgctgacaaatttatagatgtcgttgtcttaccaacgccacccttctgatttgcaattgcgatgattcttcccatctgatgaactccttttctttctattctcttatcgtatattcttatttacaacgataccaattatagcacttttataaaactttaaaaagcgatttttcctagtaaaatcaagcctttcactatataaaatactagatattgtctattcacattatccacattagaatgtttcacgtgaaacatttttacaagatatagtaaaatcatctggagtttatccaaatctcaacactaaatattgtggtcattatttgtggataagtatatatatataaaatgtttcacgtgaaacatctcgtccatagtacctatatctagtgtttcataaatatttttcttttctagatattgtcatatcctgatttgttttctataattaatagataaatacaggaggatatttaacaatattaccataaactataggataaggagtgtatatgactttaataaaaaagaaagaagatgaattttacagtccatggccaaggatagccgcagtctctcttgtcatcgcactgctcggaacaatcctttttaccatactctatctacatctacaaattgactggatagagtcgcttgccatcacattttttacaacaagttatcatatcgtgattagactgttgtctcctcttatactaagcctcctgtttcatcataagtataactaccagatatggtggtttcaaccaaagacatgggagaccaaactatacaaagaacttaaagtaaaacaatggaaaaggcaggtcatggtctttgatccaagccaattttctttaaaaatacatagcatacaagaggtcatcaataatatgtgtcatgcagaacttgtgcatgaacttatcatgctatttagcatcttgtccattctctttaccataccttttggtgccttaccggtattcttgatcacggcaatctgtgctaccctgtttgatagtatgtttgttatgatccagagatacaaccgaccaagacttgtccgcatctatgaaagacagaataaataaaaaatgagggtaaacatattagattgtttaccctcataatatatcaagacatatacttactgatatagtgatccagttccaattttgctcttctcggatcacttataatataagaagaaatcgtttttaattctttttcatgtgaaacatccttcaactgctcttggctgttcttggtgtcctttacctcttccaatgctttttcgcagtcggataatttttcatgcactctgtctatctcagaagaaagatttattttatcttgattcaatcctaccagtaattgttgcagttcctgtatacgggacttgtttttttgattaatatctcttggtgtgaaatcagaaaaataagaactatcctcctcatccaaaagatctaagaatttttcattttctttaattttgctaaggactaattcatagtcctcatccagttctatttttttagcgatcagttcttcctgctgcttctttagaaattcgtaaaccatatttcatcctttgatatttatatattttatcacgttaatacactaccgtattaaatatatttttaatacataattaggatatttaactccacctata

SEQ ID NO: 12586 - DNA, 8824 bp, Unknown
  gut microbiota DNA sequence
tatgttaaactgaaaggagttttaccgattatgaagatcacctgtcaaaaagcagaactagcaaaaggagtaaacatcgtttcaaaagcagttcctaccagaactaccatggctatcttagaatgtatcttgatcgatgcttctacaaatgagatcaaattaacagccaatgatatggaaattggtattgaaacgatcattgaaggcacgattgaagaaagaggtatcattgcattggatgccagattcttttctgatattgttcgtaaacttcctgataatgaagttaccattgaaacagatgctacctttaagacaactattacctgtgaaaaggcaaactttactatcgtaggaaaatccggtgaagattttgcttatattccgatcattcctcgtaatgagccgatcttactttcacagtttacattaaaggaagtaatccgccagaccattttttctattgcagataatgaaaataacaaattgatgacaggtgaattatttgaaattgaaggaaatcatctgaaagtggtttctctggatggtcatagaatttccattcgtaacatcgaattaaaggaatcttatgaaaataaaaaggtcgttgttccaggaaagagcctgatagaagtcagcaagatcattctgggatccaccgaagaaatggtaaatctctttattacagacaatcatattatttttgaattcgacaatacaacggttgtttcccgtctgattgaaggcgaatactttaaaatagatcagatgttgtctaccgattatgagacaaagtttaagatcaacaagagagaacttttagactgtatcgaccgtgcgactctgatggtaaaagaaggcgacaaaaagccgatcatcatggatattaccgatggaaacatggaattaaagatcaattctgttgccggatccatgaaggaagatatcgagatcggcaaagaaggtaaggatattttgattggattcaatccaaagttctttatcgatgcccttcgtgttattgatgaagaagaagtatctatttatatggttaatccaaaggcaccatgttttatcaaggatgatgaggacaagtacatttacctcattcttccggtaaactttaatacagcgacaaactaagaggaagataaaatggaagaaatcagtttaagagagggcgatgactatatcaaacttggacaattactcaaaaaagccaatatgatgtcctccggtgtggatgccaagatggtcattttagatggactggtaagtgtcaatggcgaggtggaacttcgtcgtggcaaaaaaatctacccgggtgatgtggttacttttgagggagagagcgttaaagtagtcagatgatcataaagtccatagaattaagtaattttcgtaattatgaacatttagatattacatttgatgagggcaccaacattttgtatggtgataatgcccagggaaagacaaatatcttggaagctgcctatgtcagtggaacgacaaagtcacacaagggcagccgggataaagagatgatcctttttgaccagacagagtctcatatcaagacgctggtggaaaagaacgaaaaggaataccagatcgatatccacctcaagaaaaataaggcaaagggcattgccatcaacaaggttcccatcaagaaagcaagcgaactttttggtattttaaatattattttcttttcgccggaagatctgaacatcattaagaacggaccggcagagagaagaagatttattgatgcagaactttgtcagttggataagatttatttatcggatctgacaaactacaataagatattaaatcagcggaataaacttctcaaagatctttattttaacccgagtcttaaggaaacacttccggtatgggatatgcagcttgtcaactacggcaaaaagatcattgccagaagaaatcagtttatcatggaattaaatgaagtcgttcatgatatccatcacaagatttccggtggcagggaagaaatggttatcaaatacgaaccaaatattgaggatattttctttgaagatgaattgatacgcgtcaaggaaaaagatttaaaatatgcacagacttcagtcggaccgcacagggatgacctaaaaatctctgtgggagatattgatgtgcgtaagtttggttcgcaggggcagcagagatcttgtgctctgtcgctgaaattatcagaaatcaaattagtagagcagaccattcatgataaacctgttcttttgcttgatgatgtactttcagaattggatcataatagacaaaattatctcttacaggcgatcgacgatacacagactatcattacctgtacgggtctggatgattttgtgaaaaatagatttaccttgaataaggtatacgaagtagagaatggatgcgttcatttacatagcaatatgatggaggataaaaatgagtcagaataatcaggaatatggagcagatcagattcagatattggaaggattagaggctgttcgtaagcgtccgggtatgtacatcggtagcacatctgagcgtggattgcatcatttggtatatgagatcgttgacaatgccgtagatgaggctttggcaggattttgtagccatattattgtaagtatcaacgaagatggcacggttacggtagaagatgatggtcgtggtattccggtcggcatcaactcaaaagcaggaattcctgcggttgaagttgtatttacagttttacatgccggcggtaagtttggcggtggcggatataaggtatccggtggtctgcatggtgtaggtgcatctgttgtaaatgcgctttctaattggctggaagtagaaatctgccgtgacggtaaggtttataagcagcgctatgagcgtggaaagaccatgtatcctttgaaagagatcggtacttgtgatccggataagacaggaaccaaggttactttttcaccggatggatctatttttgagacaacgacctttgattttaataccttaaaggtgcgtcttcgtgagaccgcatttttgacaaaaaatctccgcattactttgcaggataagagggaagatccgatcaatgaacgcgttttccactatgaaggaggtatcaaggaatttgttacctacctgaataaaggaaatcaggaactttatcctgaggttatctattgtgaaggcgaaaaagatggcgtttatgtagaagttgccatgcagcacaatgattcctacaatgattcgtcttattcttttgttaataatatcatcacaccggaaggtggtacgcatctggcaggattccgtagtgcgcttacaaagacctttaatgcttatgccagagaagcaaagattttgaaggaaaatgagagtgcctttagcggagaggatatccgtgaaggattaactgcgattatcagtatcaagatcgaagagccgcagtttgaaggacagacaaagcaaaaacttggaaatagtgaggcaagaggagcggttgacagtattgtaagtgagcagttgacttactttttggagcagaatccgcaggttgccaaatctatctgtgaaaaaacgctgcttgcgcagcgagcaagggaagcagccagaaaggcaagagatctgaccagaagaaaaactgctttagagggaacttcacttccgggtaaactggcagactgttccgataaggatccaaaaaattgtgagatttttatcgtcgagggagattccgccggtggatctgcaaaaacagcgagaagtcgtgcaacacaggctatcttgcctttgcgtggtaagattttaaatgtagaaaaagctagagaagataagatttacgcaaatgccgagatcaaggcgatgatcacagcctttggtaccggtatccacgaagattttgatattacaaaacttcgttaccacaagatcatcattatgacagatgccgatgtcgatggtgcgcatattgcaacacttatgctcaccttcctctatcgttttatgccggaactcatcaagcagggctatgtatatctggcaacaccgccactttacaagatcgaaaagaaccgcaaggtctggtatgcctatagtgatgaagaactcaataacattttgacagagatcggtcgtgacggaaataataagatccagcgatataagggacttggagagatggatgcagagcagctttgggagacaaccatggatccggagcgccgtatcttaaagcgtgttatggttcatgatgaaaatgcttctgaaattgacgttacattttcaactttgatgggtgataaggtagaacctcgtcgtgaattcattgaagaaaatgcaaaatatgttcagaatcttgatatttagtaggaggacgtttacaaatggatgacaagatttttgatcagattcatgaggtggatctgaaaaagacgatggaaacatcatatattgattatgccatgagtgtaatcgcgtcccgcgcccttcctgacgttcgagacggactcaaaccggtacagcgtagagttttatattctatgatcgaattgaataatggaccggacaagccacacagaaagtgtgcacgtattgtcggtgataccatgggtaagtaccatccgcacggtgattcttctatttatggagcacttgtcaacatggcacaggaatggtcgaccagatatccacttgtcgacggacatggtaactttggttctgtggatggagatggcgctgctgccatgcgttacacagaggcaagactttcaaagatttccatggctatgctttccgatatcaacaaagataccgtagacttcatgccaaactttgacgagacggaaaaagaaccaaccgttcttccttcccgttatccaaacctgctggtaaatggaacaacaggtattgctgttggtatggcgacaaatattccgccacacaatctatgtgaagttatcgcagccgtggtaaagattattgataatcaggtagaggaagatcgtgagacagatattgaggaattacttgagatcgtcaagggtcctgattttccgaccggtggtacgatcttaggtcatgccggtattgatgaggcatatcgtacaggacgcggtaagatccgtgtgcgtgcggtatctgagatcgagccgatgaacaacggcaagaaccgtatcgttgtaaccgaacttccatatatggtaaataaggcacgtctgatcgaaaagatcgcagaacttgtccgcgataaaaagatcgacggtattaccgatcttcgtgatgaatcatcacgagaaggtatgcgtatctgtattgagttgcgtcgtgatgtcaatccgaatgtcgtgctcaacttactttacaagcatacacagttgcaggatacttttggtgtaattatgcttgccttggtcggcaaccagccaaaggtactcaacctctatgaacttttaaattattacttgctgcatcagaaagatgtcgtaaccagaagaaccagatacgacctgaacaaggcagaagaaagagcacatatcgtacagggattattgatcgctctggataatattgatgaagtgatcaagatcatccgtggttctgctgatgtggctacggcaaagcagcagttgatggagcgttttgctttatcagaagcacaggcaaatgccattgttgagatgcgtctgcgcgcattgaccggtttggaaagaaacaaactggaagaagaatataagtctttgatggaactcattacggagttaaaggcaattcttgcagatgaaaagaagttgcttggtgttatcaaggaagaaatccttgctatctctgataagtatggggatgatcgtagaacctctatcggatttgatgaatatgatatttccatggaagatatgattccggttacaaatactgttatcacatttacaaaacttggctatatcaagcgtatgaatgtggataactttaagagccagcatcgtggcggtaagggaatcaagggcatggagacgatcgatgaagattacattgtcgaaatgatgatgacgacatcgcatcattatctcatgttttttaccaataccggtagagtttatcgtctgaaagcctatgagattccggaatgttccagaaccgcaagaggtactgctattgtcaaccttttgcagttgcagccggacgaaaagatcacatccatgataccgatcaaggaatactcagacagccagtatctttttatggctaccaagaatggtattgtgaaaaagacgaagatcacagattatgaaaatatccgtaagacgggtcttgcagccatcaatctgcgtgaagatgaccgcctgattgaagtaaaactgacagataatagtgaggacatcattctgatcaccaagtttggtcaatgtatccgtttccatgagacagatgtaagaaataccggacgtacttccatgggtgttattggtatgagtctgacagaccaggatgaagtgatcgcaatgcagcttgcttctcagggagattctctgatgatcgtttctgcaaagggtcttggaaagtgcacactggtagaagaatttacaccgcagaaccgtggcggtaagggtgtcaagtgttacaagattacagaaaagacaggaaatgtcgttggatgtaaggctgtcaatgaagatgatgagatgatgcttatcaataccgaaggtattattatccgtatcaaggtcaatgatacagcacttctcggaagaattacttccggtgtgaaattaatcaatgtcggtgagggcgttacggttgcaagtattgcaaaagtacgcaaggaagacatgattatggatgaaagtgaagaaaatcaggaagattctgcagaagaataagattctacagaagaataagaggtaaaataaaactccgccagagttgattgcagttaattgcaaaactggcggagttttatcaatctgtaagttcgctataaatttctacggtttctttatcatcaaatccatttacataataatttttttcatcagccgaaaaatttatataatacttgtgttgcggatttaagaatagttcatagtttccctgatttctcacatggaattttccctttaagagattatccatagcggttccattgctttttaccatagatggcagttcatctaccaaagatacattggaaatggtatctgtatcaatagcatagttttcaaaaatgtgttcacagtaaagagtgtcatcttttatgacaaggtggattggtgtaaattcttccatgatcataaaaatactgataaaaggaatactgagcattgcaataatagaaaagattgtaagcccttttccaagacctgttgccatatttacggaagttccaatgccggctcgcgtctctactatgctgcttttgtccttaggattgtagtaaaacagtccaaagatccatgcctcgtcttcgttggtcttaaatgccggatcaaaagaacttgcataacgtttttcaatatttttgaatttttttcctaatgggatgatcaagatcaagaggacaagggcataagcaatggatccaacaagaaaaatacctagatggatagtatcggatataagaggcaaaaaggtaatcaaagtataggcaaggtttagccagacacaggctaaccagaaatttttccacacgtttttcttggatctggtgtaattgatgttgatgtcactgtcattgcagatgacttccaccggtctacgatccatccagagagcaataatccagtacaataaactgatagccgcaatgctaagaaccataatcgtgctgtcaaaatctgttttttcagagagagccgcaaatacaagggaaagggcaaaaacgaaaaaactgaggaaagtcggaaggaagaatggcaaaaatcgtacctttctgacatttccggcatttttcatctctacataagatactaaaatctgattttcgtataattgattttcctttttccatttctttaactttttattggctatggcatatggcacataaaataatagaattaagagcatgagccaattaatccagattgtaaactgtatggaaaaatgacttgtcagtaaactggtgagaggaatcgcaaaaaagatgagaagcaagatgttcatctgcttcttaaagtcgcttatgatcttctggactgcaggttgttctatccattcttccttcatggagacggaaaacagcaaatgatcatgaaatttatggttgttttttaaaacgaaataaatgataagcagtaccggatatgtactaataaaaagaatgatattaaacatagatctgcctcctaaaaatacttttcacataattggaaaaattcttcctttgaaaatccgcggatgtttgcctcggatatgatctgctgcaaattgtccaaagaagcctgtgagagatatttaccttgatcaaattcatttcggatcctcgcaccgtttctgcggtcggtaacgatatagccttcttgttttaaaagagcataggctttgtttaccgtcatggaattgatcccgatttcttctgcaagggcgcgcacggtaggtaattgctccccgggctgtaatctcccatcagaaatacctaagacaatctgattgcggatctgtttgtaaataggaatttcagaaacctcgtcaatacagatgaccatgatagactcctttcttcttaatttgtattatttagtgtaatacaaataatacaaaagtcaagagaaaaattaaccattgctgatgatggcgcgtg

SEQ ID NO: 12587 - DNA, 7758 bp, Unknown
  gut microbiota DNA sequence
gccagtcccaatgatgattcattgacaatttatgacttgattccgggagaaacatatgtgttgacttttcgagatggtgcgtggtagatgaagaaaaaggataaaaagtagccaacctgtttgttggcaaaatgatacggtggagaataaataaaaaacgcgttgggctgatagaaatctatcaacccagcgcgtttttttcgtttccttactttttattaaagttggctctctttcttaaagtaggatccagaatacgcttgcggatacgcaggctttccggtgttacttcaagcagttcatccgtatcgatgaagtccagcgcctgttccagactaaggacttttggtggaaccagtgtcagtgcttcatccgcagaagaagatcgggtattggtcagatgcttctttttgcagacattcaactcgatgtcttccgcacgggaagaagatccgatgaccataccggcatagactctttcgccaggtccgataaagagggttccacgatcctgggcagagaacagaccataagttacggattcgccggactcaaaggcgatcagagatccctgcttacggtaagcaatgtcgcccttgtatggtgcgtagccttcaaagatcgtattgatgataccatttcccttggtgtcggtcatgaactcgccacgataaccgatcagacctcttgcaggaatcaaaaattcgattcgtgtgtagccgccggtgatcggggtcatgttctgtaattcacccttgcgctggctgagtttttcgataacggcaccggtaaattcgtccggtacatcgacataagcgcgctccattggctctaatttcttgccgttctcatcggtgtgataaagtacctctgccttagatacggcaaattcaaaaccttcacggcgcatattttcgatcagaacggacaaatgcagttctccacgtccggaaaccttgtaagaatccggagaatcggtctcttctacacgcagggaaacgtccgtgtttaattccttgaacagacgatcgcggatatgacgggaggtaacgtatttaccttcctgtccggcgagcgggctgtcattgacgataaagttcatagagatcgtcggctcagagatcttctggaatgggatcggctttggatcgtcagggttgcagatggtatctccgatgtgaatgtccgcgataccggatacggcaacgatagaaccgatgcgggcttcctcgacgtcaaccttttccagaccgtcaaattcatataacttattgatgcggactttctttaacttgtccggctcatgatggttgacaacggcaacttcctggttgatacgcaaggaaccattgtcgacctttccgataccgatacgtcccacatattcattgtagtcgatcgtgctgatcagaacctgtgtaccaaggtcaggatcaccggttggtgccgggatataatctaaaatggtctcaaacaaaggaaccatgtcttttctttcgtcgtccagatttaagacagcaaagccttcctttgcggaagcataaacgaatggacagtccagttgttcgtcagaggcatctagatccatgaaaagttccaatacctcatcaataacttcgtccggtcttgcctccggtcggtcgatcttgttgatacatacgataaccggcagatccagatccagtgccttcatgagcacgaacttggtctgtggcatagcaccttcaaaggcatcaacgactaggacaacgccgtctaccattttaaggacacgttctacctcgccaccgaaatctgcatgtcccggtgtgtcaatgatgttgatcttggtatccttataataaacggctgtgtttttggataaaatggtgataccacgctcacgctcgatatcgttagaatccatcacgcgttccgcaacttcctggttggcacggaacacaccgctttgctttaataattcatctacaagtgtcgtcttaccatgatcgacgtgagcgataatggcaatgttacgaatgtcatctcttgattgcttcatgtcatccttctttctataaggtctttccttaatataatacaaatttacacatactgtactagtttaccacaaatttagggatttacaagtttatcgacaaaatgcctgtcactttttaccttgcacatggtaaaccataatggagaaaagattgaaagatccaaaagaagggagaggctaatcaaatggcagataaagtgttagaaaacaatcaggtatcaatcgtgggagaaattgtttcggatttttcttacagtcatgaggtgtatggggaaggtttttttgtggtggaagtagccgtgaaccgtctgagcaattatgcagattacattccactcatggtatctgaaagattaattgacacgacacagtcttatattggtgaaaagatccatgtgacgggacaatttcgctcgtataatcgccatgaagaaacaaagaacagattgatcttatctgtctttgtcagggaacttgaatttgtagatgaatatatggaaaacgaggatgaggaaagaaagagcaattacatcacactggatggctatgtgtgcaaagccccggtttatcgtaaaacgccgctgggacgggagatcgcagatcttctggtggcagttaaccgctcttatggaaaatcagattacattccatgcatctgttggggcagaaatgcccgttatgccacgacatttgagatcggtagtcatgtcagcgtgatcggtcgtatccaaagccgggaatatgtaaagaaattatcggaggacgaggcagaacgcagaattgcatatgaggtatctgtatgcaagattgaagaattggactaaaaattcacataattgccatattttacaatctgtggtaaactgagtgcacttggtgatgtatttttaaatttcaaccgtcgtaggaggaattatggataagggtattattcagatttattacggagagggacaaggaaagacatctgcagcacttggcaatgccatccgcaaggcaagtaacggacagagtgcctatgtggtgcagttcatgaaaggacaactggatacggaatatctgacaaggctggagccggaggtcaaggtctttcgctttgaacgttgcagcgagggatttgatgcgctggatgaggcagaaaagcaggagcagaagcagaacatccaaaatggcttgaattttgcaaaaaaagcccttgtgaccggacagtgcgatatgctggttctggatgaggtcttaggactggtaaaggaaggcatggcaacggaagatcagatcttagaggtcttgcaggcaaagtccttatacacagatgtgatactgacaggcagggattcattaccgcgtgtatttgatatggcagacaacattttaaatatcgtaccggagaaagtctgaaccatcgatatttattgacaaggtaatagcgtaatgctatagtttaaaagtattatataaaaaggtagaggttgcgtaattcattagtaattcacaggatgtggcaggcacagtggagtgtgaaggaaagggaggcacgccgaaaggatacgtcttctgcggatgttttcttgggcgcaagtttaataggcttgtgactgtcatctcgtaagagatggggagctatcatggatgcgtatgtattgaccagctccttagagctggtcttttatgtgcaagaccttatgacaagatagagataaaacatatatgcattgtttcacgaggcaaacaggtcgcatatactgtataaaggaggagaagaatatggctatttttacaggctcaggagttgcaatcgttacaccgatgaaggataatttagaggtaaactacgataaactggaagaactcattgactttcatgtaaaaggtggcacggactgtatcgtcatcgccggaacgacaggcgagggcgcgaccttatccatggaagaacacagaaacgtgatccgcgcggcagtggagtttaccagacatcgtattccggtggtggcagggaccggttctaattgcacaaagacagcgatccagcttacccaggaagcagaggaagacggtgcagacggtgcactgatcgtgacaccgtattacaataaagcaacacagacaggcttgatcaagcattacagccagatcgcatcagagacaaaactgccgatcattctttacaatgtaccgggacgtaccggatgcaatatccagccggagaccgtggcaacgctggttcgcgagaatgaaaatatcgtaggcttaaaggaagcaaccggcaatatggcacaggcatccaagactatgtacctgtgtgacggcaagttggacctttattccggcgaggacggacttgttgtaccgttgatggcgatcggcggtatcggtgtgatctccgttattgccaacattgcaccacagcagacacatgatatgtgcgcaagttatatggctggcgaccgtgaaaaggctttagaattacagatgaagtctttgccgctcgttgatgcactctttagcgaggtcaacccgatccctgtaaaacgtgctctgaacctgcttggcatggaagttggttctctgcgtgcgccactttgcgaaatgtcagatgctaatgcggctgtcttaaagcaggcaatggtagaatacggactgctgtaatcgggcagactagataacggaagaggagattttaagcatggtaaaagcgattatgcatggctgtaatggtcatatgggtcaggtcattacagccatttgcaaagaagatgaaaatattgagatcgtagcaggcattgacttaaatgacagcctgccaaacgactatccggtctataagagcctggcagagtgtgatgtcaaagcagatgttgtcattgatttctgcaatgccaaggcagttgatgcactcttagattattgtgagacgacagggacaccggtggtactttgcacgaccggactttcggacgagcaacttgcccgtgtagaggaagtatcgaaaaacgtagcagtcttaaagtctgctaatatgtcactgggtatcaataccttgatggatcttttgaaaaaggcaaccgatgtgtttgcggaggctggatttgatatcgagatcgtagaaaagcaccacaaccagaaactggacgcaccgagcggtacggcgctggcacttgcagatgctatcaacgaggagttggacaactcctatgtttacaagtttgaccgttctcaggagcgcaagaagcgtgaaaagaaagagatcggtatttctgctgtgcgtggcggttccattgtgggcgagcatgaggtcatctttgccggtatggacgaggtcatcaccttcaagcatacggcatattccaagagcgtatttgccaaaggtgctgtagaggcagccaagttcttagcaggcaaattggcaggacattatgatatgaaggatgtcattgcagccaagtaggagcgggaagttatcttccctacataataatataggtttttatttgaggtactctgtaggatgcagagtaccttttttatgagacaatgaaaatatgcatcttgacaaaaggaggtaattttcttaaaatacttcaaaaatgaacaattcaattttgaaaggaaatgcatatgaaaacaggacttgaattcagcagaaaagtggacactgcatatatggcactttgcaaacctttgtgcaagaagtggcatttgacgcagacagccctggatattcttatgtttctggcaaataacccggagtttacaactgcccgtgatattgttgagatccgaaaattgaaagcaaatctggtatcggtcaatgtagaccgactggtgagggaaggctatctggtgcgacaggaagtggcaggggatcgtcgcaagacgaaacttttatgcacatccaaagccgatgagatcatcacacagggaagaaaattgcagcaagattttgttgcacttttatttgcggggattgatgaagagacaatggatatccttttaggcagtatgacaaaaatggaagaaaatcttgattatatacttgaggaggaagcgtaaagatgaatttgttgcttacgatcttagttactttttttgcgggaatgggagcggggctcggaaccggatttgcggggatgagtgcagccgcggtcatcagccccatgctgatcacatttttggggctagacccctatatggcagtcggcattgctttatcgtctgatgtcttggcgagtgcaatttctgcctacacctacggaaaacacaagaatctggacataaaaaatggcttgatcatgatggcaagcgttctgctctttacggtcgtgggaagttacatttccagcttggtaccatcgaaaaccatgggaaatttctctgtctttatgacatttttactgggaataaaatttattgtccgaccggtcatgacgacaaaagaatctatggagagtgtttcaccgaaaaaacgtgtgatccagtcgatcatctgtggcgttttgatcggttttatctgtggatttgtcggcgcaggaggcggcatgatgatgcttctgatcctgacatctgtcttgggttatgaattaaagaccgccgtaggcaccagtgtgttcattatgacatttacggcactgaccggggcagtatcacattttgcgatcggtggcttgccggacgtgaccgtgtggatcctctgcattgtctttaccctgatctgggcgcggatcgctgccatttttgcaaataaggcaaagccaaagactttaaaccgggtaaccgggatcattctggttgtcctgggcattgccgttatgggattttcctttttgtcttaaatgaaaaccctacaaaaacttgcgtaagaccggagcgagtttatcggtgtgctcgacataagagccgtgtgtctcgccctcaaagatatgcagggtcgcctgtggcaggtgatctgcgatcgtctgggtctccttgggctttatcatatccttgctgccagcacagacgagagcaggaaggttgatggaacgcaatttgtccggcgcaatgtccggctctaacagcatcatttccaccagtggactgtttgtctttttgtaaagagatttgatctcgcgtctggcagagccggtcagacccttagggctcaggttggctccgcacagaacaatggcggaaagaagatcctggcgttttaaggctacgagcagtgtgatgatggcgccgtcactaaagccgcacaagaccggcttttcaatatgtaaggactcgataaagcagatgacgtctgctgccatatctttataatgatattcttttggggtggcactttcaccctgtccgcggctgtcgatggcataaaccgtatgatccatggacatttctgcgatcatgcgatcccagatcgcgtgtgtttctccattgccgtgcaaaaaaatgatggggctgccttctccctctttttcataagataatatctgtccgtttagttgaatatacatagtaaaaccccgcatctgaaaatttctatctaaattctagcatgatgggaaaaaagttacaactccgggatggaaactatggctattatttaacgttctttttactttacccacatggggcgaaatggtataatctttgtgtattattaaaaaataagggggttttttacaaatgaaactaaacgtaaaaaagacggtccaggtcggattcgcgtttttatc

SEQ ID NO: 12588 - DNA, 607 bp, Unknown
  gut microbiota DNA sequence
tatgagtttattaatcacatccgagttcatcaatgcaagaacataatataaatcatcttcattctttggaaatataccaactatagactggtcaaacacccgattttccatcaatgttgctcttattttactagatttaaccatcggaattgcgatccctgtcttaaagtaaaattgtgaattttgaaatcgtgcttttttatcatcattgtaaaactttactgttgattcatcccatctgatgtaccattcatcgccacaacgcttgtatctatatggtgatgaacccttaatgtatggtacatatccttcttctatatgaggcactccagatagcgacgttgtctcaacgattttgttcttatctacaatcggataattctttgatcccttgacgtcattgttctttgcacacacaaattttttattatttccggaatagaaaccagtaacaatatcggcaacatctcctagttttttttcagttgtcccaatttttagtgcgacatcatcctccgcaagaataaatctgcttttctctgctgtgaatacatccctttgtgtaagttcgaaaatggttaaattatctggaaacttttcttcaata

SEQ ID NO: 12589 - DNA, 1865 bp, Unknown
  gut microbiota DNA sequence
tgctctgcagatcttcctatatcccccatagatcttctccatctactctttatcaataaacttgtccatgaaatcgtcgattgggcaaggcttactgtaataatagccctgaatataatccggtcccatcgccgtaatacggtctaactcgtccttttcctcgataccctcgaccacttctttgatattgaggctatgaaccatctcaatgatctgctttagaagttggtgttcgtaatcactattcagtgccttgcaggtgaactcacggtcgatctttaagatatccggctgcatctgggataagttgatcaggttggaatagcccgtaccgaaatcatccagtgccatctgcacaccatattcttttaatcttctccagagttttgtcacaatagagttgcgcgccagatatccgctttctgtcaattccacaatgacgctctccggcttcaaatgatatttttctattgcgcttgtcagatcctcataaacagaactctttaaaatctgtacataagagaaattgatgctgaccttaaaatcaggccgtatcttctggcattccacacatgcccgcaatgcggtatcaatgatccatctgccaaccggcacgatcagaccgctttcctccaattgatcaataaaacggtatggtggaataagtgttccctcggcatcgcgatagcgaagcaaggcttctgccgcgaagatctcctcggatcccacacgcataatcggctgaaaatacaactcaaagccctgatattcctttgaaaccgcctttcgcagattgcgcgtcatctgccggttggcaacaaaggtatcataatcctctcgatcaaagaataccagctgattcttaccacgctccttggcgcggctgagggagaactgcgataacttggtaatttgttcgtagtccagcgtttctaaatctgcgtcagaaatcaccccacaagacaaggtatataaagcctcatattcgtgctccttgatatgttctgccacatgatatcggatattgctatacaaagccttggcatcttctttggtcttactgataagatcaaagaccacaaactcatccgatgtcatccgataaacggcctgccccggttccagacaatccgtgatacaggtagcaacatcaaaaagaacgtgatcgccataacctatgcccagcgtttcattgatatttttaaaatcatcaatccccaaacgtaaaatatagcatcgcggcattttatggaactgctttatctgctcctgaaaggtcacttcacccagaagtccgctgacattgtcagcctttttcttctcgccgatctcattgatgcagccgatcataagaaagactttgccatcctccgaacggatcgtacgcccctgacagttgatccagaccggttcctgattgacactcatccagcgataacgcagattgtgccaggacttacgcccactgcgcatttcgctcatatctgtaagtagcagattataatcatctgggtgaaccacacgtttgtgcacctcatctacattctggaaaacattagagggcaggtcaaaacgtgccactgccctctctgtaatataataaacgtcatgttccagatcccaaacatatagataatcattcatgcaggtagaaaacaattctgctgcgcgctcaaagaagaggaaaacttccttttccccttcattgtccgatgtatgctcgtgtgtgattgcttcttggggttctcccaatatctccaataattcctgagaaatcatcttatctttcatgtaatatcctcctgtgcttcatcctttgttatgcctcctgcgcagcacaaaggattttcagcctctgctgtcct

SEQ ID NO: 12590 - DNA, 8889 bp, Unknown
  gut microbiota DNA sequence
agctttaattttgcccactgttcctcctctgttaatttatttccgatatcacaggaagcaaagccgcattgcgggcttaaatacagtctgtccaaaggcacatatacgacctttttgtccggcttggctgcgaaataaagagttttccgccgcctctgtgatcatccccacctccgctaaggtgatgacatattttaattgttgcagtgtcatgctttcttctcctccatcacatctttatcgatcagtatctttttgagtttctgtgctgcagcgttcatcgggcgtttggcatcgtagaccagacagatcctgcgcgccgggatttcttcctccagccggatcccgatcacctcctgcgccataagggcaggttccgccatcttttgtggcagaaaagccagtcccagatcactttttaccagaggcagtacctggtcgctcgtcgccacctgggtttccggcaaaaattcctctccctgcgcccggaaccactcatggtaaaagcggtaggttgttgtctcctgccccagacagatcaaaggatagccctgcagatccttcaacttcttattttgtcccaaaagatctgaaaacatgggaccaccgatcagaatatcctgaaaatcctccagaggaacttctttaagcggcgcttctacctgtatgggcgtcgtcaccacggcaaaatcgctttctccactgcgcaccgcacggatcgcctgcggggtcgaatggttgctgatctttaggcgtacccccggatactccctgtgaaaaacccgcagatggtccagaagaaagatatttaaggcgatctcactggcgcctacggagatcgttccgtgttccaaacctacacaatccgacaattcttcctctgccagttgaaattgctgcatggcggcagacactctgacatagagtttttcgccctccggagtcagataaaccccacggttggtgcggacaaaaagggtgcaacgcaactcatgttccagacaattcatagcccgggtcacattgggctggctgttatttaaggcatgtgccgccttggtaaagttcttgtattttgctacatagtaaaagatcttataatactcaaaattgacattcataggccttcctctatcatatcaaatcatgatcattatcatatcaataatatcttttatttattgctaccataaaattataatcacattagaaagagaaaacaactaaaataggagatgatttttatgtcattggtattaccaagagaagaagaagtggaaaatatgttttccagaatcctgtcttctgaccagtattgtgaacgattgatggatgctttttacgatcatctgtgtgatgacaagcgcacaacggacccggatccccatcattttgcagaagtcctgctgggcgcttacaaaaacggtgatgtcagtgccttactgctggaactgtttaaccgcagcatgtttgaccttttaaaggaaacttaccttatcccgaagcgttttcatgggaagaatggagaaaatcctgtccttttgaccgatgtggacggaaacctgctcaatgacaaggcagaccttgtctccagacatgaatataagaaattccatgagatctatcaggcgcatcatgccgccccacgttccaaactctatctcgccgacgcctatgatctggttcgctactacacctccggtatggatatctgcgagaaagcggaaaacagggagcgcggcatcctcatcctctatgccctgccggataccaaaaaattaggtctgaccgaagcccaggcttatgatgtaatctggtcgactttccatgatattcaggaagaagcctattccgctattgtatattacggacaggaaaccggcatccgctccggcaaatcgtttgatgaactcggcgtcctgcttcccatccatcagtttgaaaataagatgctgcagcacctaagtgtgatcgacggactggtactttcctgccgtgaagaaatgataaagactgccggcagtgacagtctggagttctaggaaaagaggcagcatgatgaatacattacaagcccaacccggcatcaaaaaaaaccatatggatattttatggcatgactacagcgaccccaacgataccatgccgatcatctctgccacactgcctgccaaggcatctgtcatcgggcgtgtcggcatcatgatgttagcatgcggaaccggagcctggcgtgtccgcagttccatgaataccctatccgaactcatggacatcacctgcacagtggacattggactcatgtcgatcaactatacctgtattgacggaaacgacagtttcagccagtctctctgcctgaccaataccggggtcaacacttcgcagttgaaccgtctggaaaagtttgtttccaatttttccaaaaacgaacgacagcagacctgtgagcagattcattctgctctggatgatatcgaaaaaatacatggcttatactcaccactcacactagccgcctctgccgctctagcctgcggagccttcacttttctgctgggcggcggcattgtggaaatgctctgcgcctttgtcggcgcgggcatcggcaattacatccgctgtaaactgtccaagcaccactttaccttatttttgtgcatcattgcctccgtttccgccgcatgcttgtcctacacgcttttattaaaactcttagaggtcatctttgcggtacggctggagcacgaagccggctatatctgctccatgttatttatcattcccggctttcctttcattacaagcggtatcgatctcgccaaactggatatgcgatccggcaccgagcgtctggtctactcgctgatcatcattacggtcgctaccatgaccgcatggatcctggctatgtctttgggcttacagcctatggactttttgcctttgaacttagtcctctggcaatggatcctgctccgcctgctcgccagttgctgcggggtctttggcttttccattatgtttaacagtcccgtgcgactggcacttgccgccggtctgatcggtgccatttccaataccgtaaggctggaactaatcgacctgcttgccctgccacctgccgctgcagcctttatcggggcttttatcgccggcctcttagcctccaccttaaagggattggcaggctatccgcgtatctccctgaccgtgccatccattgtcatcatggttccggggctttacctttacaagggcttttataatcttggcattatgaacctgacggctgcggcttcctggctggcatccgcactccttgtcatcttagccctgcctcttgggctgatctttgcccgcatcctcaccgacaaaaccttccgctattgcacctagataccacagggacgtttcttttgccaaaggggacactccttatggcaaaaggaacgtccctgtggcgcataaaagacctacaacttggcaacactaaaagtagttgaagttggaggtcttttttatgagcacatacaaggttgagatctgcggtgtcaacactgccaaactgcccttactatccgatgaagaaaagaatgaactttgggataagataaaagcaggggacgcgcaggcacgcgagacctatatcaagggaaatctgcgcctagtgctcagtgtcttaaaacgtttttccggtcatggggaaaatctggacgacctctttcagattggctgcatcgggctcatcaaatccattgacaattttgacccgactatgaatgtcaagttttctacctatgctgttcccatgatcataggcgaactccgccgttatctgcgtgacacttccagcagtatccgcatttcccgttccctgcgcgataccgcttacaaagcaatcgttgccaaagaaaatctcctgcgcaccagcgtaacagaacctaccatggacgagatcgccgctgccgcaggcatcccggtggaagatatgatctatgccttagatgccatgcaaagccccctgtccctctatgatcctatctacaatgatggcggcgataccttatatgtcatggatcagatcagtgacaaaaaaaataaagaagagaactgggtcgaaagtctctccttaaatgatgcccttggaaccttaagtccaagagaatcccatatcataaaattgcgtttttttgaagggaaaacccaaatggaagttgcctctgagatccagatctcccaagcccaggtttcccgcctcgaaaaaaacgccttaaaatccatggagcactatcttaccggctccacttgtcgctcaaagcattgatctgatcggcaaattttgccagatccttattcgccatgccctcgcagtcccggatcacgcgcataagccgctctcctgcggcaagcagtctggcgaatacattggaagatgccttggaggatggcgtcttcttttgttttacctgtcggctgccctgctccaagcaggctccggtcagaagatcaaagcggtcgccggaataaggtgcatacgcctcatagccgtatttttcatggatggcatctgcaaaagaatcacagacagcatcctccccatgtacgacaaagaccttctttggcgccttttcaaagccgcccatccaatccagcaatttattcttatcggcatgaccactgatccccggcagattttcaatccgtgcctccacatggacagtctcaccaaagagtttgacctccttagccccatttaaaaggttaaagcctagagtccccggcacctgatatcccacaaaaagaatggtagattccggtcgccagaggttgtgcttgagatggtggcggatacggcctgcctcacacataccggatgccgaaataatgacctttggcttcatgtcaaagttgatcatcttggactcatcactggtcactgccatctttaaacccggaaaacggatcggattcttgccctcggcgatcaacctctttgcttcctgactaaaacattccgatacattatcatgaaagaccgcagttgcctccaccgccaagggactatccatatagacctcaaaatcctctaaatcagacagcatgccctcctctttgatcctgcggataaagtagagcatttcctgtgtcctgccgacggaaaatgccggtatgaccagattgcctcccgcctgaaacgtagatcgcatgatctgtgccaaagccttggcaaaatcgatcggcgcctcatgcaagcggtctccataggtggattcaattaacacatagtctgcctcttttaagtattccggctccttaatgagcggtcggtttccctgtccgatatccccggaaaaaaccatctttcgcttttcatttccttctgtcagccagacttcaatggacgatgatcccaaaagatgtccggcatctacaaagcggaccgtgatctcatcgcagaccttgatcgtctcatggtaatgcaccggcacaaattgctccaagacacctgcggcatcctcaaccgtatataaaggtgtgacctccggccttccggcacgttttgccttacggttcttccactctgcctcaaaagtctggatatgtgcgctgtcctttaacatgatgttgcagagttcacacgtcgcctctgtcgcatagatctgcccccggaaaccatgcgcatacaaaagtggcaaaagccccgaatggtcgatatgtgcatgggtcacaaagacataatcaatactgctcgcctgtaccgggatctcttggttttcatagatatccggcccctgctccatgccgcagtccaccaaaaacttcttatcgcccacttccacataatgacaggaacctgtcacctcatgggctgcccccagaaattcaatgatcataccttctcctccgtttcgtcagaaaatttcctgttccatatccatattatataacatttttccgaaaaatcacactactttcataccattttcctgccgtgccatctcccgatgcagccgcttcatgatctttttttccagacgggaaatataggattgggaaattcccaaaaggtctgccacctgcttttgcgtcagttcttccccatctttgctatgtagcccgaaacgcagttcaatgatcatcttctccctgccgtttaaggtctttaatgcctgatgtaatagtttgagatctgcctgcgtctccaaatcccggtagatcacatcctcgtccgtgcctaaaatatccgacaaaagaagttcatttccatcccagtccacattgaggggttcatcaatcgaaacctccagtttctgcttgttatttttacgcagatacataaggatctcattttcaatacagcgcgacgcataggtcgccagtttgatgctcttggaggcatcaaaggtattgattgccttcatcagaccgatcgtgccgatggagatcaggtcttcggttcccaccttggtattatcaaatttcttggcgatatagacgaccagacgcaggttatgggcgatcagtttttcctttgcctccttatcctgatgatcctgcatagcctcgatacatgcctgttcctctcttgcattcaaaggttccggaagcacctcacatccaccgatgtaaagcaattccagtttctctctcgtaagccatcgaaacaataaacgcatatgctcactcccaacaaaaatctttatgtaatatcatctggtaatttttcccctgaaacaaggatgccttgccaaatcccagcaggatctctttctggctgaccatttttcccgcctctttcatcaggaatttatctgctgccacgatctccataaaatcctgccctgccaccgtctcataggcgatcagacgcatccgctctgccgggatcttccatttctccttatagttttccgacaccacgcaaaccggtctgccactgatggggtcacgcaagagatttccggtatcggcgagtgcctgcattttttccacatgcccacacaccaggatcgccacttcccgctgctctctttttcttgcctgtaagatcgatgcaatgaccgtaagcaaaaaaaacaaagcacatgccagaggcaataagaagtcccggatctccgccggcagatacagatccaacagggacaccagcccgcccaatcctgcataaacgatcagcaggcgaaaataaaggactgccaatgccttaggggctgtcctttcaaatgccagtaacagcatgagtggattgacaagaaaaacgacaaaaatgacatagccccaaaaggaatgtaaaaacagatatgccagacagccaagccccgtagcaagcaggctcgctaagaccagccttggcaccgacatagatttttcctgccagatcgcaagggctagaagacttgccagatccagcataagattttgtagaacaagaacatccaaataaacgacataaataaaaagccacctccttttgataagatcaattataaggaagtggctttataaattctgtcgaaacgagcctgctagattattttcttgtgttctttaaaaattcaggaatcttgatgtcttcctgcttgactgtgctggtcggctgctgtggcttggtcagtggtgggaagttgcccataccgcctcctacagatgctccaccagcctgtgatgctgccgatggtctcggtgcctgtgtcgtaggctgtgtatgtacgcctgcgccaaatccgcttacggatggctttggtgtgccaagcccgctggcatactgcatattatttaagagagaactgcccatagatggctttggtgctgctgccggtgcgtcctctaagcctgtagcaatgactgtgatcgttgcttcatccggcttggactcatcatacttggcaccgaagatgatattgacagaatctcctgcaagatccttgacataagtagatgctgcattggcatccataagagaaatatctccggaaatattgataatgacatgtgttgcgccattgatggtcgtatccaaaagtggactctctactgccatacgaacagcctctgttgccttttcgtcacccttggctgtaccgataccgatatgagcaagacccttgtccttcataacagtctggacatctgcgaaatccagattgatcagagccggcagattgatcaggtctgtaataccctgtactgcctgctgtaatacttcatctgccttcttgagtgcttccggcatagtcgttctgcggtctacaatctctaataatttatcattcgggatcacgatcaaagtatcaacattttccttgagtctctcaataccggactctgcgttgaccatacgtgtctttgcttcaaacttgaatggcttggtcacaacaccaacggtaaggatgccctgctccttggcgatcttggcaacaaccggtgctgcacctgttccggttccgccacccataccacaggtaacgaataccatatctgcgcccttgacattggctgcgatctcctctgcggtctcctctgctgccttctgaccgatctccggctgtgcgcctgcaccaagacccttggtcagtttctcaccgatctggatcaatgtcggtgccttgcaaagggaaagtgcctgcttatctgtattgatcccgataaactcaacacctgcgatattctcatcaatcattctattcacagcgttatttcctgcgccacctactccgatcacgataatcttggcactggtatccgcttcattcgtcattatttcaagcaaggtcttaatcctccttcttcctatctcaaaatctatgagtaaacccataaatcctattctacaaacccatatagattataatatataaattttattcatttatcaacctatttttt

SEQ ID NO: 12591 - DNA, 10127 bp, Unknown
  gut microbiota DNA sequence
ctggtgtccagttttctaaatgtagtgtcccgctttgtccttccagatttggcaggatatgtggcagacgcatgatcttttcttccacgttagtatcatttcccacacagatcagaatacttccgtaaacgaccgtaatgcggtctctttcatcaaaagaaaggctgctgatcgcaatgtcgtacttctttaagatctttaaaagatttaacatgaaggataactggtctttttccagcccgaccttactgccgacctttgccttatccagggtgatcccggacacctgcatcacattttcaatgacgcgatccgacacctccaccacttttccgtcttcatcaaagtaagccatacggttgtccgaaagcaaaacgcatccgaaaagtttcttttccgtcacgtcgatctccaacttgtcatagcccttgatctttaccttgatcgcggacacaaaaggaatatcggtctttggcttgatgaggttcttgccccaggcatagaccgtattcttggaataggagtcgtccagtaccaactgcttgatctcctcctccgtatagacggtattgcctttgaccgtcaccgtatgcaccgtacaaaaagcatagattgccatagctgcgacaagcaggcagatgatcacacccaggactatattaaaaaagtaaaagcggaacttggaaaatttcttcttttttttctttgggatctcttggttgtttcttccttttcgtttcatcaatcacagtctccatcctctttctatcctaagtctccacatgcgcactctttgacacgctgagggctacgcccatctccgcgatcagaaacatgatggaggttcctccataactgacaaaaggaagcgtaacaccggtgtttggcatggaattggtcacaacggcaatgtttaagataacctgtaaggcgatatgcaccataatgccgatcaccagataggatccaaacatgtctttggcattggtcgcgatcaaaagcaggcgccacaataaaagaatatacataagtatcacacagatggctccgaaaagtcccagttcctcacagatgatggaaaaaatcatatcattctgcgcctccgggacaaagcccagtttctggatactctcgcccagccccttgccaaaaagtccgccggatccgatcgcatacaagccctgcagggtctgatagccggtgtcgtaattttccgggtgtagccagatctgcacacgctcctgccggtatgttccaaaaataaagacaaccgccagtaaagcaacgcccacaaaagcaaggataaacggtgccgtcttgggactggaaataaagaccatgataaaagcgatccccacaataatgatggcggtactcaggttgttataggcaaccaccacaaagataggcaagatcgttgccagcagttttatattgcccttgaaggtgcgcatagccatcggtcgtttactgattaccgttgccagatataagatcacggcaaccttggccagttcggacggctggaaggaaaatcctgcaatgttgagccagcgggaggatccatgactactggttcccacaaagtttaccgccaaacacagaaccgtcgccaaaagatacgccacacccgcaaatttggcaaaaaaatggtaatccagtttgacacagatataaagcagaacaaaaccaagtcctgctgacatcgcctgtcttttcagataataaatggaactgccgaacttcaaggttgcattataggcactggtactatacaacatgacaagaccaaaacctaagatacatatgatcatcagcagtaaggtatagtcgatatatttggttgttccggtgcgctttcttttctttttttgcgcagtcacggctctctccatgcattactcctttagatttcttacatatgctttaaagatatctccacgctgttcgtaattgtcaaacatgccccaacttgcacatgccggtgataaaagaacagcctcgcccggttctgctgtctcataggcaatgtctatggcttcctctaaagaatccgcaaagacataatcatgaaaatcatgtgcgtcggcgcagaccgcgatcttcttcgccgtctgtccgatcaggaccagttgcttgaccttgccatcaaaactatcgatccactcatcataaacggactccttgtcataaccaccaccgatcaggactgtcctgcggttcatggcacagatgcccttgatcgcggcatccgggttggttcccttggaatcgttgtaaaaggcaatgtcattctttttgcagacaaactcgatacggtgttctactgcatgaaagtctctcagtccctcccggatagtctccatcggcacgcccatgccatcgcaaagtgcaaccgctgccataacattttcataattgtgtgcacctaagatattgagttcttccaccgaaataatatgctcggtctttccatttcttgcccacaggatctcattttcctgtagatagagcccagcatccaaagtctcggtgctggaaaacaagacgactttttgctctaatgtctttccaaaggcacgcaggacttcatcattataattgagcacacacagatcatccctggtctggttctttacgatgctctccttggcggcaatataatttgccatggtatgatggcggttcagatgatccggcgtgatatttaagatcgcggccgctttcggtgcaaacgtatcaatggtctccaactggaaactgctgatctctgccacaacaaccgtatcgtctgtcgtctcctctgccacgctcgtataaggaataccgatatttccaacgactgccacgtgtgcaaaatgtcttgccatgatctgaccgaccaaggttgttgtcgtcgtcttaccattggttccggtaatggctaccacgtgccccttgccaaggacatatgccagttcgatctcgccccagatggtcatgctcaaagctttcatcttttctaccaaaggaatatccagcggcacgcccggactcaaaacggcaatatcaaaggactttaacatatcctccgatacatcccccaggatcagttccaccggtgtcagttccgggttcttgctgcggaatgctgccacatccaaagcctcattgccatcctgtatatataccttttttgcatgatgcagcaagagttttgctgctgccacgccactttttcctgttcctacgacaagtactgtcttatttgaaatatccacaatctgcctcctgacttttctcgtttaaagtgctgcatatccgatcaggcaaagcagtgccgtgatgatggaaaatacggctacaactctggtctctgaccagccggaaagttcaaaatgatgatggatcggtgccatcttaaagatacgttttccgtgtgtcagtttaaagaatgtcacctggatgatcacggataaaacctctaccagatagatcagacccacgatcaggataaagagtggcatctgtaacatataagccgttgctgccacaaaaccgcccagtgccaaagatccggtatctcccataaagacacttgccgggtagacattaaagagcaaaaatcctaagagtgctcccacgaccgcacaggtcaccggctcaatcccactgttcatccctacggctaccaccgtaaagaatactgcaaccaataccgttaccgaagatgccagaccatccagtccgtctgtaaagttgacaccgttgaccgtaccgatcacggcaaaatacatgagcggaatggcaagccagcccagatcaatgtaatgtccgccggaaaacggcaccagcatggtcaaagaaacatccgtgtaacgcaccagatatacggcaaagatcgttgtcaccacgatctgtaaaagcatcttctgccatgccaaaagtccatccgaacggcgcagaacaacctttaaataatcatccagaaatccgataacgccaaaacctaccgtaagaaatacgatcggtatgatcttgggataacgtgacacataaaaaagagatgtgatcacgatcgctgccaaaatgatcaggccgcccatggtcggcgttcctgtcttgatctgatgcgactccaactcctcacgctccgtctgtccaaccttgagtcttcgtaaaaaaggaataacaataggtcctagaatcgttgctatcccaaatgaaataagtaccggaaataaaattttttcaaccataacgactccttgtttattatgcattcttttgcaaatttcatttttttcaactaaatagtataagtgttttggcactattgcgcaactgcactatccgtatttttttcggtctcttccacgcccagataaggcaggatattttcaaacaactggctgcacaccggtgccgcgatcgtgccgccataataaatgccttggggctcatggataataacgatggctaagacctcgggatcctctgccggggcaaacccgataaaggaagcgatatactttccgctcccgcgaggaagcatctgcgatgtcgccgtcttgcctcctacggcaaagcctgcgacctgaccgttcttaccggtcccctccgctaccacctgatgcaaaagacctcgcaggatctcagaggtctcctttgatacgacactgcctttgtccttggtcttgtaagttctggtctccttgccatcgcgatcccggcaggtcagtgcgatatgcggggtaacgcgctctcccccattgatcagagaggacactgtagatgccatctgtatgggcgttaattgaaaagactgaccaaaggaaatggtcgccagttccaccggacctacattttttaactggtgcatgatggtcgctccttcgccgggcaggtcgatcccggtcgtcgaaagcatctggaactgttcaaaataatggaagaaacgcggcgctcccaggcgcagtcccaactggataaagaccggattgcaggaattcatgatggcatgggtaaaatcctcactcccatgtcccgttgtcttgtgacaacggatccgcgtatcctccaccgtgatacttccattacagtaaaaagattcctccggcgtgactaccccttcttccagtgccgcagccgttgtgataatcttgaaagtcgatcccggttcataggtatcactgatacagatattgcgccacatctcatttaaaagatcggtcttctccccagtctgccccgccatgtattccgttaaggtaaaaggttcctgcagggaaaactccggtacgttgaccatggtatagatctccccatttttcggattcatgacaataatctccacaccggatgcctgatggcgctgcatggtctgttctgccaactgggtggcgaaacgtgaaatattgtagtccagcgagacataaagatcatcccctgcctccggttccagccgaacctcccccagttcggcgacctccacgcctctggcatccgtataggtcaggatctttccatcctctccctgcaaagcctcatcataataagcctccagcccgatgatgccctgattgtcgccaccggtaaagcctaagaccttagataagatgcggtcatagggataatagcgcttgtagtcatcatccaccttgacccctgcaagatcataggcacggatggcatccccaatgtctttttccacattggtcttgatcttttcgatggaggacaccttttctactttctttcgtatttcttcctccgtcagccccagttccttagtcagacaggaaatgaccgcctccggatcctcgatctggttatgtatgacggaaattgtgcataccgtcttatttgacgcaagaattacgccatttctatcaataatgcgtcctcttgccgccttcaccttgcgctcccgctgctccacctctaccgccagttccgcgtaatggcttgcccgaaagatcatcagatagcctacgcgcagccctaaagccagcaaaatgacgataaaggtcccaccgatcagttttgcctttcggtgggagtacacacgcaatcgttccatgccaagcctccataaaacgctttatcacattttattctgctgccacagaatccatacgttcaatattcatataaggtaagatttgtgaaaagatattctttgcaatgtaggaggattgtgagcaatgtgactggtctgccacatgcggctcatccacgaccacatagaccacgacctgcggatcgtctaccggagcaaatccgataaaggataccacatagttaccggatccacgcggcactttttccgccgtaccggtcttaccaccgatagcatagccctcaactgctgccttggcaccggttccctcactgacgactgtgtacatatagtcgcgcagggtgtcactgacttcctgggaaaccgtctccttggtcacgaccggactgatctcctgcacggtattgccagagccatccacgatcttttttaccacatgcggctgatagatattgccaccattgatcagggagcaaaaggaggatgccaactggatcatagtcacattgaagccctgtccgaaagaagaaacggcaaggtttgactccgtccgcgccaactgttcctcactaaagatcaaagatgccgtagatgcctcacccggcaggtcgatgcctgtcttttgtccgaacccgtattccctgctgtatttggcaaagttggcaggtccgatggcacgcaccatctgcatcagggcatcgttgcaggaatccctcagagccccacgcaggtcttcggtaccatgaccactacggttgacacagtggatctcatgtccgctgacccactcgctaccatcgcagatataggtctcatccccacgcaggctgccggagtccagtcccatagcctcggtaaacggcttaaaggtagaacccggttcaaaggtatttgaaatcgtataattctgccagagtttattgagttggttcatcttgtcttcatccgacattcccgccagttcttcctctgtaaagtatgcactcagatcctttggattattcagatcaaagttcggataggatgccatggcaagcacatccccgttttgtggatccataacaaggactgccgtattattactgccggtcgcctgtccttccgtctcctgcttcatctcctcgtttgcctgtaagatggcactctccacgatggactggatattggtgtctattgtcgccaccagagaatagccgttttccggttcaatgaccgtctgctccagattgctgtcagcattcagatacccataagatctgccattggtaccgtttaaagtatcgttatactgattttccaagccgatcacaccggtcgttgcattagcaaagccgatcatggcacttgccagcgaattgtaaggataagtccttgtatattctttttcaaaccagatccccgcgatctgatccttggtatcttcgccgttcattaaggcttcaaaagccgccttttcctcataggaaacatgctttgccagcactgtatattcccgatccgggttgtctgtgatctcctgattgacctggtccgccgtgatctccgggaagcactgggtcagataggcgatggtagatgaaatcttttcctcgtttgcatgcaagaccttgctgtccaggatgacattataaacatctacgcttgtcgcaagaaccgtccccttgctatccacgatgtcaccgcgcttatacggaatgatcgtactgtcatattcctgctgtgagagcacgatcttttcgtatttctccccactcgtgtattcgatatacatgagccggaagatcaaagccacaaaaagaatgcataatactccaaaaacaatgtaaagcttattatgcattctcctaagtaactttttcggttttttccttctgcttcttcgtatctgtctagccaatcaaaaaactcctatcctatggaatattgtgatactggttcatataatcactgctatccatatcataatacacgatctggtcagcatttgcatagaccatgcccatctcattgatggcagccgtcttgatgtcgcctaaattggtcgcactggcgatgcggctctcggtcgcactgttggatgccttgaggtcagaaatattctgctccaaagccgaaatattatccatatgtgtcgtgatgctgttggtcagattgatatagcctacaaaaagacccaccaatgcaactgccacggatacaatatacatagaatagacacgtttgcggcgcatggctgcctgtgccttgcgtcttgcctgtcttctctttctttctctttcttcacggatctcacgctctctggtatggcggtccggaagcggctgttctacctgtcgtacggtattgccgtctgtataataataagtctttacctcagtcatagtcctctcctttttcaaactcccaactatctgctgcttgtccctctttcaaatacacgtaattttgcgcttcgtgatctggtattttcttccagttccttttcggatggaaggatcggttttcttgtgatcacacgtcctttggacttctttccacatacacataccggaaaatctttcgggcaggtacatggatcctgatttttcttaaacgtattctttacgatgcggtcttccaaagaatgaaaggtgatgatacagatcctgccatcctctgctaaaagatcgataaatgcatccagattctgctccagcacatccaattcccgattgagttcaatacggatcgcctgatacgtgcgctttgccggatgtccgccggtaacctgtaattttttcgggattgaccgttcaatgatctgatttaactgtcctgctcttgtgatccgctctttttgacgttcttttacgatattcttggcaatgttctttgcaaatcgatcttctccatagtctctgatgatgcgataaaggtcttcctcggaatagtcattgacgatatccgctgctgtcatcggattgtcctgatccatgcgcatatccaaaggtgcatcctcgaccatgtaggaaaatcctctctccggtgtgtctaactgaaaagaagatacgccaagatctaaaagaataccgtctaccttatcaatgccaagttcgtggactctctcgaccatggcttcataattgctatgtaccaaagtcacacggtctgcaaatggtcttagtctctcgcctgcggcttccagcgcatcatagtcctgatcgataccgatcaggcgtcctgtcgtcagccgtttggcgatctcataagaatgtccgccaccgccgagtgtcccgtctacatagatgccgtcttctttgatatgtaattgttcgattgtctccggtaagagtaccgaataatgcttaaagtccatctatgttccactcctaaatactcagtcccaactcagccatatgctctacgatctcgtccatgtcatcataagaacttgcatccgcataacgatccttgtcccagatctcgatcttggtcagaacacctactaagacaacatccttttccagtcctgcaaattcacgaagtaccgacggaatcagaatacgtccctgcttgtccacctcacacatggcagcacccgcaaagaagaaacgcataaatttacgtgcgtcttttgttgtcagattgacttcgcggaacttctcctcgatgcgtttccattcttcctgggaatatacgtacagacagccgtccacgccttttgtcacaacgaactgatcgcccaactgttcacgaaactttgccggaacaataagtctgcccttggcatctacgttatgactatattctcccatgaacataactgctgtacctcctttcccctagcatcttatccacgaaattatccacttatccaccacttcatgacactatataccacttcgcaccacttttatgattattttatggtattaaagggcaaaaagcaagcccgaaaaccttgtaaaatcaaggctttcgggcttgtggtagatggtggtggcaaatcccactactatttcttgtgtccttttatttttaagcacaagttcttgtggttttgtccctttttatacgtttttcttcc

SEQ ID NO: 12592 - DNA, 1046 bp, Unknown
  gut microbiota DNA sequence
cccgaaacctgtcatgctctttatcatgccatcggcacctcccatttgcataaatacctatgcatagatgtctatattatattaaatccatggcaaaaggtcaaattatttgtatttgttttttcaatataaacatttataataaatagaaaaagataagaagaaaaaggagatcatctcatggcatttgacgggatcacgacaaattgcattatgcaggaattaaatcatctactggcaggacagcgtattagcaagatcgcccagccggagcgcgaggaactgctttttacctttaaagcattaaatgaaagcagcaaccgccttctgatctctgccaatgcttccctgccctttttatatatgacaaaagaaaacaagaccagccctttgaatgcgcctaatttttgtatgctccttcgcaaatatatcggaaacggacgcatcagtgcgatcagtcagccttctatggaacgtgtgctctgctttaccatcgagcatttggatgaaatgggcgatcctgcggtaaaatatctctatgtggagatcatgggcaagcacagcaatattattttttgtgataaagatgggcagatcatcgacagcatcaagcatgtatccgggcagatgagttccatccgtgaagtccttccgggacgaccttattttatcccggcacagcaggatcgcttcgatccttggcagattgcaaaagaacaattcgtcgagcagatcttaaagaaaccttgctctgtggcaaaggcgatctatacgtccttagtcggtttttcaccgatcatagcaaccgaacttgcctatcgcagcggcttggatgccgatgattctaccgccgcactgacgcaggcagatgtagagcgcttgtatgatgtctttcgttctttattacaggatctgtccgacgggaatttttcttatggtatttactacgatcccgtcaccggcgcgccaaaagaatttgccccgattccactgactatctattccgacatggaatataagacattttcttctatatccgaggtctt

SEQ ID NO: 12593 - DNA, 286 bp, Unknown
  gut microbiota DNA sequence
cctgcgggactctgccataaggcatttcattatccacaaagggacaatcatacttcttagccattttctcagcttttacttcaagtgcttcaaagtagctgcggttatgcttgttatagatctcgtcgtaaagtggtacaagatcaggatattttccggcgatataatccataattgtctttttgaaaccgcctcgaagattgagattttcgagccagaacagatcgcactgatcctttaccttctcaaagattgcttcaaaattcgtgataccggggaataccgg

SEQ ID NO: 12594 - DNA, 1998 bp, Unknown
  gut microbiota DNA sequence
aaaagtgggaagcaccctataattaaaataattatgcaatatcgtcggtgactataccatttcttaagatattgcgagagtgaggagaatacttttatgctaaataagttagaacgtgctctgggtaaatatgccattccgaatctgatgcgttatttgatcgggggctatgtgctggggtattttttgatgttgggaagccgcattaccagtgtaaactttctgacctatatgaccttagagccttattatattatccataagttccagatctggcgtatctttacatggatcatgatcccggagacttccaatatcctgttctttgcgatcatgctccttttgtattatcagttgggaacggcgctggagaatgcatgggggacatttcgctttaatgcctatatcattggaggcatgcttgcgactctgatcggtgcttttgttttgtattttatttacggtgcggtgaccggcagtccggtagcaggtgttggcggttattttagtatgcagtacatcaacctgtcgatctttttagcatttgccgtatgcttcccggatatggaagtgcttttgtactttatcattccgatcaagatgaagtggatggcagtggtttatgccgttatgatcgcgatcagtctggtgggatcctcctggtcaggtcgtgtggcgatcatctgctccctgctcaacttcctgatcttttatctgtcatcccgcaattacagacgtgtggatccgcgtgagatccaccgcaagcaggaatataagcgcaaggcggcagccggtgcaggaccaaggagagacaggagcggcgcaccgatcgcaagacacaagtgtgcggtatgcggcaggacagaactgacaaacccggaactggaattccgtttctgctcaaaatgcaacggcaattatgaatattgtcaggatcatctgtttacacacaaacacatccagtaggcaataccaaagaggaatataagtggataagtccacagatggagaggaatagatcaatggagaacgaaaaagaagtagtatcaaagaattttatcgagatggagatcgacaaggacctggcagagggggtttacgacaccgtatgtacccgtttcccgccggagccaaatggttatctgcatatcggtcatgccaagtccatcctgttaaactatggtctggcaaaaaaatacaatggcgaatttcacatgcgttttgacgacaccaacccaaccaaggaacgtgaggaatttgtagagtccatcaaaaaagacattcagtggctgggcgcagactggggcgaccatctgtattttgcatccaactattttgaccagatgtatgaagcagctattactctgatcaaaaagggcagggcatactgctctgacttaaatgcagaccagatccgtgagtaccgcggtactttgacagagcctggcaaggaagatccgaatgcaggtcgtagcatcgaagaaaatttacagatctttgaagatatgaaaaacggcaaatacgaggacggctccatggtactgcgtgccaagatcgatatgacatcaccgaatatcaatatgagagatccgattctctaccgtgtggcacatatgcatcatcacaacaccggtgataagtggtgcatttatcctatgtatgatttcgcacatccgatcgaggatgcgatcgagggcatcacacattctatctgcacactggaatttgaagaccacagaccactctatgactgggtcgttcgtgaggtcggttttgcacatccgccaagacagatcgaatttgccaagatgtatctgaccaatgtcgttaccggcaagcgttacatcaagcgtctggtagaagaaggcatcgtagacggctgggatgatccgcgtctggtatccattgcagccctgcgccgccgtggcttcacaccggagtccattgcaaagttcgtagaactctgtggcgtgtcaaagagtaattcttctgtagatt

SEQ ID NO: 12595 - DNA, 2175 bp, Unknown
  gut microbiota DNA sequence
cacagtgtgggtgttaccgtttttgtgttatgacgactgctaatcagagcgagatttgcagagcgtatctcgtctcggtttggtaaataataaaaaattgcaaaagaacaagaaattttgaatgaaaaagcaaatttttgaatagggatttcttcaaaatgctctatgatgtagttagcaaagaagaatgtcagcattacacattcaaatatagaaagaaactacaaaaaggagagcgagtatgagcaagaaatttacttggaatgaaaactggaagttcacaaaagatgctgtcacagtatctgataagacaacttccgcaggaaactgggagacattggatctgccacatacctggaatggcgaggacggacaggacggtggaagcgattattatcgtggaacctgctactatgcaaagaacctttctaaggcagaggttgctgagggcaaggaagtttatattgagtttgaagcagcaaactcatccgcagagttattcgtaaatggcgagtctgttgcaaagcatgatggcggatattctacctggagagccaacatcacaccatatttaaaggatgaaaacgagatcgtggttgctgttgacaatgcaccaaatgattatgtatatccgcagaatgcagactttaccttctacggcggactctatcgtaaggtatctctgattttagtcgatgagacacgctttgatctggactattacggaagtcctgccattaaggtaacaccggaagtgacaggagatgatgccaagatcacaacagaggtatatctgacaaacgcaggaagtacagaagaactggtatttaccattacagatggagacacagtagttgataccgtgactgtatcagcagacaagacagaggtagagcagaccatcacaaatgtgcatctctggaatggacgtaaggatccacatctttataccatgcatgtagagttaaagaaaaatggtacagtcgttgatgagagaagcacacgtttcggctgccgtacctttaaggttgacccggaaaagggatttttcttaaatggcgagcattatccacttcgtggtgtatcccgtcatcaggacagaccgcatatcggtaatgcacttacacctgagatgcatgaagaagatgctaagatcatttatgaacttggcgcaaccaccattcgtctggcacattaccagcatgaccagcacttctacgatatgtgtgatgagttaggatttgtactctgggctgagatcccatatatttctgtgcatatgccaaatggacgtgaaaataccatttcacagatgaaggaactggtcgtacagaattacaaccatgcgtctattttcttctggggactttccaatgagatcaccatgaagggtgcaaaggatcctgaccttttagagaaccatcatatcttaaatgatatggttcatgaaatggataagacaagacttaccactatggcggttatctccatgtgtgatatttcagagagccagtatatagagatccctgatctggtatcttataaccagtatctgggatggtacggcggaaagatcgaggagaacggaccatttatggattccttccatgagatgtatccaaatatcccgatcggtatgagtgagtacggcgcagaagcctacaagtggcattcttctcacccggagcagggcgattattcagaagaatatcaggcacattatcatgaagaactcatcaagcagctctataccagagactttgtatgggctacacatgtttggaatatgtttgactttgcagcagatgccagagacgagggcggatgcaagggtatgaacaacaagggtctggttacctttgaccgtaagtacaaaaaggattccttctatgcttacaaggcatggttatccgacgaaccgtttgttcatctttgcagcaagaattatgtagaccgtgatgaagatgttacgaccgttaaggtttattctaatcttcctgaggtagaactttttgcaaacggagaatctgtaggaaagcagacagcagaggatcatttcttctccttcactgttaaaaatgtaggagaatctcaattacttgcaaaggcaggagattgtgaagataccgctgtaatcaaaaaagtagacgagccaaatccggactatcgtatgcc

SEQ ID NO: 12596 - DNA, 980 bp, Unknown
  gut microbiota DNA sequence
ccagaagagaaataaaggatagagggttagaaaatgcagttgacaggatcacaggtgattatagaatgcctgaaagaacagggtgtagataccgttttcggatatccgggcggtgcaatcctgaacgtttatgatgaattatacaaacatccggaaatccggcatgtacttacctcgcatgagcaaggggcttcccatgcagcagacggatatgccagaagtacaggaaaagtcggagtctgtatggcaacaagcggaccgggagccaccaatctggtgaccggtatcgcaactgcgtatatggattccattccgatcgtggcaatcacttgcaatgttggggtatcactcctcggaaaagacagttttcaggaaattgatattgctggcatcacaacaccgattacaaaatacagttttattgtaaaagatgtaacaaaacttgccgatacgattcgcagagctttttccattgcgcggaaaggacgtccgggcccggttctggtagatatcaccaaggatgtgactgccaacaaaacagagtatataaagaaagagccaaaaatgccgcagccggattgttcggcattcaatgaggatgatttaaagaaagccatccagatgattgaaaaggcaaagaagccgtacatatttgtcggaggaggagcaatcctttccggagccagtgaagtattaaagacatttgtagaaaaaacagatgcaccggtctgcgacacactgatgggaaaaggtgcatatgatggaacatcagaaaactataccggaatgcttggaatgcacggaacaaagacgtccaatctcggtgtcagtgaatgtgatcttctgatcgcagttggtgttcgtttttctgaccgtgtacttggaaatccaaagaaatttgcaaaacaggcaaagattctgcagattgatattgatccggtagaaatcaataaaaatattatcgtaaatcacagcattat

SEQ ID NO: 12597 - DNA, 2688 bp, Unknown
  gut microbiota DNA sequence
cattgtacttgtaaaggagtctaaggaatagaagacaactcttgaaaaacagtaaagttctatgctattatccaaattatcattgaattatctttttatcaaaaaggagtgcgcaaaaaaatgtatctggattccctactagaggatattttttctacccataacaatttttatgatataacaaaggagaattttccacaggattataagatggatgacttttatgaagaacttcgttttattaacgagcgcaatgcgtcagaacaacgtctgcatcaggcgatcgtggaagggaatgccgcaaaagccaagcatgaactccgtttaacaaagcagacgctccaacatagtgatggacatatttgttctattcccatttccccactgcgtcagtttaaagattctgccctttcaatgaatacacttttccgcaaggatattgagcaaaattatgtacccaatatctacatcaatcactacgcctcacgctttacctatctaatcgagatagcaggtagttttgatgaagtcggacagatcattgaaaaaatgattgatacctattgtatgctatccaacacattttcccttgctgcctacaccagaccaattcagaattgtatcctctatttagaactgcacatgaatgaagaaatttccgtagaacatcttgcaaaagaattgtcgttgacaccaaactacctttctacgctctttaaaaaagaagtaggaaagacaataacccaatatctgctctgccgtcgtatctctgaagcctgtttgctcctgcgttgcacgacatccagtattgctgatattgcagcctctgttggcatcaacgactctaattactttacaaaattatttaaaaaacaaatgcatatgacacctatgcaatatagaaaaagacacagataatcaacgttcattccgctcagggatcagccctgtgcgataggcttccaaaagcccttgcaaatccgcaacattttcttttaattcccgcccgatatccgtatctgccacacgcttgcgcttcaagacctgctggaccagaatacggtcggaatggatatcacttccctgctctactgccttggctaccgatgtaaaaggctcatgggctgccaagaccagtccataggaattgtagatcagtgtatatccggcaataccggtctttggctgataggctttagacagaccaccgtcaatgatgagcagtttgccgttacatttgaccggcgattctcccgcctttgcctcgaccgggatgtgtccgttaataatgtgggcatctgcgcccgacaaaccaaattcctttaagacggcatctgccatcttttcatcattgagcatctgatagtatgggttcttcggctctacatgcaaggctttgtctgccacgaaatagcgttcaaaggtcgccatcttttccttgccgaataccggtgaatccggattctcccacaaataccagaggatcgcctgcccgcgtattctttccctgtcgtccgtcgcataatagccttttctggcataggaatccaatacatcatacagggctctgcccgtataagtctttccgaataagcggaccggtaagaacttgccatccttggtcagcggaatacagccatgatacaaaaggttgccattgtagaccttgtaaaggcttccatgagagtacaaaaactgtatgtgctgctgcaatttctcgcaatgcataaaggattgctggatctggtcgatcacttcctgttcctgctcggtcaaaagatatggatgctcaggatctaatgtcggaaaatgcttatccttcatcggataagaaatgccatcgatcgtcacactgccctgggaaagatcgatcttatccagcagcagacggtcttccatgccaaaatccggatgggataagatcatctgtccctcgatcttaaactgcatgatggtaattgccttgtgcatcttttcttccagactggtatctaaggtcagatgcttcgcctggtctaaattctgataagcactctgctcacggaaacagagacatggatcatccccataatattccatcgccagtttggcaagcggcaaaagattgatgccatagccctcctccaaggtcgccagattgccgtagcgcgccgcaatacggatgacattgcaaatgcaaggtctgcttcctgccgctgctcccatccacaggatgtcatgattgccccactggatatccacggaatgatggttcataagagaatccaggatcaggtgtgggcttggtcccctgtcataaatatcaccaaccacatgcagatgatcgacgaccatacggcggatcagatctgcacatgccacgatcatctctcttgccctgcctgtcgtgatgaccgaatggatgatctcattgtaataagcctcctggtctgcctcatccggtctgccgctcatcaactcctcgatcacataggcaaaatccgtcggcattgcttttcgtaccttggaacgcgtgtacttggatgccgcactccggcagagcaggatcatacggtggatggtcacctgataccattcctcgatgtccttttccttggcctccacctgctctaacttttcccgcggataatagataagcgctgccagttcctttttttcttccatgcgcagtgtcggtccgaatacatc

SEQ ID NO: 12598 - DNA, 1363 bp, Unknown
  gut microbiota DNA sequence
cacatcggtgataaaatgctctgtcccctttggcagatttaggattgcctgtaagttgatgatctccgttgccgcagacgcgacattcggatactgctttgctaaacccttgtaaaaacgaatttcctgctccatcttctcctcttaacttccaaaccggacagaaaaactctgcccggtcttatactaatttgcctttgccttcaagtctgctacgatctgttcctttaactccagacactgatccttcatgcgcttggatgtgccggaagatgtgatcagacgactgatcagtttggacgcaatgtcataatctttatagtggactgccatgtttgccagaatataatcgaccgtattggcatccataccattgtaaggcggcatctctgtgctggtcactttcataaagccatcgtatgcctgacggtaaaatccctcatattctttctggcagttttcgatacgtttcttattcatcggcgtatcatccggtatggtcttaatctcggcacggcgcagccacgcaatgtttaagcatatgtatgccttctcactcagttttgccttttttgccatagcggaaaccagcgccagcttgtacttttctaccgcataatcataggtgtagacttccatctttggctcttcgaccggcttaaaattggctgagatctgctcacggatccatttgcgctgtgtcggtgacaaatgctcaaaatttcggcgcagggctgcatatccgcaggacgggcaggcacatacaccgtactttaaggtatcgacatactcatggtttggacgaagatccgcatccggttcctttctcttgaccttggaactctttacccctttgacaacaaattccttgtcgcagatcgggcacttcatcttgtgatccaaaaggaaatccttttcggtcaattctaccacttctgcctttgccttttcggtctgtttctttttcgcctcgctgccatcatttaagatgtctaactcgccatcgcctttcagaccaaatttctctaatccagataataaattcattatttcacactttctgctaaaaccaacttaggctgtcggcaatttgtaggaagacttcaaagatacgatccggttgaataccagatgctccttggaagaatcctttgcatctacgcagaagaagccctgacgtacaaactggaaactgtcatacgcctctgcctctgcgatggatggctccacataacaattctccaaaaccgtcagagaatttggatttaagttgaggctaccatcctcattgtaaacgccggcttcctcatctacgatattctcatagaggcggatggttgccggaacggctgtctcgcaggat

SEQ ID NO: 12599 - DNA, 10136 bp, Unknown
  gut microbiota DNA sequence
gatcaaggagtttttggaaaaatagtgaggacaaaattgatagaacgatgatctggcataaagattctgatagaattacctatgtataaaggagacactatggacgagagattaaaaaagcaactggattttattttggagattgataaagagaaaaatatcctgcggcaaacgcatctgtccgggcacggcaggagagagaacgattcggagcatgcatggcatatggcgatcatggcatacctcttgcgcgattattccaatgagcctgtggatattgccaaggtcatgctcatgtgcctgatccatgatattgtggagattgatgcaggtgatacttacgcatatgatgcagaaggattaaagacacaaaaggcgcgggaagatgcagccaaggagcggatcttttctcttttaccggaggatcaaaaggaagaactgatcgcgctctttgatgaatttgaggatttttcaacggcggaatccaagtttgcacatgccatggataatttgcagccgcttcttttaaataacagcaatggcggcggtgactggagagaacacggggtaagtgccgagcaggtctatggcagacagagaaagaccacgctgggatctgagaaattgtatgaggtgacagatcatatcatccgggaacacgtagaaaaagggaacctgaaaaagtaagaaaattaaaataaagcagggtataatgatcggctttttcatatacagaaatattatcttaaagatgttttaacatattgataatggaagtcctgtattataagataaatcgccgtgttcttccatgaaggtatttctggcgtggtaaatatcttccatggagacatcggcgcgctcacagacagcaccaaagtaagcatgtatgcggtctgcaaaaaccggagccgccagatcaaacaggtcataaagactttcggtacgcttttggtcaggattccaagggttgtgccatgttttgtggcggaaattgcaaggatccttgtaggcgtagatcgtgtcacttgggatcataggtgaaatgacaggaacctttacaaaaatggcttccaaacggcggacaagccttttcttgatgccggtcgggtcatgcatcagacgggattctgtcttcatggcgcgaaaggcaccgcggatctgccattttggcatgaccgcatccggaaatacatttgcaagggcaaaagataagaccctggcaatcacacggctttccttagtagaaagggcaatggtatctcccggacgaaaatctgtcggcttgcaatgcagaaaatgtgagatcatttcctgatcgatgccggtctctaaaaagacatgacgaccaaaatcataaagtccaccattgcggtctttattttgtaaatggtgtgtccggtcaaagatgtatggatgacagtaggtgtcgagcgtatagtgacccaaaaatccgcagatgtaagcgtccgcaatgatgcgttcgctatgcgaggacaatttattccgggcatcgatcatagcaataaaaaattgcaatgaagaattttcgtgaatcaggctggcggcattgtggtcataaagcagccatgccggcaggtaataatagaagatgtcaggtccctgcaagcccagattataggcatgtggatgtaaggacaggatatgatattcctgatcttctttaagatgtgaaagtgactgttgtccaaaaaggtaatgtgaggcgaatcctggcataatatgcgctcctttccgctgttatgagcacttagatttatattttaattatacttgaacaaacaaaatgtggcaaacaaagtatagattttgtcaagtcagatatacaaattcgcgaaaatgtataatgcgaccatacacagaaaatctattgtatatgtcaaaaaaccacgttatttcttatactagcaaaggtaaaagacaaagaagaaaaagagggaggaaattagcatggcttcattagttgaaaacgcacagcacaaagcagagagaaaagcttttgagataatggtcaatggtatcgttggtaagttgacaaagacagatgatatcgcaaaaagacaggaaacattccttaatcttattgacaaggcagaggctttctggggagagggcacagataaggcaacactggataaggttagagagtatgtaaagaatccggagaacagatgggtaaaatttgtgaaccgtgttctggatgagacaaacccgaactatgctaagaaattccttctgaatttaggatatgaagcatttttccgtggaacaaagacgatcagagcaaaccgtgagaagtacaactgtaacattccttggctgatcttgtttgatccgacagacgcatgtaacctccactgtgtaggatgctggtctggtacatatggtcataagaacaacatgtcatacgaagacatggataagatcgttacacagggtaaggaacttggaacttatctttactttatgacaggtggagaacctaccgttcgtaaggctgatattttaaaacttgctgagaagcataacgattgtatgtttggtcttttctctaactctacattgatcgatgaagagttatgtaagaagatcgtagaacttggaaatattacattccttctttctatcgaaggaacaccagagacaaacgatggtcgtcgtggtgaaggacattatgcagcagttatgaaggcaatggatcttttgaaagaatacggtatcgtattcggtacttctatctgctacaccagagacaacgttgaggcagttaccgatgagaagttcttacgtttcatcgctgacaagggtgctcgtttcggattctacttccattacatgcctgtaggacagaatgcagcaccggaattgatgcctactttagagcagcgtgaagagatcatcaagaagattcgttgggttcgtaccggtgacaatgatatcggattcttcccaatggacttccagaatgatggagaatttgttggtggatgtatcgctggtggacgtaactacttccacatcaatgcacagggtgatgcagagccttgcgtatttatccacttctcagactctaacatccatgacaagtcaatccttgagatgttacagagcccacttttcaaggcataccatgaaggacagccatttaacagaaaccatctgcgtccatgcccaatgcttgagaatccaaaactcttaagagaaatggtaaacaagaccggtgctaagggaacaaacgctgaggcagaggagaccgttgagcatctttgctctaagtgcgatcactatgcagaagagtggggacctgttgcagatcgtatctgggcagagcagaagcacaagaagccttcttacgagaactatacagaagaaaagagagagcatccggaacttgcagcattcgagcatgcagacggatctaagggactcagagacgaggacattcagtaattaaatcaggttatattatttgaaatatataacagcccaacccggaaagagactggcagacgccagtctctttttcataggaaagcagaatgcgccttgcagcagatggaagaaaaaaattatgcgtcagatttgattgcttccggtattgcgagaaataatatttatgaaatagcatttgcctttgatggcaaggaagtcttagtgaaggaaaggcatgtgacggcaagtgacgatgaagtataagcatggagcgatctgtcgcccaccatatcttgtaggttaaagatggcgtaaactactagtttttttatttgcttcaaatgcattgaaagtttagttgaaacgtattacaataaaacctgtcgcttcttgacagattatagacagaagcgcaggttttattacttatagaagaatttcggggagacgaaagcagacagatgtttattggacgaaagaaagaactggaagcgttaaacgcattttatgaaggagataaagaagcccttgcctgtgtgagtggtgcgcttggtatgggtaagacgacacttttgcgtcattttgcagatgggaaaaaggcaatctattttcatgcttatgagacaacaggaaagcaggaactttccatgtttacgcaggtattggcaaaggcagatatagcaggcgtggcagcgggagaggatactggaaaaagaagtgaggcatcattagaaaacctcttagatgcgatcacagaaatagcaaagcaggaaaaacttttgctcgtgatcgatcaatatccgaattttgttaaggcggatgccgattttgatgaaatcttgtttttctatgtgacgagagtttggcgggatcttccgatcaagcttatcctttgcggagatgccttccttttgatggagaaatatctctatggaaagaaagccagatggaaagatacgatcgatctgcatttgaatctgaccggcatggattttctggagacaaagcagtttttccctgaggcagcaggggaagatctggcactttactatggtatcagcggtggtatcccggcgcagatcctgcgtatgcagggaaagtccgtaaaggatgcggctgaggtaatcttcgccggaaatccgggacaggcggcacttctgccggaacaggtcatggggatggaactcagggagttgtcctattataattgcattttatcggcgatggcgcagggcatgaaccgtgtcaaccagttatctgctgaggttggcaagccaaaggatgttgttgttccttatctgaatgcgctgatgtcgatcggtgttgtcacaaagcagacggcgatcacagaggagaccaatcgcaaaaaaacgcgctattctatcgtcaatagcaacacggtattttggtatcgctttatcgtgccgcatatggatctttatgtagcgggagagtgggatcttttgtggaatacatatattgtgccggatcttgacaattttatgcagcaggtattcattgctatgagcagagaacatctggaagaacgcagccgcagagggcagatgccgtttacgatcgagcgttccggtaactggtggaccaatgatgatgaggcagggacgaccgatggatttgatgtggtatcgctgggtaagaccgagggcaagagtgcgacgatttttaccctgtgtttctatgaacagcgcgagattgaggtcgcggaagttaagtcaatgattgaaaagactaagcagatgcatcgtgagggggatgccttttacgtggtctgtgccaaggatcgtttccatgagaatgtagagaccgttgcatccacgatcaagaatattatcttagtgacactggatgaggagtgcaggctggcatagtgagcgtatctcccatgaaaactcaaaaatttgcgtaaaattgtataaattctgctattgataataaaatggggtcatagtaaaattttatctgtaaggtttttctatgacctttttggtatgagaactttattaactgccgtgggagactgcggcatatcaaaaaatagagaggataattgcaatgacaaatcttgaattacaaaaagaagcagtgaaagtccgcaagggcatcattgatggtgtgcatgctgcaaaagcaggacatccgggcggatctttatctgcagcagaagtatttacgtatctgtactttgaagagatgaacatcgacccaaaggatccaaagaagccggatcgtgatcgtttcgttttatctaagggacacaccgcacctgggctttatgccgcacttgcgaacagaggatatttcccggtagaagaccttctgacactgcgccatatcggatcccatttacagggacacccatgtatccagcatacaccgggagttgacgcttccagcggatcactcggacagggaatttctgttgctgtaggtatggcactttccgcaaaactttctaatgaggattatcgtgtgtacacgcttctgggtgatggcgagattcaggaaggacaggtatgggaggcatccatgtttgccggatcacatcacctggacaacctttgtgtcattgtagataataacaatttgcagattgatggtacgatcgaggaagttaattccccatatccgatcacagacaagtttgcagcattcaattttcatgtgatcgcagtcgaggatggcaatgattttgaccaacttcgtgcagcatttgcggaagcaagagagacaaaaggtatgccaacagcaatcgttatgaagacagtcaagggcaagggcgtttcttatatggaaaatgcagtaggctggcatggaaaggctccaaatgacgaggagtatgcgattgcagtggaagaattaaagaaggcggaggaagcattatgtcagaagtaaagaagatcgcgacaagagatagttatggtaatgcgctagcaagtcttggtagagaacatgagaatctggtagttctggatgcagaccttgcagccgctacgaagacaggtatttttaagaaagaattcccggaacgccacattgattgtggtatcgcggaagcaaatatgatcggtattgcagcaggtcttgccagcacaggcaaggtgccattctgctctagttttgctatgtttgcagcaggacgtacttttgagcagatccgcaactctgttggatacccacacctgaatgtaaagatcggtgcgacacacgccggtatctccgttggagaagatggcgcaacccaccagtgtaacgaggatatcgctttaatgcgtaccattccgggtatgaccatcatcaatccatccgatgatattgaggcaaaggcagcagtcaaggcagcttatgaaatggaaggaccggtatatcttcgttttggtcgtctggcagtgccggtcatcaacgacagagaggattacaagtttgaaatcggtaagggtgttgtgttaaaagaaggtacagaccttacattaatcgcaaccggtcttgaagtagcagaatctcttgcagcagcagagaaattagaagcagagggtatcagtgttgaagtaatcaatatgcataccattaagccacttgacgtagatttagttgtacgttctgcagcaaagacaggcaaggttgttacggtagaagagcattcaattattggtggtcttggaagtgcagttgcagaggtacttgcagaaaagcagcctgctaaattacttcgtattggtgtagaagatcgctttggcgagtctggtccagcgttaaaactccttgagaagtatgaactggatgcagcaggtatctacaagaaggttaaggcatttttataaaatataaaatagggatattaaaagcggctacagatggcttgatatgaggggattcctcaaagccatttgcagccgctttttgttgtggcggcggggaaacgagtttattttatcgctgtataaaaacaataaatttgtggaaaaataatccatagaaaatgaggaaagaagaggaacgatatggattatttagaaattgaaaaagtagtaggaagggagatcttggattccagaggaaatccgaccgtagaggcggaagtgcatcttatggacggaacggtagcacgtggggcagcaccgagtggcgcgtccaccggagaatttgaggcattagaactgcgggatggtgatgaaaagcgatatggtggaaaaggtgttttacaggcagcagggcatgtcaacgatgaaatcaataaagccttaaaggggatggacgcatccgatatttacgcgattgatcgtgccatgatacaggcagacggcacggatgacaaatcacattttggagcaaatgcgattttggcgacatctattgcctgctgtcgtgcagcagcatcgtctcttgacattccattgtatcgatttttgggtggtgtttccggaaggcgaatgccgattcctatgatgaatatcataaacggaggtgttcatgcagcaacctctggtctggatgtacaggaatttatgattatgccggtgggggcatcctgctttcgggaaggattgcgctggtgtgcagaagtatttcatgagttagcgtctcttttgcatgaaaagggcctgacgacatcggttggagacgaaggtggttttgcaccagaattatcgtcagacgaagaagcaattgcaatgattatggaagcagtagagcgcgcgggctatacgatggaaaagcattttatgatagcgttggatgcggcatcatcggaatggaaatgtacggcagattgttttcatgaggatacgatggcaaccagcagtggacagatgttatatcatttgccaaagaccggtgttgattatacgacagatgagttgatcaaacattggatttatctggtaaaaaaatatccgattgcatccattgaagatcccttggatgaggaagattggcaggggtggcagaaacttaccatggagttgggagatcaggtacaactggtgggagatgatttgtttgtgacaaatacaaatcgcctgcaaagaggaattgcacagggatgtggaaattcgattctcattaaactaaatcagattgggacagtttcagaaacgttagatgccattcgtctggcacaggaagcaggttatacagcaattgcatcgcatcgctccggtgagacggaggatacgacaatcgctgatctggcggtagccatgaataccggtcagataaagacaggtgcgccaagtagaagtgagcgcgtggcaaagtataaccgcctgcttcgtatagaagaagaattatccggtgttacgcattcatgcggcggatgtactgcataaagaaagaaacacctggggtaatctgatccacaggaaaacgctcattggtagagtgtggtgtatgcatcaattctgacggcaaagaaaatggtgaaaaacgataaagattttcacaaatacactcataatgataagaatcagtacaggctgttaacaggtaaggcgtcgtaaaagaagtttcgcatccatctgcgaaaatatcttcaattgtgtgaaaggatctggtatctgttggagatacggcacttgcctccttgccttttaacagtgtgatggttgcatcataatctttggccagaacttccagatgttttttgacggaagcaagcgtatctccctgcaaaaggcggaaattaatcacgcatgttgcagcctccggcaatacgtttggtgcaggtgaggcggatgccattgtcactgcagtggatgtacggaccattgctgcggtaaatggatttttacccataacatttttaagcacaggctttaatacgccagggtgtttgagtagcccaccaagcggagatgacatatgatttcctatggtagaaaacatagcgagcaccggtgttgtgaaatgtgcctcaaatgggtggttttcaatcttggtaatcagctccgataattgtccgagtgcggtatgctttggtggaaaggatgagtgaccacctaatccttttacggtgatttcgtaatctgcatatcctttttcggcaatgccaaccatggtgatatgtgcatctaaaatgtttttcgcgtgaacatccgtagaaccgccaccttcatctaaaatactgtcaaaatgaatgccgcgctcgtttaagagggtggcaatcttttttgcaccgttgtcttttcccgctacgatttcttcgttgtaatccaggcagacatagacatcacgtgttgttgtatagccttcctcaagcaatgtttcaataccttctataatacaaagcaggtgacttttcatatcgagtgcgcctctgccccagataaaggttccgtcattagcaccggaaaatggtgggtttgtccaatcatcttctgttccgggtgcaaccggaacaacatcctggtgtgctaaaaatccgatgggatccaacgtgtcatcgctgcccttccagtgtaggataagaccggcgcgtccgacttcttcgacatctaaggtagagaaggtctttgggtatgcttctttcagaaagtcatgaaattctttgaatttgttccaatccgtatctgcttcgtcttcgtgggaaatggtagcaatctggatggcacgacttaggtttttggcaaaacgctcttcatttacatgttctagtttcatagtgaaat

SEQ ID NO: 12600 - DNA, 137 bp, Unknown
  gut microbiota DNA sequence
gacagcaatttgacactgctgtcctttcttttataaaattgcagtacacagaaaaaagctgtaaaatgaaaaatatatttgtccttgtaacaattctcggacatttgcctgttatactatctgcaaaaagaaaagga

SEQ ID NO: 12601 - DNA, 244 bp, Unknown
  gut microbiota DNA sequence
aaaatatatttgtccttgtaacaattctcggacatttgcctgttatactatctgcaaaaagaaaaggaagtgacaatatgaagcagattttaattgtcgaagacgataatcttttgaataaaacgcttacttataatttggaattggacggttacacaataacttctgttctgaatgcaaggacagccgctgaatcattaaaaacaaacatttttgatttggtattgctagatataaatttacc

SEQ ID NO: 12602 - DNA, 587 bp, Unknown
  gut microbiota DNA sequence
tctaagtagaagtaaattccgatttgtacttatttcttaaacaacttagaatgtgaaccaagtcggtagagcattaaaacaagcacatctccgtgaatctcataaataagcaaccagtccggttcaatgtgacacttacgcgttcctttatagttgcctgtaagatcatgatccctgtattttgcatccagcgtaccgccattcgctagaatatcgattacctcaaacagcttatcaagattattattttgctttttggcaagcttcaaatcctttttaaactgattggtaaactgaatgtcgtatttcatacgtcgagagctgccttaagcgcatccatactggaataacgtggagcagaaggatccttcattatttttctgccttcctcaatggcagcggctgtagtatcattcggtacttccagttttaattcaaaaggaataccatgctcacggatagcggttctcaggaacatatttacagcagttgtcatattcagaccaagctcattgaagatttcttccgcctgatccttgattgccttgtctgtacgaatatttaaattagttgttgccatacagaac

SEQ ID NO: 12603 - DNA, 2484 bp, Unknown
  gut microbiota DNA sequence
atggagactgctatcaaacttggtaagccagtcaacccggcacttcatgttggtatctgtggagagcatggtggagatccttcttccgttgagttctgccacaagatcggtcttgactatgtatcttgctcaccattccgtgtacctattgcacgtttggcagcagcacaggcagctattgctaataagtaatttaaaattcaaattcaaataaggattttgagagtcagccctgcactcaatgcagggctgtttttttatacagaaatgattgatacgatatgcaaattaggatatactaggactatgacgaaggagagtaatatgcaggtattacaggagaccatcagcagctgtaagaaatcactacagtgaaatttcaagacagtgatacaagaaggagaacaaacatgaaaaagcaagcatttaatccatatttaccaagttatgaatatgtgccggatggagaaccacatgtctttggggacagattatatatttatggttctcatgacaagtttaatggcaaaagattttgtgaaaatgactatgtggcatggtcaactccagttgataatttggctgattggagatatgaaggtgttatatataaaaagacgcaggatattgacaatgcaaatggagataaggtgatgtatgctccggatgtggcaagaggagtagatggaaaatattatctctactatggtcttgaaaacgacaacaaaattggtgtggctgtgtgtgatagcccggctggagaatatcattttttaggttgtgtgcaggataaaaatggtgaatactgggggagaagaccgcaggattttatgccgtttgattcgggtattcttgtagacaatggcagagtatatctttacgcaggtcagggacctatgatggaaaaaatggccaagagtgagtataagcgacatttcagagatagttcttattttgtggaacttgagaccgatatgcttacgatgaaacaagaaccggttagattattaccaaatataatggattctgcaggcacgggctttgagaaccatgagttttttgaggcaaattccattagaaaatttgacgataaatactattttatttattcatccgtgcagagtcacgagttgtgttgggctgtatctgacagaccagatggagattttacttatggtggtgtattaacttctaatggtgatgtgggtcctcttggctttacatctacaaaaagttatgctaagccattgggatacgaagccaagaattacattggaaataatcatggtagtgtagaaaagataaaggacaggtattatgtttttggacatagacatactgccagaaatatgttttccagacaggggtatgcagaggagataaagtttaaaaacggaaaatttgaatatgccgaacttacaagttgcggtcttaatgacggccctctgatgggagttggtgaatatgaggcaaggatagcctgtcatttgtattcaaagaaaggtccgacttggtctgctcataaactggtccaaaacaaagagcatccagcctttatgcaagacggattagatcgcgaggacaatccaaaccaatacattcagaatatgaaagatggtgctgttgctggatttcggtattttgattttgaaagctatgagccggattcgatttctgtaaagattcgtggaaaggctaatgggtatttctacatatacgatgacgctgacaagaaaaatatactaggaaagatcgctatagttgtgaatgacaagaagaatttttgctgtgtaaaagactctttaactgttccaaaaaagaatagtgcactttactttgaatacaagggtaagggatatctagatttttatagttttgaactaaaataaatgttcatacatgtcactaaggagccgaacgtaatggcgcaaggaatgtcttggatcaaaacgaatatgagacttgcgatgaatacatcggatgaaaccattgcggaacttatgacggacggatgtaatatgggagtgaaatctttgagtcggtatttaaatcagtataaggcagcggatgatagggcaaaggcaatcacgaagaaattgatcaatttggaaactgatttgtgtagtgatttaagagtatatttatagcaaagagtgtgcggtaaagcacactttttctatatacagaaatgatatataagatatgcaaattagaatataatgtgactatgaagaaagagaggtattgtaagaactgatagagtggcaccgattagtggaacatttgatgatttaagacagatgctgcgggagggataggatttgaaatataaggtcattcgaacagatactgcagatgcctcgagcataaagtacttggcagagtcctgaaattctgtttataatataggaacatatgcagtgccgtaatggtaagagaacagctccggctgctcttaagatcgcatgtgatcttgttgacgaa

SEQ ID NO: 12604 - DNA, 1504 bp, Unknown
  gut microbiota DNA sequence
tgcagtgccgtaatggtaagagaacagctccggctgctcttaagatcgcatgtgatcttgttgacgaaggacataagacagaagaagaagcagtagcaatgatcgatcctcgtaacctggatacacttcttcatccacagtttgatgcagcagcacttaaggctgcaacaccacttggaaagggcttaggagcatctcctggagcagcttgtggtaagatcgtctttacagcagaagatgctgaggcttggaacgagcgtggcgagaaggtcgtacttgttcgtcttgagacttcaccagaggacatcacaggtatgaaggcttctcagggtatcctgactgttcgtggtggtatgacatcacatgcagcagttgttgcccgtggtatgggaacctgttgtgtatccggttgtggcgacattgctatggacgaggagaacaagaagttcacacttgcaggcaaggaattccacgaaggagattacatctctatcgatggtacaacaggaaatatctacgatggcgagatcaagacagttgatgcaaccatcgctggtgagttcggtcgtgtaatggcttgggctgacaagtatagaaagttaaaggttcgtacaaatgcagatactcctgcagatgctaagaaggcacgcgaacttggagcagaaggcatcggactctgccgtacagagcatatgttctttgaagaagacagaattgcagcattccgtgagatgatctgttctgatactgtagaagaaagagaagcagcacttgagaagatccttccatatcagcagggagatttcaaggctctttatgaagcattggaaggatgcccggttaccattcgtttcttggatccacctcttcatgagttcgttcctacagaagaagcagacatcaagaagttagcagatgctcagggcaagactgtagagcagatcaagacaatcatcgatggactccatgagttcaacccaatgatgggtcacagaggatgccgtcttgctgttacttatcctgaaatcgccaagatgcagacaaaggctgttatccgtgcagcaatcgaagttcagaaagagcatgctgactggaacattaagcctgagatcatgatcccacttgtatgtgaagtggaagaattgaagtatgttaagaaagtcgttgttgagacagcagacgctgaaattgcagcagcaggcgtcacattagaatacgaagttggtactatgatcgagatcccaagagcagcacttactgctgacgagatcgctaaggaagcagacttcttctgctttggtacaaacgatctgacacagatgacatttggattctctcgtgatgatgccggtaagttcttagatgcttactatgacaagaagatctttgagaacgatccatttgctaagttagaccagacaggtgttggtaagttgatggagactgctatcaaacttggtaagccagtcaacccggcacttcatgttggtatctgtggagagca

SEQ ID NO: 12605 - DNA, 8417 bp, Unknown
  gut microbiota DNA sequence
actttttttgttataatgatagcgatgttttttcataaagggaggtggatactatgaagatgacatttcaaccaaaaaagagacagagatctaaagtacatggttttcgttcaagaatgagtacagcaggcggaagaaaagtattggctgctagaagagcaaaaggtagaaagaaattatcagcttaggccacagaccctgtggtctttcttctttttatcaaaaacgatcatgacccaattcgaaagactttttgtcatggaaaggtgagtggatattagtgaaattcagtgattctttaaagaaaaatgccgatttccagtatgtttataaaaacggacaatccaaagcaaatcgatatttagttatgtacgtatgcgagaatcaaggatccacaaatcgaattggaatttctgttagtaaaaaagtaggaaacagtgtagtacgacatcatttgacgagactgatcagagaaagttatagactacatgaagagatgttcaatagtggtttggatatcgtagtcgttgtaagaaacagggcaagggattgttcttatcatgaaattaatgatgctttgcttcatcttgcaggtcttcacaacatattaaataggtaataattggaaaagaatatgcaatcaattttgaaaaatggtttaatctggattatcaaattctatagaaagtatatttcgccaatgaagacaacgaaatgcccgtattatcccacatgctcgacctatggtctgcatgctgtggagaagtacggtttttttaaaggcggagctttggctgcctggcgtattcttcgttgtaatccattttcaaaaggtggttatgatcctgttccataaaatggaggtttttaacattgacagagttatatttaactgcttatgatggtgcgatcttaggaccaatcgctaaaggacttggctggatcatggataagatatacgtttttcttagttccgtatgtcatatcaacagcatcgcccttaccatcatcgtatttacggtattcatttacctgtgtctgttcccgctgacttataagcagcagaagttttctgtgcttacaagaaagatgcagccggaactgaatgctatccagaagaagtacaagaataaaaaggatactgcttctatgcaggcacagcaggaagaaacacagatggtctatgacaaatacggtgtttctccaatgggttcttgtttacagatgctcattcagatgccgatcctttttgcactttaccgtgtattctggaacgtaccggcttacattaccagtgtaaaagacatttttacagatgttgtaaatggtattatggcgaccgatggttatgcacagaccatggaagcactttataagagtgcaggtcttaagaatgttgcttttcatgcagatgcaaccggtacagcaatgagcaattctatcattgatgttctttacaaattgagtgaatccggttggagcgctctggcagacagttttcctaatctttctgactccatcgcaaccacagccgcaaacttaaaagatatcaactacatgttcatcttaaatatttccgatacaccttggaatctgatgaagacagcatgggctgataagtattgggtactccttattgcagcacttttagttccaatcgtttcttatcttggacaggtcgtcaatatgaagttgatgcctacacaggatacttccggatccggcaacgcacaggcagatcagatggcacagcagatgaagacaatgaacatgatgatgcctttgatgacacttttcatcgccttcacctgtccggtaggtcttgttttgtactggaccatgggttctgtagtccgtatcgttcagcagatcttactgaacaagcattttgagaagatcaatctggatgatattattgaaaagaacaaagaaaaagcagcaaagaagaaagagcagcgcggtatccgtcaggcacagatctatgaagcagcaaagatgaatacaaagagcaacagcatggcttcaaaggcaaacatttcttctgacaagattgatgctttgaacaaggcagaagaagcgcgtgcacatgctgcaagcggatctatggcatcaaaagccaatctggtaaaagattttaacgagcgtaataataaataatgggggtttaaaatcatggaatttgtagaatttagaggaaaaactgttgatgatgcaatcacaaatgcattggtttctcttggaacaacaagtgatcagattgaatatgaagtaatcgaaaaaggcagcaacggtattcttggttttggcagcaaagatgcagtcatcaaggttgcaaagaagtctacaccggaagatgttgtaaaagatttcttaacagaagtttttgataagatgaacttagaagttgagatcatcacgaagtttgatgagatcgagggtgtgatcgacattgaattgaagggacctgagatgggcgttctgatcggtaagcgcggtcagacattggattctctccagtatctgacaaaccttgctgtcaacagaaagtcagacaattatcttcgtgtaaagatcgacacagaggattatcgtagaagaagaaaggaaaccttggaaaaccttgccaagaacatggcttataaggtaaagagaaccaagcgtccggtttctttggaagcaatgaatccttatgagagaagaattattcactctgctttgcagaatgacaagtatgttgtaacacattctgaaggggaagaaccttacagacatgttgttattaccctgaagaaataatataaatgggttgaaatctttggactttatcttcataataaatggggataaggtccaattttttcttataaggaattgattatgtataagacagatactatttgtgcaatcgcatctgccatgacaaatgccggtatcggtattatccgtgtgagtggttcggatgcgattgaaaaagttgatcgaatttataaaggaaaacagaaactgacggaagtagagtctcataccgtacaatatggtcatatcgtttatgatgataaggtcatagatgaagttatggtactggtcttgaaggctccgcgtacttatacaacagaagatactgttgagatcgattgtcatggcgggacacttgtcatgcaggagattttgaaagccgttatagcgcagggtgtaagaccggcggaaccgggagagtttactaagcgggcatttttgaatggcaggatcgatctttcccaggcagagtctgttatggatgtgatttcttccaattccaacttggctcttcacaattccatcaatcagttgcagggcattttttcagatcagatcaaggatatgcggtctaagatcatttatgagattgcttatattgagtcggctttggatgacccggagcatatagatattacaggttatggggaagaacttttaccaaagatacaggagatcatagatcagatttcgcatttgcttgcaaccgcggataatggttctatgttaaaagagggcattaagacgacgatcattggcaaaccaaatgccggaaaatcctctcttttgaacctgcttgccagaaaagatcgggcgatcgttacggatattgccggaacaacccgtgatactttggaggagcagatcagtttgaatggtatttcccttcgcattattgatacggcgggtattcgccatacagaagatgtggtagaaaagattggtgtcaaaaaggcatatgataccatggaaaatgctgacctcatcctttatgtcgtggatgcatcaagaccattggatgaaaatgatattgccattatggaaaagatcaaagatctcaaagttattgtacttttaaataagacggatctggatccggtcgtggatgcggacgagatccataaatatctgtcacaggacattttgccgttttctgcaaagaatggtcagggattggattatctggagaaaatgatcacagatatgttctttacaggtcagatcatggacagtaatgaggtatttcttaccaatgccagacatattgcagcgctttctgatgcaaatgagagtttaaagcatgttgtggaaagtatctctatggatatgccggaagattttctgtcgatcgatcttatggatgcttatgaaagtctgggtattatcattggtgagtcggtagaggaagacttggtaaatgagatttttgcaaagttttgtaccggaaaatagaaagtgcccataattaggaaggaaaaattatgccagtaatagaagaaacatatgatgtcgttgttgtcggtgcgggtcatgccggatgtgaggcttctcttgccgcagcacgacttgggttaaataccatactttttacgatcagcatggatagtgtggctatgatgccttgcaatccaaatataggcggaagttctaagggacatctggtaagagagatcgatgctcttggcggacaaatgggtatcaacattgatcatacttttatccaatccaagatgctcaacaaatccaagggtccggcagttcattctctccgtgctcaggcggacaaggctgcctatagtatggagatgcgcaagactttgcaaaataccgaaaatcttaccctgcgtcaggcagaagtctgtgagatcatagtagaagacggaaagatcaccggggtaaagactttgtccggtgctatctatcattgtaaggcatgtgttctttgtaccggaacttatctgaaagcccgttgtctttatggtgatgtgatcgaacataccggaccgaatggtttaaaggctgctaatcatctgacggattctttggtggaaaatggtattgaaatgtaccgctttaagacaggtactccggcaagaatagatggttcgaccattgattacgacaaaatggaagaacagtttggagatgagaaagttgttccattttcctttaccacagacccggaggatgtgcagatagatcaggtgtcctgttatctgacttatacaaacgaaaagacacatgagatcattcgcgcaaatctagatcgttcgccaatgtattccggtgtgatcgagggcaccggtccgagatattgcccttccatcgaggacaaagtcgtaaaatttgctgataagaacaggcatcagttgtttgtggaaccggaaggcctcaataccaatgaaatgtatatcggtggtatgagttcttcactcccggaagatgtgcagtacgccatgtatcatacggttcctggattggagcacgcaaggatcgtccgcaatgcttatgccatagaatatgattgcatcaatgccaatcaactttatgccacacttgagtttaaaaagatcaaaggacttttcagtggcggacagttcaatggcagcagtggatatgaagaagctgcctgtcagggacttcttgccggtatcaatgcttctcttgaaattttaggaagagaacaggttgtattagatcgttccgaaagttatatcggtgttttgatcgatgaccttgtgacaaaggaaaaccatgagccatatcgtatgatgacatcccgtgcagagtatcgtctgcttttgcgccaggataatgcggatcttcgtttgactccgatcggtcataagatcggtctgatctctgatgagcgttttgcctgggtagaagaaaagcggcgtctgatcgagcaggagatcaagcgcgtgcatagtgttcatatcggtgccaatgaaaaagtacagacttttcttgaatcacagggaagcatacctttgaactgtggtgtgactttggcagatctgatccgcagaccggaactgaattatgaatgtctggcgccgattgatccggagaggcctcgcctccacccggaagtgagagagcaggtcaatattcatatcaaatatgaaggctatatcacaagacaacaaaaacaagtagagaactttaaaaagatcgagtcaaagaagataccggagaatattgattatgaagtcgttccgagtcttcgtattgaagcccgccagaagttggaggcattgcggccacttagtatagggcaggcttccagaatttccggtgtatcacctgcggatatttccgtacttttggtttatctggaaagttatgattataagaaagaacataatatagagtaaagattggaaaagtgtatgaattataatttaaatcgattttatcatggattgcaggaacttgacattaacttatcagaagatcagatcaagcaatttcttatttactatgaaatgctgatagaaaaaaataaggtcatgaatttgacggcaatcacggaatttgatgaggttgtggaaaaacatttcttagacagtttgtccttggttgaggttgcagatcttcataaatctcagaaagtacttgatcttggtacaggtgcaggttttcccggtattccgcttaagattgcttttcctgaacttgagatcacactcatggattccttgaacaagcgtattttgttcttgcaggatgtcatagatgaacttagtctggaaaatgttgaggcagtgcatggcagggcagaagaagcagcgcgcaacaagaattacagagagcagtttgatctatgcctatcgcgtgccgttgctaatatttcgactttgtcagaatattgtctaccatttgtaaaagtaggcggagtctttatctcttacaagtcatcaaatattgataaagaactggatcagggaaagaaaggtatttatcttttgggtggaaaagtttcggatgtgcacaaattttctttgccggattctgatctgcaaaggtcttttgtagtcattcaaaaagaaaagaagacaccaaaggcttatccgagaaaagcggggatgccttctaaggatccattacattaaagacataaaaatgggataagaggaaattcttatcccatttttattattccaagaaacgcatacgatcgtcttcctgacttttgaaatccggtgtaagttggatttttttattgttgtaattcatgaggcgcatacaatccggacagagtgttccgaaagaaaccggcttgccacaacgctggcatttggtgccgacgatctgtgtatctttttctacatattcgatacgcccctctttgatccagtttctcactttttttatggaaatctgaaaatgatctgctaccatatattcatttacaacattggatcgaatgtaatctttcacacgcataaagaggtcttcctcctgacaatgcggacagacgtcgccctcataatcagcggataataatttgtgacagattttgcattcctttgtattttctatcataagcatgtcccatcttgtgtaagtcaatcgtgttactttatgccagataattctgaatgatcttcaggcattgatccggtacttctaacattggaagtaattttgaattggaaatgtatgtgacatcgatcgcatgatttttctttacatattcttctgcgatgctgatggctttctttcggtctgtactttctatgatgtgaagattatctttgtctgtgatggctcttgtcacatccacgtttgtataagaacattttttgctggcatataaaaatctgccgttactcttatggatgtgtgcagactgataatacagatctgtaaatttcttgttgtcctgtagtgggcggctcagatactttttgtcaaagatagaacggatatgatcttcactgacataaaagttgtagagggctgttccgaccagtggtgcaaacaggatatttttgatcgccatctgtaaacggttagtctccatcttcatctgatggatgtcagacggattgatcaaaatgatctgatcgaaaagatcaggattcatttgatttgccatgatggcaatggatgaagcatctgcgctggtaatgacatttgtcttttcaccgatcatatcctggataaaggaggtcagcaactgcacatacaaaaaattcgtataagtaagtgatggcttgtctgatctgccgcatccgagaagatccagtgtgtatacggtgtgatccttttctaattttttcagaatcttggaccattcataaccggaactgatggtatctaaattgtggagcaagagtagaggagcgccctgaccctgtctggtgtaatagattcgaccatatttaaaatcataaaaatcaccctttgccgtagaacaaagatttttatcttttgcatgatagtcgatcgctgtgttggtcgcatagagagcagccgttgcagcaagcactgtttttaataaggaatgttttttacccatatttgatctccctaaattttctaatcctattattttttattatagtgtactttatgcgtcttatcaaatattttctgaaaacttttagaat

SEQ ID NO: 12606 - DNA, 3286 bp, Unknown
  gut microbiota DNA sequence
atcagatgaaaaaggttgtgtcgctcggttttattcttcattttgataaaacggcaaagcgtatagacaaagaggaataagagcatggatgcgatcaagccgtaacgtacatagtagagaacaccgccatccatattgacctgatacatgccaaggcgctcatccagagagatatgcacatttcccatccactccttgcccatttcaccgatcatacgctgcccgttttgaactgcatcggatgtgttgccatttgcacccgcaatattgccaactgcctctgacactttctgcgccgcctggtctaactcctgtccttcctcatttaaaatgatatgagtcgaagaccgcatccacatctgtggtacctcgatcagttcaaacagaggccacccgatcgaaacgacgcgggaaaagcgcatatgctggtattccatcataaagaggataaagaagaaaaagaaaagtgagatgccgacatactccatgcggtacgccgtcgtcaacgcctgagaattgtccgtttccaggatcatcagataagcacagttgacaatggaacaggcggcattggcaagcatgagataggttgcccccttactctgctccttttgtaagatcacaacgatactgaccaccggaataaagatgcccgccagttgcaaagtctttagacaggtcatcaactgctctgctgtcagtgtaaaaaaataaaagtcaaatgtctccatcttcccacctctttttgtcccaacaaattctatctctaatatacaaaaagcccccctgccaagacaagggggtatttgtgaaatttatttgtatttttccattgcttcttctaagctcatgccttctgcgatggcttccttacgcttggcatttacttcctgaatctctttcatgcgatctccggtcagagaatagcccttcatagcaatcagggtcactgcccacgcgatcattgggatcaggcagaagagaacgataacaacccagttcatgcccggtgcatatggcgtatctgcggtcggcagattggaaagtccgatcacacctacggcgatacctacgaccgttgcagccagggaagataccagtttatctaccagcgaaaacagagttcccatgattcctgggatgtatttgccggaacgatatgtctcatagtcggaacaatccgctaccatcgggatcggcatatcggcggttgcatagtaagcaccataacccacaccaaagcagatgataaagaggatcgtatatacgttgacgctcgggaataccagattcatgccatttgatggattccacaataagaggagtgccagtacgcccacatagcagacaagtgctacggatacataacggactaaggatgctttctgtcccttcttctgggaagtacggacggtcaaaaggaagaatggtacactcgctgcatagcctaagatcatcatcggcagatagaggctgtcataattgcccatcatacaaccataaagcatacacagaaccgttgtatttgtcgcaatagaaagcgcaagtttgcatccggctccggcgatcatcagacgctgcatcggcttgttgttcttgatgatctcgatgtactcggaaactttgactttttcctgtttttctccaccgacaccaaagtacttcggctgatccttttcccagataccgatcacggcaagcagggtcaaaacgattgagataacaacaccaattggtgttaatacacggtaaaagtctgcacttgagtaatccgcaacgttggcacgcaggatcggcgcaacgaactgcatcacacccataccgactaaagatcccaccgtattgaagatggtaaagagcggacgctgctttggatcgttagtaagtacggtctgtccggatctggtacaggaagtctggaaagtgtatccgataacccatacaaaatacaaaagtacaaagactacataacgcagcggcatcatatctgccggaatatacggcgttacgatataaagtaagatgatgctgactgccatgatcagatttccgatcaccataaatggacggaactttccgaacttgccattggtgcggtcgatcaatgcaccaatgatcggatcggtgatagcatcgcaaagacgcatggctgttaccataatagatgcaaacatcagtccaagtgcaagtacgttagaaccgaatgtcgcaatgtaggaaagtaccaatacatagtagacattggtagcaccattgttcagaggaaacagtaccaactgatacggctttgcgcggttcagtccacttgcttccacattttgtttttcactcatgaataaacctccttaaataaatatctgttctatacccagttcgcgctcttagaacgcttctttgaaagtttgtaatttgccggcgtgtctgtgcgtacaaaagttgccgtatcttccagatctcctgctaccacgcggatctcgttttctccgtctttcaaatcgatcttgcaggtaaagacatgatctgcctcttttgtcgcaaccagttctccgttgcagtagaattgcagactcggctggttggagtagactttgaccgtgatacggttctttttacggtctacaaagcgcttgctgcaaatgtggaccataggctctgcattccagtatgccttgtaaaggtagaaggaatccttcttggtctggcggtcaaaggtcaccagtcccttgtggttcatgcccggctcaccgccctgatctctggcatctgccgcgaaatcaaacatattccacacatgggttgcccaaagccatggaaatctggcaaagcagcgtaccatgtattcatgatatcttgcctgatattcctccgtgtgatctcctctgtgcggatgctcactgtggaggtttggcataccctctgcaccatactcagaatagcccagcacgcgcttcggatatctggtatggaagatggcaaagaaaatatcattcaagaacaagcccggcacataccatcccagatagagattgtaacttacaatatcggagatatgtacgaccttgccaaacggattgcacatagcatagcaggcaagtacggtctttcttgtcgcatccatgttatggcaaagatcattcaaaacatgatggttgtctaacatgtcctttttattcttggtagagatcgtgatctcattggaaagtccccaggtcacaatacaggtatgattgtaattctgtaagatcagttcacgcatctgtgtgatcgtattggcacgggctgatgg

SEQ ID NO: 12607 - DNA, 845 bp, Unknown
  gut microbiota DNA sequence
tgcgctttttcgacacataatgccacgattgtgtaaaaatgtcatattgcacaaattatgtccattaatttcatacataattactatgcgtcgtttatgccacatatgtctgtatttattacaaaattacttttttataagccaaagggacactccttatgacaaaagggacgctccttgtggcaaaaggaacgtcccagattttaatatcttatttactttttatcaacaattttagtgcttcttttgcatctgtcgacttctgcgaagttctgcaatcaaaagtgcaaatccaccaacaataatgagggcaagtaccacacatgataccggtgaagtttctcccgttaccggtgccttggcatttactgttgttttcggtgctgccggcgttccaccatttggctggacatttgtaatgcctgctgtcggagcagaaggtgttggtgttgtggcagagccagtatttccactattagaagatgctgtaactgaaaagtttgccgttgctgttccgccgattgattgaatagcaatcgtatggcttcccttagatagcgtatctaggaaagactgtttcagacgtacaatcgtactaccttccgacacgtcataattggacggatccactattacgccatcgaccaatacagctacaaattcgttgagtggcgcactagaacggaaggtaagtgcctccgccttgcctataacatgctgtccgttatctccatccttcattaccggcttttcaggagttggagctggcgttggattcggcgtcggttccggattcggtgttggttctggattcggtgttggtttcggattcggtgttggtttcg

SEQ ID NO: 12608 - DNA, 772 bp, Unknown
  gut microbiota DNA sequence
ggcggcaatgtaattgaagtatcagccgtaggcgttccatttacaatgataaccggtccccaaccatccaagacatatcttgccaccgtaatgccattttttgtaatcgttgggtaatcatcttgaatatagtggtcatcgtctgcggtataatataccggctccattgctcccaacaaattggtctgctgttctgcgccatgatattgataacgcgttaatccttctcctgcaatgagcgtcacactatacgtctttggttttgcttctccacaatagatacatttatcacccgtaccataatcgtggcgacacagttggtaatatgtcttgttcagctgtggagttccaatatttacatttgtacacccctgaaacatatctgtgttccaattttgtcccaatactgtagcatttggtaatgtccatgctatcgtgtgaccactatcctttgtactcgtcatggacaaactcttacaatccttaaacatacatctataacaatctagcgctaattttgtagctggcaaatttgggatttgttgtagcgatgtacatccctgaaacatgccaaaatagcactgccgttgcaatgtcgttgctggcagttctggagcttttgttagggatatacaatcttgaaacatattagagtaacacccgtcatccagagttgttgccggtaacttgtctggtcctgttttcatattcgtgcatccattaaacatactcaaataagcattatatcccagcgttgtcgctggtaattccg

SEQ ID NO: 12609 - DNA, 15438 bp, Unknown
  gut microbiota DNA sequence
attggcagtgacgcagatattctgatctgcacaaagtcggatcttgtggcacgggatattgatctgctgaagaagcttggacgagtaaccgtttcatggtcaatcaacacactggatgaaaatttcaagaacgatatggactctgcttctagcattgagtgccgcatcgctgctatgaagcaggtatatgaagcaggtatccgtacagtctgtttcgtatccccggtattccccggtatcacggattttgaagcaatctttgagcgggtaaaggatcagtgcgatctgttctggctcgaaaatctcaatcttcgaggcggtttcaaaaagacaattatggattatatcgccgaaaaatattctgatcttgtaccgctttacgatgagatctataacaagcataaccgcagctattttgaagcgcttgaagtaaaagctgcggaaatggctaagaagtatgattgtccctttgtggataatgaaatgccttatggcagagtcccgcagggacatccggtgatcgtagattatttttatcatgaggaaatccgagggacagagaatacaggaaaaagaaatcgttaacttccagtttgtaaacctcaatagaatagcagtttattagcatcggtcggagaaatctgataggtgctttctttatgctcggcaaaaatgccgggcaatttttatacccattttgcagagaggagaagcctatggcgggaagtagaatcaagggtatcactgtcgagatcggcagcgataccaccaaactacagacagccttaaagggtgtaaattcagaaatcaagaatacgcagaaccagctcaaggatgtcgaaaagttcctgaaactaggtccaggcaacaccgagctgctggtgaaagcctgaagtctgcaggcgataaggtttcctccgccggtgaaaagttccttcctgcctctgctgcagttacagttcttggcgttgctgctgtaaaaacagcatccgatttcgattcttctatgagccaggtagccgccgtgtccggtgcaaccggagaggatttcgacaagctccgcgcaaaggctcgtgagatgggtgcgaagaccaagttctctgcatccgaggctgcggatgccatgaactatatggcgatggccggatggaaaacctccgacatgctggatggtatcgaaggtatcatgaaccttgctgcggcatctggtgagggccttgccaccacatcggataattctgttagccacggccgatacctccttccgtaaaaatgggcataaaaaaagcaccaaccatttctgattgatgctttcaaattactttgtttttgtaaatctgtttaattgcgtatctacatctcttccaccgtacataacacggataatcgtaaccacttgtgtatcatcatccggaatatatagaacaagataattgtctactggcgctacgcgtagccctcgacttttccatggttgcaattcatattgtcgatatctcttcggcatatgatcaagatccataatacatgcttcaagcctatcaagttgaccacttgcattttctggtgcctgcagttcaaaagcaatgtattcgaagattccacgaaggtctatctcggcctgatctgaaatctcgatatcataaatcataaactgtaatcattgcggatatcagcaaaaacagattttgctgatctagtacgaccagcctgcatatccgcatatcctttctctagttctgcattcatctgtgcttctgataatgcactaacgtctacaggacgagtggatggcattttcacttcaaaaggaagccctctttgaagaataatttgtttgtaaaacatatttattgcattggatgcaggaattcctaatgctgctaagattccttctgcctgttcttttacatcaggctctatgcgtgcgtataaatttgctgattttgttgccatagtaaacactcctttcgagttttttctaactatattatatccatttgtcctgacaaaagcaatacaaaatcaatattttacaaattgttcatactccaaaatctaccagttgattaaaaagagctctacaataagaattatcgttaatgacgtgcagcggccggaaacttctccagccgctgtttttctcacttttcttatcgttataaagtgaaccccagggttcacttttgacatcaagactactgtctccacatggctcggttgttcaacgaaaaacatactcaccccctattgtacaaggaaatggtggaacgcaccttttcccttaaaatctagggtttcgagcctgcgataaccttgaattgtcctataatttgtataggcaaacagggtaaagttctgttccttaaacttcatttttcatgtcatccctgcaaacttgaatttgacttaatatccatggtcaacatgctgccactttccgccatctgttctaactaaaatccacttccaatcactgtatgtactatttggattcaaagatccgtttccaccagatgaatcaacatcgaatgaagataataaaacaatgacttcatctgcattgtttctgtctgcccaatctttatgatctttcgtgcagtcatctccggcatagtaaatttctgtgagagtgcatcctttccagtcactcttaaactccttttttattgtgtcaatagcggctttaatatcctcttctgaatagctctctgattcaacattatgagtttttacttcactgacatctccaccacaagcactcaaaccaaataaaagcataatacatagcattgtacatacgattttcttcatacaagacctccttaaatttcgacttgtcaatttcattaaatatgaattttatctttctccaggggatacaaatatgtaatcggattctgtgccgactgatttaacttcaatccggctatcgactttccaatgtagaatgattcattctcatcaagtggaagcccctgttcatatcttacatccacgaagaataatctattttcagttttcggtgtaagaacaatatcctgtcttggaagtctgtcctttgcctctttgcaaacataccactctgatggcttatacacggccacaatcaaagagttgtaaacaccgaaaacatactcaatagttttaaccttctcctttgatgctctccaaacacctcgaacagcatcatataataccttctcatccatacctctctggtagagtctatttattttgatgacaaggattttatgcctgatgtctttttcttcaagttcaacagcaccattgattctttcatactcatcaactgataatgcctctgctgaatgatgcccggcaacaatgtttgtaagtcccgcatcactaacatagttgaaagcattaatcagtgaagcctctgcagcaaatgcctcttcttcagttaagtttgaatttataattatcttttcaacatcaagtccggcgttcttaatatctgcgatagttttcagtttcaacttctcgctatcaggactgcccaggctctctttttcatgttcaaatactctgtttttagtgccttttccaatatagaagattcgcttactgcggggatctatgagtccatacacataataatctccaagtgaaagcaggctcttctctgaaaatttatccatgcatttctcctagtgtgcagtctttatttctttgttcgtatccaaatcaaagccgacctgccaaaatcccatatcaatcatcttcatctgtggatacggcataccttcaacttccattttctctctaactggttcaagtcgagcagaatttttttcgtaaaaatcgacaagctgcataatggatttcaagttgtaattaccggttgcgaccttctgatttttaatgcccgatataaaatatctatcgtatgcaggaacgcaaccaagagttcccataagtattttagtgattagtgtaaaggacaattgattttttaattcttgctcttttacttctcgtctgattttatcgtaatactgccctaaaaacgaatttatatctagaagtaattgttgattgctttttcccctaaagctaacacacttaattccagccagcacatcatacttctcacttaacagttctttcactaaccttactttaaactattacgcaacgtcaatagaatatttaaaattttttattctatttaagattttccacatattcttccaagcacaatccactctgatgaatctcctctgctgcttcttttcccacatagcgataatgccacggttcattagcaactcctgtaatgcttgtctttccggacggatatctttgaataaatccgtatttgtatgaattctccagtaaccagttataaacatcatcacgagaacatttagaagtatctgcattgatatctaccgcaagtccaagctgatgctcgcttgtccccggtaatgctacccattccattgctgtttcctctgccatgtgttttgtataaccttcacttcgatatgaggctatcttgtcatctaaaatctgttgctgctcctctgctgttctgtaaccatctctaacaaacggatatacacctgcatttctcgcatcatcaaacatttcctgcaagtatggatagattcttgaatctattttctgaccattactcaattccatgagatccatttcataatcatctggaatataattatcccgatttaccaacaccaattcccatccatacttatcacttgcaatgggatgttcttcctgttttatagttccaaaaccttgtaacttttccagtagcccgaccgcatcattggttacaaatgtatgtcctacatgaataagaaagaaaagaacaaacaacagagttatctttttcagaaaactctttttccttttcatctacttaatctccgttttatgatagacatgatacataagcggaaccatcaaaatacttaggattggataaatgaccagcatgattggtatcgagccgacaatcttaccgccaatatgatataaatcaaatgtattgataatctcattgatctgtagcaagcggtctgggaacacacccaatattcccgataagaaatcgaaatttgatacaaacagtggtaaaaacaggattgcaaaaggtattgtaaccgcaacaactgctgtatgcgtctttgctgacacaagcatagacagaaacaggcaaaatacggttccaatatatccggcaactaccgtgagcaaatacaactgcatataggtgatattgtaaaaagatttccaatgccagaagcctgtctgtatcatgacatttccaccttgcgatccaagacatcccaataccacaagtgaatacagcgatattacaataaagtaaataactgataccacgataaatcctgccatgatctttgctctcgttcccctatcccttccgtattttgttgagaaaaatatggaatctgatttccaactaaattcattggaaaagatacctgacaccaagaatgctgacacaagcataatgagcataataatcgtctgcgcgtaactcagtgctgatttccagccatcgtagtcctcatagtataaaggtgctttcatctcacggtactgctctatcaaaaatgctttctcgttttcatcgaataaaccatcagcatcttcggagttcaaccatttttccaaactctttccacggttctcatagatctgtcccacttcttctttcgataaggaatcaatacgataataattaaagtctctaaattcgcaaaatcccatattgatcatgtccttgatttctgaaaacccttgtaccttggaatcatgcaataagttagcagaatcatctccagggcgaatgggatattcttcactaatctttttatattcatccaggaccgcttgtaatgctgcttcatctaaaacacctttccacttctgcttttcttcccgcagactctttgctgctgcgattcctgtatgagatttgccctgctcatccaaaaaactgacattcgtgattgcgaaatagcaggatatcaaaagtgaaaataacaacacgaccaatgatactttactgaggctcttagaaaagattttcttaatctcatatctaatcattccatctcaccacccttttcaccgaaataatataagaacacatcctccaatgtcggctccaccacagatgctccagcaatcggtggctcaccggcaataatacgcaattccaccattcccctttccgatttcatattagacaccttaaattttttcatcatcttcgttgcatctgcctgtgatacttcacacgcatataccttttcctgcatagaagcaagtgtctgatcaaggtttccctgctgcatgatttgtccatccttcatcagccagatttcattggcaatatactctacatctgaaacaatatgcgtcgataaaataacaatccgatcctctgagagttcactaatcaggttcctaaaacgcaccctttccgtcggatcaagtccagccgtaggctcatccaaaataagaattttgggattgtttagcattgcctgtgcaattcctgctctacgtttcattccaccggacagcttcttcatcttcttatttgctgactttgtaagtccaacctgtgcaagcaagtcctttacccgtttaccagcaaccataggtcgaataccctttaagctggcaatatacagtaaatagtcttttactgtgaaatccggatagaatccgaactcctgaggtaagtatccaagcaaatttcgatattctccatccattttgaaaatatcctttccatcgcacagaatctgtccgcttgtcggtggcaaaagggtacagatcattcgcataagcgttgtcttgcctgcaccattcacacctaaaagtccatatactccattctctatcgtcaggtttaagttctctactgcccgaaagtccccaaactttcttgtaacattaaccatttgtaatttcatatagatttccctccatcgtcgaacataagcggttgcagtcatgtattgccttatacacagcaccaatcaggaaacagcttgctaatccaaataagatactccatacaggaaatgtaatcttagcataaataaaatcattcattgtaaccatccaccagatcacactccacaaaaagcaaccgaacatggatgctgcctcattcaaagcgctactgtttaacatggcaaagcagattccagcagcaacgaccattgggaacaaaaactgcaccaaaatatccataaactgcattctcatacccacacagcaaacgaacataaatagcgttatcataaatacatccgccactcctatcaaaaatactcgtgcggaatagatctgtctgagggaatataggcacgctgcctcaatctgtaaggaatcactttctttgtttctccaaaattccggaatgatcataacgataaaaaggacagaggaagttcccagtgttctcatcaaatattcgctatcatccagataattcatgagaaaaaatgtcactatcagtaatgctgcctgcaacatccaccatctctttcgaatcagccgaaattgagaaaacaaaaactctccatagctcatcgtatgttcagactgaacttccatcataacttccttcgatttttgaatcgtttccagaatcttttcttctcttggaataacttttgtttccgttttatagttttgtatcatcttttccaaattcatcagagtcctcctctcccaaaagtttttttaattcttcttttgcccttttatgtcggtacttaaccagcggcaagccaatttgtaagatatcagctacctcttttagcttacagtctccaaaataaattaacagtatcacttctcttaactctggggctaacctgccaagtgcctgttccacatccattcgtttttctttcctatgaataccgccatccgaaaccagctctctttccaatatttcctgctctacactctctgccttccatttctttgcgtagttcttacataaattacctgctatcacatacagataattctttgctttcccaatatgctgataagatgcaatattttccataaatcgaaggaaggtttcctgtgtgagatcttctgcttctgcctgatccaaacaatgatatctgcaataggatagaatttctgcataatatttccgtacaaatttatcaaaagccttttcgttgccctgtttcatttgtaggattaaaagaaaatcattcaagttgccctcctttcccatttcagtaatgtataaacgtttattccattctaatatgtataacaactgactacacaaaaaagatagtctatgttttagatttctcaaaaaaagacaccaaccctctatggttgatgtcctatcaatagcatttgtactcctatatcatctgaaaatgtctcaatgcatcctcaattgccttctccttctcagccgggcactttggctgcctagcatcttcactcttcggaagattgaaattctccctcatatcaagtccatgctttgcctttacctgcgcaatatacagacttgataccttgtatccggtctgttccttcacatagtccttaatcgcttcgtatgtggctcccttcttaaatctggacatatccatatctgcgagagacatttcaacctttactttctgagagtcgattatacccttggaaagcaagcacaccgtctcattttgtgtatcattgtccaaacttagggtaaactctttttctataatcggcaacttaaattctatggatttcagccactgaccattttctttgcgttcttcgtaaatctgtacattatccactaactgtgacaggaactctcgtttctcagcttcgttcatttgggcatacaacttatcaaagaaaatgagtgccttgtagatattgtctccggtaatcttgtctgccagcagagcgcgtttctgagtttttgcagatataagcaattcctctgcttcttctattttatcataagtcttgtacaaacggttctctaaatctgtttttcttcgctgataatgtttatcctcataatcaagaaaatcaatatctgacaagatcgtatctttattatgatatagatgtcttaattgtttttcgtaatttgctatttcctgatctaatgcgcttgtgtctacttccatatttatcttgctacgtattaaatccgaaaatttaggattgctaaccagtttactgatcacctctgcaacagaagcatccagcatttcttcatgcacctgttttttataaccgcatttatgacctctggtcatattccggtgtttacagccatctgccgcatttcttccaaatctggaaagcttaaatacaaggacataagacacttcatcttttcctgatttgatatcgtccatcatctgattaaatgcaattcttccctctattgacttaccggattttcctgcatcctcatactccccggcaatttcatactcattataatcacaaaaggctttcatttttgttttctgtgcatctagagaatatccgtctatctgcatggttgtagaaacacgggtgtaaagatacacttttatcttttctttagacattcttatcacctcttaacgtcattttcgcagtcaaagcatggctactaattatacctgtttatctggcaatgaaagtaatctgtctattaccggatgaatgattgctgtctctgtaatctgattgatggcacaaagtttcttccctgcatccttactggatgctccacaatgataaaccagttctgtcttttccccataatcaagtataattaacctgtcgtgacaatcaggattcggcttaatccgaatcgttggatattcattttgaaaatccgtcactaaagagttcgtaagaaatcctctcccaccttttccattctctgtgaataaaacaacttccacgccatctgctttctgtgaaaggtgttgtaatgattttgcattcatataatcatccacaacatagattgatttatttgcctgttggtagatttctatgtatgcaatgtcagcttctaacttctggcctttataaataacaaaatcctttttatccttatcagtaataaagttatctgctaaaatagtcacatctttttgaatgaactctacccttttctccattcgatcctgtctctcagttatcgttccaaccttcgctgttaaaagttccatttcatttctagtaacaaactgttgattttgactaatatagtgacgcatctccctaaaagtgcgcattataaatatactctgctgttctgccaattctccacgaagaactgtcgcaagcatataaattccttgttctgtaaatgcgtatggtagttttctacgacctccttcctgcccttcaaaataatttatattccgtgaagtcacaaattgtgatttcaccaattccacttcttctttagttagttgaaacataaaatcttctggaaatcttgtcaaattacgttttacttgttgatttaaatttttaacttgataaccataaatttctgccaaatcctgatccaacattacttgctgtccacgaagtatgtacaccttactccgaatagcatctgtaataatcaattcttttgtttcttccattactcctccacaatgctttccatttgctccagtttctgcaatgccttcatatatgccatcaatcttttatactgttcatctccaaggctatgaatctgctttaatatcttaatatccgacctggtaacttcataatccatatctgcatctttatactccggatcaattccttttcccgttaaaagctgttccggtgtaatatccaatgcgtcacatatggataataaacagtctgcttttggatttgtctttttctttttccagtcactgatgttgcttgttgcaatcccggttcttctcgacagttccaactggctcatgttcttctgctccattatgtaaaaaattctttcactgataatcatgtgtgttcctccgttatattttatatccgtatttatcgtttttatttccgtttatacggtcattctatcatgctgcagcatttctttcaatagaaatgataatacttctgaatttctcaatattttctgttttatataattccatgtacaacgtaagcgccaaatcgggcgcttacaattgaaaaaggcactcctaatggaatgccctaatataaaaaatagggacactcttttgaaatatccctatgttctatcaatatatctgatagttctctatttactttcatattcagaattctttgtgttcccacaaccaatgtctaacgcaacaacaacggttactttcttcgcaaggcccttttctttgtgattttcaccaattttgtcgaaactgaaaaactccacaaaatgcgtaaatttaaggatttctacatatttttccttgacatcaagactaccgtctccacatgcggcgtgccggcaaacatgtcgcaacagcagatccgcttgacctgatatccgctcgcctgtaagacttccaaatctcttgcgaggctggtcggcttgcaggaaatatagatcatggagtccacgccataggcaatgatcttgtccagtgccttgggatggataccatctcttggtggatcaagcacaatgtaatccggtttctcctcgatctcatcgatcacctttaagacatcacctgcaataaaatcacagtttgtcagaccattttccagagcatttttctttgctgcctcaacggcctcctccacaatttcaacaccgatcacatgccctgacactggtgccaaaatctgggcaatcgttcctgtgccagagtagagatcataaacggtctttccttccagaatatctgcgttttctgcagtaataaaatctcgcgccgtctcgtataatttttcagccccaagtgaatttgtctgaaaaaatgaaaacgatgtaatacggaaacgaagccccaacaactcctcataaaaatatgcctgtccaaacaatacccttgttccctgatcctctactacatccgcagggcgatcgttacgtgtatgtaatacgcctgtaagttttccatcataggaaacttcctgtaagcgcttgctccatccctgtaaaagttctgactcaagtgcctctaacgcatctgccataagtggctctgcctgcacctctgttgccggttctgttgcatccttctgcaaaaaacgtgcatccgaacttgtcacaagatccactaaaatctctcctgtttttgccgccttgcgcaccaaaagatgacgcagataaccttcatggcgcatcttgtgatagtaattggctcctcgttcctgaaaatatgccagtgtctccatcagtacacaacgcatatcttcatcgatgatctgacaaccatccacggtcacaatatcataaaaactaccacgcttatgcatccccagtgaaagcggtccgttaaaataagcatcgccaaaagagaattccatcttattacgatacgcaaactgatttgggctcggtatcacaccttcaaataagtcatcaaaactgctctccggcaaaacaggttctaataaacgcttaatctgtctgccttttaatgcaacttgttcttcgtaaggaagcgtctgataagaacatcctccacattggtcgaaatgtttgcaagcaggtacatccatctccaatggtgattttttgacaacttctaacagtcttccttccgcttttccttttcttgttttctttattacacaaagaatgcgttgtccctcaagcacattcttgacggtgatcagatcaccgtcatccgtctgcacgattcccttattggggaaatccacccgagtaacaacgccttctacctgttgaccttttttcactctattactcttcctctaaatcctctacatcttctgcatcatcttcaaaaagatcttcatcgtcatcccaatcatcaaaatcatccatgaattcatcttcatagtccttcttgaaataacgatagatcgcataggcaaccccagccactgcggcgatcacaccaaccacacaggcaacctttttccagttgatggtatgcttttcttttaccacgatctccttgtccttaagaccattgatcatgtttgtcaactttgtcatatcgatcaattccattacatcttcttttttcatcataaggcttctcctcctgctatgaatgtgtcaactatatttgctcatagtatagcatttattctgcccaattaccacagaaaaacacttacactttttgtaattttgcaaaggatgcaaacatttttttacgtcctgctccgtcaaactcgaccgtcacctcaaaatcacgaccgccatcgttgatctgtactacggttccctcgccaaatttgacatgtttcacgcggtctccctcgccataatccagcgaatttttctggatctttgtgccaaaatccttggctgcctgataggtctgcgccgccagcggtgtttttttcatattgcgcattttttgccggttgctcatcgggcgctcactaaagaaatcatcctttggctttggttcccaggtatttccctggatcaaatcttccgggatttcctttacaaatcgcgaaatgccatgatactgcgtttcgccacgcatcatacgcatccgcgccccggtaatggtcagacgctcctttgctctggtgatacccacataacaaagccgtctttcctcctcgatctcctcgtcgctattatccgccgtgatgctcatataggacgggaaaagaccatcctccatgccggaaagatagacattcgggaactccaatcccttggcactgtgcagtgtcataaggaccacataagatccgtcgtcatccagagagtcgatatccgcaaccagagccacttcctctaaaaatccactcagggtcggctcatctgtctcctgctcataggacaccaccttggtgatcaattcgtcgatattttcgatacgcgcctgtgcctcgtccgtgccttccactttcagttcctcgacatagccggtctctgttatgatctcctgtaaaagtgctgacagcccctcattggcacacaccctacgaaaatgatgaattaagtctacaaaaggtgcgatctttcctgcggcacgtcctaaagtcgggatctcctccgcccgctcaagcgcctcaaaaagattgagtcccatccgataggcataatcgctcgccttgccgatgctggtcgccccaatgccacgctttggcacattgatgatacgctggactgccagatcatcctgcgcattatcgaccaccttcatataactcaaaagatccttgacctcgcgtctggcatagaaattaaccccgccaacgatcttgtaagggatgcccgacatgatgagtttttcttccagcatacgggactgtccgttggtacgataaaggatcgcacaatccccatactggtattcactgcggcgcacgcgggctgcaatatctctcgcgataaaatctgcttcctcataggcactgtcaaactgctggaaatagatcttttctccatccccggactctgtccagagccgcttttctttacgcccccgattgttggcgatcacgccgtttgccgcatttaagatatttgctgtcgaccgataattctgctccagtttgatgacagtcgcattgggataatgtttttcaaaatttaaaatattgtaaatatttgccccacggaacttgtaaatggactggtcatcatcaccaacaacgcagagattttccctgccggatgctaaaagccgcaccaactcaaactgcgccgtattggtatcctggtattcatccaccataatatattgaaacttttcctgataaaaattgcgcacttctgtgtcaaatttcaaaagttccaccgtcttcatgatcagatcatcaaaatccatggcattgtttgcctttagtctcgcctgatattcacgataaacctgtgcctgtctggtcttattgaaatcgccgatcgcattttgtgcaaattcctccggtgagatcaattcattcttggcagaagaaatgacattcaaaaatgttttttccttatacatcttcgtgtcgatctccagacgtttgcatatatccttcatcagggtcttggaatcatccgtatcataaatggtaaatgaattatcatagccaagacgatccgcgaaccgacgtaggatccgtacacaagaagaatggaaagtcgatacccagatactctccgatcccatgccgatcatggaatcaatacgctcacgcatctcgcccgctgccttgttggtaaaagtgatcgccataatatgatatggtgcgacacctttt

SEQ ID NO: 12610 - DNA, 27525 bp, Unknown
  gut microbiota DNA sequence
aattagcaccggtccttctgtagtaaaaacgcccagtttctgctgttcatttaacgaatcgtatgtattcatgccatttctcctataataattttttgcaacacctgttgcaaagtttccgattttccttgatttttcaacattctttagcattataccataagtcagtcccagattcactccccacttttttaccatcattttttataaattaggatttcaaattttggtgacttttttgtcgataaacctgttgttgcaaaagagtttccattctacaatatgtgtatagggtttttattgaaacatgatcgccgtccgtaagtcagcgatcatcacatttcatgtaagggggttaatcatgaaaagatttacaaaagtcagacgtattctggcactgtcactcgttcttgccatggcattcggcggcacggtattcgcttccgattccaacacggcactcgttaatgccacctatcagcagttggcatcccgtggtacttacacctacaccaatgcatccgaactttcccgtttcgtgcagttgggttatgcatgtaaccagccacagcatcagggacctttctccatcacacagggcactttgacaacaaagaaatggcttggcaaaaagtcatccaaggcagtctatgtcatcgccttatccggtacggatactgatgtcaaaaatcagtccaccggttactggacggatcttctggtcggctttgagcaggacaacaaatatatccagaatgtcagaaacgctatcgtttccaacgttccaaaggggtccaaccttgtcgttaccggacacagtttaggcggtatggtcgcacagcaggttgctgcggacagcaccatcaaaaagaactacaatgtcttaaacaccgtgacctttggttctcctttgatcaacggtttccagagagaaggcaccgtaaaacgtctgggtgacacatccgatccggtaccatatctcagtttgacgacctttaccaatatcgtttggcagtctgccggactcaataaggagagcggcaactacggcaccaacctgcttggtgcacattgcgaaagttacaatcgtgccgatgtctggggcgcatatgacgtaacaggcaccaagaacggtggggctacactgacactgaatatggcaacgacccgtttctattattcaccggttaccgtcaataattagtcactatttttaacctaagatatgtatgataaaataagcccggaggtcatatgatctccgggcttatgcattgcctgatttatgatttatcctttttctccttcgcctgatcggctgccgcttttctctgctgactgttaaaatcgatcaaagtctcgatcatcatctttttgatatagacatcaaaactcagcatacagataaaaccaaagttacgcaagaactcctgatcttcctccggcgcatcggaaaaagcattttgcatggcattatatttggcgatcacatccttgatcaatgccttggactgtccattgccctgcgccaccagttcttcgtacaattcataaaaagacagttctgactccgtgccaaagtatttgtctgtgatcggctccaagagggtctggatatccttgatcgacagaaaactcttgagatagtagatcaggatcagcgtcaacacatgatccttggaatacttcttcttgtccggtgacggcaagacatgattcttggtgtaattgttgatcatggtcttggtcaggatcttttcatcctcatcacgctttaaggacgacaactgcgactcgataaaggtcgtgacctgatcgacatatagatcgatgttgggtatgtcttccgggtgcacataatcaagttctgagaactgcttcaatatcaaattcagcgattttcgcatttctgactgcatcttttactctcctgcttcttccagacggcgcaacaccatatcgtaaccgtcattgccataattgagggcacggttcacgcggctgatcgtcgctgtagatgcccctgtctgctcagcaatgtccagataggtcttttcctgacgaagcattgccgcaacagaaaaacgctggcacaaagataccatttcattgaccgtacataaatcctcaaagaactgatatgcttcttccttgtctttcaaaagaaggataccttccaaaaggcggtccatctcttcactgcgaatttttttgctcatagtctttccccatgctttctataaaataataacacctctgctcttggcataatcgatatcttcctgtggccatacagatacctgtacctcgccgatgtgtgccttgcgcaggaagaacatacagatacgggactgtccgatacctccaccaatggtataaggcagttttttctcgtatacggctttctggaaaggcaattccaggcgctctttgcagccagccaattccaactggctgacgagcgaatcctcatccacacggatacccatagaggataattccagtgcaatatccgtcatcggatagtagaccagaatgtcgccgtttaaggaccagtcatcataatccggcgcacgtccatcatgcttttccccggatgccagtttgccaccgatctgtgagataaagaccgcaccatgcagtttgcagatcttgtactctctctcctttggcgtattgtccggatacatatcctccagttcctgcgaagtgataaagaagatctgttccggcaaaatgcattctatgtaatcatatttgtttgccatgtacttttccgtcacgcggagagcatcatatacagacttaacaacgctttgcaaagtttgtacattgcgctggtctttggtgatgatcttttcccaatcccactgatcgacatagatggaatggatattgtcggtatcctcatcacgacggatggcgttcatatccgtatataagccttcccctacagaaaagccataacgccccagtgccattctcttccattttgccaaagaatgtacgacctcgacctcgcggtcatcctgctccttgataccaaaggcaaccggacgctccacaccatttaagttgtcattcagaccggattccggtgtgacaaaaagcggtgcagatacacgatgcaggttgagttctgccgtgatctgtctctgaaagaaatccttgacctctttgattgcgatctgtgtctcttttaaattcagagccggcacataatcctccgggatatacattttgctcatttctatcttccttcccttccacaattcaaactgtgcacacgctttcgcatatgcacagtcactgccaaaattatagatcgcagtttcctacggttcttgggaacgggatcacgtcacggatgttgcccattccggtcagatacataacgcatctctcaaatccaagaccaaatccggcatgacgtgcggatccatacttacgaagatccagatagaactcataatcttcttccttcagaccacactcagccatacggttctttaagacctcataatcatcttctctctggctgccgccgatgatctcgccgatacccggtaccagacaatccatggcagcaacagtcttgccgtcctcatttaatttcatataaaaggccttgatctcctttggataatcggtcacaaagaccggacgcttgaagatcttttcggtcagataacgttcatgctctgtctgcaagtcgcatccccaatataccttatagtcaaattcatcgttgtgcttttccaattctgtaatcgcatctgtataagtgatgcgtccaaaatcagaattaaccacatgctccagacgctcgatcagtcccttgtcaacgaactggttgaagaaagccatctcttccggtgcatgctccagcacataagagatcacatattttaacatgctctcagcaagcatcatatcgtctgtcagatctgcaaaagcgatctccggctcgatcatccagaactctgctgcatgacgggtcgtgttggaattctccgctctgaaagtcggtccaaaagtatagatattcttaaatgccatggcataagtctcaccatttaactgtccactcacagtaaggttggtcggcttaccaaagaaatcctgtgaataatccaccttgccatccttagtcggcacattgcttagatccatagtggtgacctggaacatctcgcctgcgccctcacagtcactaccggtaatgagtggtgtgtgcacatagacaaaatctctctcctggaaaaacttgtggatagcatatgctgtcagagaacgcacacgaaaaactgcctgaaaagtattggttctcgggcgtaaatggctgatggttctcaaatactcaaaagaatgacgctttttctgcaatggataatccggtgtagactcgccctcgatcacgacttcatcggcatggatctcaaatggctgcttcatctccggtgtaaccttaacctgaccagtcacgatcacggctgcacctacattcaacttgcagatggtctcaaagttgtctaatttatctgcgtaaaccacctgcacaggctcaaagaaagtaccgtcatttacgaccatgaatccaaatgtctttgaatcacggatactgcgaacccatcctccaatggtgacgaccttgccatcataatctttgtagttatgatgtaaatctctaatgttgatcattttcctaattcctccaaaatctatcgtacaaaactattccttattttacctcactaaagtgtgaaaatcaaggtgttgcacgacttctttttttcgatataataagaagtgctcacaaatttggaaaggaatgcattatgaataaaaaagaagttgcagagatcaaacgtcggttaaaaaaagaaagttgcaccattcagcacatgtgcggctgctatgtcgatgctgaaaagaataaattagtcaccttttcccagaaattcttaaatctggaggaggacgagttctacaaatacttggagatcgccggaaaagcactctccggtacccttggaaataatcttttggaactcgagtttccgatcgatgaggaagccgttggcggcaggcagcagatcctgatggctctgcgtgccagcaagttagaggatgatgacctgctcgacacctattatgatcttattattgattcttatgattatgtcggcaattatctcatcaccttatattatgatgtctatgatgttcctctcaagggaacggatgaactggcaatggacgagtcggacgaagtctacgaatacctgctttgctgtatctgtccggtcgctctgtcaaagccggggctgggctatttggaaggcgagcaccgcatcggtgccagaatccgggactgggttgttggtcctacggataccgcttttctttttccagcctttaacggacgtgccacagatatccactctaccttagtttataccaaaaatgccaaggaaccgcatgcggaattctgggcaaacggacttggctgcgggacaaaacgcactgcgacccagaagcgcgatgcctttgaaaacatggtcgtacagaccttggggccggatgacgaagagaccaaggacaccgtccttgatgtgcagcaaaatctgaacgattttatcttagtagaaaaagaaaaagtcgataaggatgaaccgatccttctggatggggagatgatcacagagatcctgaccgatgccggcatttccgagccaaaggcagaaaagatcacggcttcctatgagtctttctttgaggacaccctgccggacgcgcaggaactcttggacgccaaggcgatcaagaacaacgaagtccgcgttgagaaaaaacaattacaggaaaaagtcgtagatcttaccaagaaattagaagatgccggtgtcatcacatctgacggcaccgacattgatgttgtcgtaaaggtcacaccggagaaagtcgaagaaatacatacggctttcgtcgatggcaagcgctgcctcgtcattcctatgaaagaggatgaggaagccaagatcaacggcgagaccatgagtttttaatcatccaacaaaaatacccgcaggaagccggctgtctcatagacacgcttccctgcgccaagaccaacagcctctatctgacaggatgcaggcagttggtcttttgtttttacggctgctgctatggctgcccctgtcggcgtgaccagttctcctgccacttgtgtcatgtgcagacgaagtcctccggctgccgcaatattgacaactgccggaaccgggatcggtaagatcccatgctgacagcgtaccgtgccgcagccctccgtgatctcttttacgatgcagtccttcactgcgtatttccggcataaagcgtcaaagcaaatggcaaaggctgcaatatccacgatggagtccacagcccccacttcatgaaaatgcacctggttacgcgcgatgccatgtgcttttgcctccgcatctgtcaaaatatctaaaatgcagtgagcggtctcttttgcacctgtcgtcatggcagatgcatcaaagatggctgcgatctctttaggtccgcggtgcgtatggtgttcatgggcagtatttttttcctgcagatgtccatacagatatgccatgtcgtgatcgtgggtatccagatcttttggcagaattacatcaaaatcgcaggtatccaagcccgactttttgacccggctgatcctgatctcatatgcttccgtgattggaagcgtcgcaagtgtctcttgcagttgtgcctccggtgcacccagatctatcagtgccgccactgccatatccccgctgataccacttgcgcactcaaaatataactgctttcccattctatgtctccttttttctgtcctattttgccaaatgattgatctggttagcaatatagcctgccccatatccattatcaatattgacgaccgcgatcccgttggcacaggaggtcatcatagtaagcagtgccgacagcccttccatacaggcaccataaccgaccgaggtcggcacggcaatgaccggcttgtctacaagtccgcccaaaacgctggcaagcgccccttccatgcccgctaccgcgatcacacaatttgctgactgtatgaggtccaaccgggaaaataatctgtggatgccgctgactccgacatcatagatacgctcgacatgggaaccgaaatattctgccgtctgcgccgcttcctccgctaccgggatatctgccgtccccgctgtgcataccgctatgctgccaatgtgcgttttgtcctctttttcaatctttatgatgtgagacttgtaatcataggaaacctgaggaaacttttcccggatcagggcatactggtgctcatttgcccgcgtaccaaagacttcgccatccgcttcatacaagtgtgaaaaaatggaaagcagatgatcgtctgccttcccctggcaaaagatcacttccgcacagcccgaccgtactttccggtgcatatccaacttcgcatagcccagttcctcgtaaggctgcctgcgcagcaggtgatctgcctgatccaaagtgatctgttccttctgtagttgttcaagaatttctctggtatccatcttcggtcccaccttgtcgtctattttacatcctatgctctgccaaagttaccgcacctattgtgcctcatgccttaaactctgtcaatgccatatgcgaaatgtaggcatccgcaaagtccggcatatccgcaagcataagaacctgcattttctccgtgatttcctttaatttatccttttctaaaatctgctcctgtccggtctttttcagataggaaactgccccctgtaaagaagtattccctccggcttttgccaccggcaaaaaacttttttccaccagaccggtctctaccgctgcgcgcacatttaaaaaggtacccatgccgcctgccagatataccttttttacctgccaagcctccataccagccgcttttaacagggtcttctgccccacggcgatcgccgcttttgccatctgaaactgccggatgtcttcctgtgtcaaagagatcttttcctgactgcccggcgtatttagggcaaatccatcctccgggatatccgccgcaaaggtgccgttttcgtccacgatccccccttttttcatgccgctgaccgcctccaaaatcccgctgccacagataccgatcgccgggaggccgccgatcgtcctggtatgcgagttgcgtccggcgatcataacgctgctgattgcccccggaatactggcacagccgcaggaaatattcccgccctcaaatgccggtccagccgcagccgccgtggcaaaatactcctctcccgtccaaaggaccatctctccgttggttccgaaatccaaaagcatccatggctcgtcagcatccatatgctcccggatcccatagataccggatatgatgtctcctccgacaaaagcggatgcccccggcaggatcgttaccgcgatccccttttgcacaaaatcttcctgtttgatgctaaccggttgaaaaggagccacgcccaaggtctgacaggaatagccccgcagcagatggcacatggtcgtattgccggcaatgacgatatgccggatatcagacacttgtatccggtttttgcaaaggtctttgatcccctgcgtcagatccgattctgcgtaccggcgcaggtcatccccatgtccctcatttgcactctggatacgggacaagacatccgctccgtagatccgctgggaattcatgcggcttaggcatgactcgacctgtcctgtagcaagatcgaccagggaaaagccgatcgtagtcgttcccaggtcaatagcaatgccataggcagcctttgttggcaccccctgatctgttttttcatcctgtggataaagaccagcgacctgtatgccggcttctttttgacagaccagatcctctgccacttctatctctatatcatctgtcacctgcatctgacaggcaagacgccagccctgctctaatgcctcttttgaaaaaaatgcccggtctgcccctgtaacaggcacatgcccggaaatgacgcgcaccgcacattttccgcatctgccgattccgccacagacataatccagactcagtccctgctcctgcaaggcatctctgattgttttgttttttcctacgcctgcactgatcccgatccgcatatctttcctccaagactttctttttgtatcttatcattctatgccagcctgcgcaattcccccaaacaaaaaggtcaaaacattattgcaaaaagtcgcttgacacgctcatggctttatagtatattatacaggtcggtaaacgacaagctggcgtggcacaggtggtagcgcacctcattggtagtgaggaggtcacgagttcaactctcgtcgctagctttaaaaaaagacatcagttgatctgatgtcttttttctatatgctatttctttaggcttctaatttatctaagatcagttgattggtcagactgagcatctgccggtaaatattctgcctttcatctgcggacagcccttccgtatctgtagcacttgcctgtgcactgctggtctgtgacggaatgtcgactccattctgacaataaccaagcacttttgaaacataattctgtgtctcggcaaaaggtggaataccgccatattttgctacattcccactgccggcattgtatgcggcaagcgcaagtgatacgtccccgtcatagcgggaaagcaactgactgatatattttgcaccgcccatgatgttttgatatggatcataggcatccgatacgccaagcccctgcgcagtggcaggcatgagctgcataatgcccatagcgccactggaactcgtggcatctgctgtaaaattggattcctgcttggctatggcagtcaaaagattgacatccacgccataggtatcggctgcttcttcaaaaatgctcatcagatctgtcggtaccgtaagacttgtcccggcaaaagtcgcgtttgtctctgtctgactatcatttaaggcttgggttgcactggtcagggaatcggaaaattcctcaaggctggtaaccggagtcatattttctacataggtggtcgtgccatccccgtttatgatagatatcttcattggtaactcctttgggtctgtaatgtatatcaaacaggatgtatctctcgatacatcctgtcttcgtcctgtaatatgagtctacgcttgcagatcttccaagcgctccacgatcagatctaaagtctcgctcggaatcgtgccatctgcgtaagcatcctcaatacatgattcactggctaaaagtgctgaaacattcagccaagttccttgttgaaatacatcatcaaaaatgccaaacaccctgcggtcctgtaacatttgtgaaaaaggtaatttcttgaaatccatacgtctagtctctacttatactcttgataagtattcccctgttctggtgtcgatcttgatcacatcgttctgctcaacgaacaaaggtacataaacagttgctcctgtctcaacggtagcaggctttgtagcacctgttgctgtgtctcccttgaatcccggttctgtctctgtgatctcaagttctacgaaaagtggtggttctactgcaaatacgcttcccttgtgagagcataccttaaccatttcattttccttaacgaactttaatgcatcaccgatatcatctgtgctgagcgcgatctgctcataattctctacgtccatgaagtagtagagatctccatcattgtaaagatactgcatatccttacgatcgatgtgtgcctgtggacacttctctgtcggacggaatgtcttttctacaacaccaccgtttttgatattctttaactttgtacgaacaaatgccgcacccttaccaggcttaacatgttgaaattcgatgatctggtaaacgttgccttccaattcgatggtaacgccatttctaaaatcgccagctgaaatcattctttcttcctccttaatactctatggacccgagcccacttatgctctatattttaatatatcttgccacatatttcaagtattagtacgatcagacgttgataaagcggtttgtctgggtcgaaagttcggaaataatgttattactttcgtcgatctccttcatgatggtatccatctcgcctaccaactgtgatgtattttctgccgcgttggtcacgccctctgcgccctgttctaccgcggtggatacatcatttacgttttctacgacctcatccatggtctggcgcaaatgatcgacggactccgtaaaggatgtcatcacttcattgatataatcagcatctgcgcgatatttatgaccggactctacgaatccgtcataatctttcaagatattttcattaatataggtaacaatattttcagagttctttgccagatctcctaccgctgcaacaaccttagcattgatctgctggatgttgcccgccgtttctctgctgctgtctgccaagacacggatctcatctgcgacaaccgcaaagcccttgcctgcctctccggctcttgccgcctcgatggaagcattgagtgccaaaagattggtctgggaagaaatgtttaagatctcatccgtcagcgcattgacttcttctacgctcctgctattctcgatcgcctgctgcaaggtcccaaggatctcctggatcatggcagaagtcgtatccttgttggaaactgccgtatcttccaactgtgtcgcacgatcctgcatctcggtcgcataggtcagtatatgttcgctctgttcggaaattcgatccatgcccgttcctgccttttccacacgctcattgacgtttgccaatgttgcagaaacttcctccatggttgcagaaagttcttccatgacggcagaaatatccgtcgcattgccattgacggatgtcacgctgtcagtcactgccgcaaaggtagaattcaaatgtacggaagagtcgcggatcttggcgatcacattctgcaatgcctcgataaaagtattgacgccctcgaccagactaccgatctcgtccttctggttgactgaaattcgcttggtcagatcggctgctgcattgttgacctcatccaccatatcgccaagttccttggaagatttcttgaccggtgtcacgatcagtcgcacgctgatcaatacaacaataataaagatcagtaccgtaaaggcgatcgaaccggcgatcactatattagacaggatctttgcctgcttcaaggctgccttcgcctctttttcatccgcctgtatcatcttctccagttccgaaatatcagataaaatacccgtattgtatccactctctgccgccaatacttctcccgggatctctgtgccataaacagcattctgcatctgcgcctgctgatagtcatacataccctttaacttctcatgcagatccaaaaccgtttctttttccttgctagcatttgcgtattttttgaatacttcgatgtttttgaccatacgtccataggcctgatcgagtgcatctgagtatccacctatggtctgttcgctcggctcatgaattacatttgaggtataactctgcatctttgtgtaatccgtatctaacgcacctgctgcatccacacaggatacaatctgctccgaaatcatcattccctgattatacaggttttgtactgccatgcgcagccccgaaacggtaaccagtgtcaccaatgccattgccgcaaccggtgtaacgatctttgccatcattcccgacatttttttcttgttattctttgtcgtattttttgtatcctttgacctcttttccatctctcatgcctccataagtttcctatcttaatgttttccgtgccaagtttaccataattgctttttcttcatatataaaaaatagcgaaaattatcaaaatttcgataacttttcgtccacatacgatatttttcttttcataactctcagatacgatattttttctcgaactggtctaccggcatcgggcggcagaaataatatccctggaaatgctgacatcccatctgcgccaatgcttccacctgttcctctgtctcaacaccctctgtgatcacatccatatgtaactgcccgatcaggcggatcagcgccgataagatcgaccagctccggtcgacattgaccgtttcctgtaaaaattccatgtcgatcttgatcacatccgccttgatatcctttaagatattcaaagaagaatagccactgccgaaatcgtcgatctcgatctcaaatccatacgcctgcaatctttccagcatatatctgtgattttccatttccgtcacaaagagcgtttccgtgatctctagttttaacttgtgtgggtcgagatcatatttttcgaccagacgggtaaagacatcataaacatccagataatattgatcctgcacggaaatattgaccgaaagatacagatcatcccgtccctgatcccgccagattgccaactgtctggcggctaaatcccatacataaaggtctaacttgtgtaccagacctgccgactctaagaccggtataaattcatccggtgcgatcagtcccttgatcggatggatccatctggcaagtgcctctgccccaagcagactgccgtctcttctcgtctgtgcctgtagatagatccggatctgccccagttccaatgcctgctcaaattcattgatgatcaggttcttctccagttttttttgcaaaagggcatcatcgaaatatgccacacgccttgcataatctcccttgatcgtgttgatcgccagattacatttatccaccatgacaaaaacaggctctgtcacatccgttatctcataaacgcccatatagatctgcaagtggaagtattcgtttgcaaaggtgtcggccagacgatccatgacatctaagaaaagttcttccgtaaaacgctcttttggcatacaaaaggcaaactgatcttcgttcagacggcaataaagatcatcttccttggcacgctcccggaaaaagtacgcatgcatcttgaggatctcatcaccgcgctgggttcccaatatatcattgatcaatttgaaatccttgatatcggaagtgatcatgacgtaaggcttgcccgccgtgcgcagggtctctgtcaccctttcctcaaaatactgctcgttatagatacctgtcaaaaggtcatgcgttgcacgaaaatgttcttccctgtatttctccgtctcttccgtccggtcaatacaggtaataaaatagcccaagaatacatcttcctcgtccgtcagacgctgtacggtaaactcataattgaaggtcttatcatctgcctcaaaatgctccatatagacctgctcgctacattcctctttccaatgccgcttgagccagccctcaaaatactgctctgcaacgcttaaatcctcgtccagggcaagatgcttgtagcggtagaacatgtcctttccacgccgattgacatagatacattttccactgatatcaaaacagcctacgcccatctctgcgatctgtaccgcattggcaaggatcttgtcacgcatagcctgtggcacataaaactcggtaaaaaagcaaatgatcagtgccgctgccccataaaagatcagggaaatatcgattggcagattgagcgccagtccgattgcatcacatatgatgattgccagaaaagacaccaggatggatgtatatttcttgcggtacaaacgcgccgtatggcggatctttaccatcaacagaagcacgatccaggcaaccagtccataacaataagccagatgcacataaaaaataccggaataacctgtcggataaaaatatgccccgtaagactttgaaaaagcctcctttaagataaagacatgatgcagccaaggattgagcagcatactaaccgtttccagaccagccacgaggtaacacggtgtcatccatttgacctgtttttcctcattgtccgtgtaaaaatagacatagcggagcatgaacaagagcagccagtcaatgcatgccaaaaagacagagtgagaaaccgtagcgattgctttctcatctgtcatgataaagatgccattggctacaacggcaacaacgactgcaacaaaaagtgtaaatatgcttttactgacccgatcctgtttttcccggatcataccggcgaatgctaccaccagaagtgtcagcacaaacaagattcccagataaatcatctttggcataggctatatttccttatcttttattctcgatctcgtggatcatggcgatacgcttttcatggcgtccgccctgaaactctgcatctaaatatgttttgacaatatcttttgccacttcgataccaacgatgcgggcaccaaaagcaatgatattagcattgttgtgttcttttaccagacgggctgttgtcgtatcggaacatactgctgcacgcacgcccggcaccttattggctgcaatggaaatcccaacaccggtaccgcaaataagtacgccacattccacctgaccggatacaacagcgcgtcccacggcttctccatataccggataatcgcaactttcctccttggagataccaaagtctacaacctcgtgtcccaattcctccaagtatgccttgatctcatttttcatagtaactgctgcatgatcgtttccaattcctattttcatttcttttctccattcatcatttctttttattttactaaggcagagatcgtcttaaatgcaggatgcttggaagatcctgccaattcgtaaaggatggcttctgcgctcgtgatgatcgcaccttcctgctttgctctctcataggcaaatgccagatctctgtcgcttctgctggctacacagtctgccaccagaatggtctgatagcctgctgcctgcagatccatcaaagattgtaagacacagatatgcgcctcgataccgcacaggatgacattctttttgccatgcgggatggcctgtcggacgctctcattgtcatatacgctgaaagtattcttgtcgattgcctctgtcacacccatggcatctgtgatcgccgggatattattgcccagtcccttggcatactgtgtggtaaggatcattggtacttccagtgccttcaagccgcccagtaagatctggctcttgcggagcagttcctcctgcccgctcattgccggcaagatcttttcctgataatcaatgacgatcgcaaatgtatcttctgcctttattctcatcttcttatacctctttctgttgttgaaaaatataccaatttaattataggcaaattacctgtaaaagacaatgttttcccgcatgaaaaaatgagtaaaagggaattttccataaaacaaaaagagatcctcatccacaaatgagaatctctatgtaatctgtctttctgtcctagagtgagaagtcttctgcgccgcgcatagatggtgtctgggatgcttccactgccagatcctgacctacaaagtactgatactgatggatcaattcatccttttgcatatcagagactgcctttgccacatccaatgatcggatatcgctgtcagcgcccttgagatcataggttgccttcggctcgtactggctggcatagtcgtatgctccaaaggtctgtctgcttctggctgatgcatcctgctgtgtgcctgcctcggcgacattgccggataccttggtcgtaccatctatataaatagactgggatgcgaccggtacactctcgacttgctttatgctgttataatcataaaatccaacggctggtcggatacctgatatattcatcttatactcctaatttcgctctcacgaaaacttcttgttccttacacaaaatatatcggatcatgtaaaaaaatcttaacccttttatttgtctaacattttctttaattcactcataaatgtattgacatctttaaactcacggtaaacagaggcaaatctgacataagcaacatcatccagatccttgatcttatccataacgatctcgccgatctcgtcactcgggatctccttttcctctctggagaaaatctctgtttccacttcatcgatcagtttgttgatgtcgttggcagaaatcggacgcttatggcaggctctgagcacaccggcctcgatcttggcacgatcatactgttcacggttgttgtctttcttgatcacgatcaaagggatcgtctctaccttttcataggtcgtaaaacgcttgccacattcatcacacatacgacggcggcggatagaattgttgtcatctgccggtctggaatcaattactctggtattctcactactacaaaaaggacacttcatgccttccctccatttcttagcgaatccgcttcgcctaaaccacaatatatagatttatattacacggattttgtatgaattgtcaagcaattcgcactattttcgacatgtcttatggtttgtgcatgacttccttttcattgacatccaccaggatcatatccgaaccgatacggcagacctggcaccaggggatccagtattcacactcatgtaaaaagaagccgcagatctttcctttggatggtacgatcagggtgcagatacagcctcttttttcatcgatctccagatccatcacacgtcccaggcatttggctgtgcatacattgatcacatcttttgtctgtaattcacacaaaagcatggcagtccaccacaaaataaggctttctacagtatatgtagaaagccttgataagtcacactttgaaattatacattgaagcggaaaaggatcacatcaccatcctgtacgacatattccttgccctctacacgcaccagacctttttccttggctgctgcagtgctgccgcaatctaaaagatcctggaagtttacgacctcagccttgataaagccacgctcaaagtcggtatggatctttcctgctgcctgcggagccttggttcccttggtgatggtccatgcacgtgtctcatcctcgccggaagtcagataagagatcaagcccaataaagaataactagccttgatcagtttatccagaccggattccttcatgccgagttcctctaagaacatcgctttttcgtcatcatccagttctgcgatctcctgctcgatctccgcacagatcacaaagacttcacttccttcttttgccgcgaactcacgaacggctgcaacacctgcgttgtctgcgccgtcatttgccacctcatcctcggatacattggcagcatagatgaccggctttgcagtaagaagtccatactccttgaagtaggcttcctcatcctcatccagaagttcaaaagtgcgggcagaattacctgcttccatatgctctttcagacgttcctgcatagcggcttccttttgtaaagacttgtccatacgggcagccttggaagtctttgcatatcttctctccaaaatctccagatcggagaaaagaagttccagattgatggtctcaatatcacggagcggatcaatgcttccatccacatgcacgatattggtatcttcaaagcaacgtactacatgtacgatcgcatcacattcacggatgttggcaagaaactggttgccaagtccctctcccttgctggctccctttacaaggcccgcaatatcgacaaattcaataacagccggtgtcaccttttttgattggtaaagatctgccagttttttcagtctctcatccggcacactgaccacgcccacatttgggtcaatcgttgcgaatgggtagttggctgcaagtgcgcctgccttggtcagcgaattaaataaagtagacttgcctacgttcggcagtccgacgattccaagtttcataatttatatttctcctttgaaaagtattgattttattaaaatcttttccgttgtcatgcttcttaaaagccctgatacagcaatatttagtctatcacatttagggaggaatgtacatttctttctttttttttgggggaggatatcatttgcgctactgcattagcacttatctggtcgataatcttcttgattcccatccatactgccagatcagtaaatatctctaccatacacggtaggcggttagatttccaagtccaatttcataatgacgcaattgaaaaaggaccaactctcgccggtcctaatcttctttcacattcctaatctattagcctgttgttacctcttttacaaatatttatccaactgatgtgacacatccaatacacctgtcagttgattcttcgcgctctccgcattttccatattggcattggaaagttcagctgcctggttggaagatgcggtcacttcctcggtcgttgctgataggttggtaatgttatctacgatctgattgttggcttcggaaagtctgctcagacgatcatcgatattttcgatatgggtaatcaattctgtcacattatcattcatcgcctcaaaactctcggatgcttctgtgatcatgacgtcctgtgcatccgttgcactgacagactgggaaaccgcattggctgccctggtcgcattctctgtcagatcatcagagatcttgctgatctcttctgtctcctgcttggtacgctctgccaactggcggatctcatccgcaaccacagcaaatcccctgccagcctcaccggctctggcactctcaatggaggcattcaatgccaaaagattggtctgggaggaaattccaagaatagtatccgcgatatttcgtacttcttccgtcttggcctgtaaagcttccatcgcctttgccacatcctgatttgtattggagattacctgagactgctccttcaagcgattcatcacatccatagactgccggttgatctgaccggactgtttggcgatctctaccatagtctcagaacttgtcaaagtatcttctatcgactgctggatattggcagtcatggtcgtctgtgtctggatattttctgcggtcgacaaggtactttccgaaatattcttcattgcaccgtttacgacctcggaagaaccattgaggtcattgacgatatccatggcactttccgtacccttgcgcacctcagtagccacgccaatcacatcgtcaagcatggtctgcatcttggcattcttttcatgtacttcgcctaaagtatctttattaaactgctccgcaatgctggtaacgcaataaagcaataccaaaagtaccagacagatcaccaggacaaagatctgatttaaggcagaatccccctcaagattgatatgctgtacgatcttggccgtagtcacgagcacttccatgactgcataagcaatcccactgatgagtgaaaacttcttgtcaaagaaaagcatacatcctaccaaagggaagattccaagcaactggataaatccctgtgtaaaggcaaatcctgtcacatagcagacaacaagcaaaaatggcaatgccatcatttttaatttctgggatgtcaaaaactttctggacagtaaaaagatggcaatacaggataccaaaacaataccggaaaccatcatggtcagccccttagagcggatgcctacgaaatagcatgcccacataatgatcattaagattgcgtaaaaaataagatatccggataccaaaaagcgattggctctctttaactgttcctcttgatctgcatatttaaaatccataaagcaacaaatcctttcctatatacaaaatgtctcaaatttccatacatttttattgtacgaaaatctgcgtcatttttccaccactttttgtcgaaatttatactttttttgatccgcaccggtttttcccagttcccagaaagccactgcactggctgccgccacgtttaaggagtccacgccatgcatcatgggaatacagaccgtgtagtcacaatcagcgatcgtttcctttgccagcccatcgccttccgttcccagcaccactgccagacgttcttccgcaagcagtcttggatcatccacggcataagaatcctcttttaatgccatggcgactgtcttataacccatctgctgcaacaggtgccccgtctcttcataccacgcctctttggaaagataggtccaaggaatctgaaagaccgttcccatgctgacccggcaggctctgcgatacaaaggatctgcacagccatgggtcaaaaggatgccatccatgccaagggctgccgacgaccggaagatggcgccgacattggtcggattgacgacttcttctaaaatggcgatacgtcttttcccctgacagatgcgctccaccgtcggcatgggcttgcgccgcatggcacacagcataccccgtgccaactgaaaaccggtgatctgtgtcagcacagaaaggtctgccacatagatcgggatatcgcccacttttttcaggacttcccctgcttttttctccacctgtcttttttccatcaaaatagaaatcggctcatagccggcctctaaagcacgcaggatcacattggggctctccgcgataaaaagacccggctccggctcaaaataatgtaataattgtgcttccttcttatctatatacatatccagttgtggaatatgcaggtctgtgatctcgatcatacgctctccttgccataagagacgttccttttgccacaaggagtgtccccttggttctgttttttcttcctctaagataaacgaaaagatgagatttgtaaaacagaaaaactcctgtgcacacctgcacaagagtctttcctgataccgacaataacgcgcacgcctgtctctttgacaaattcgtactcgaatttttccatacgcatagaggtggtcggtccaaccgataccatttcgtatttttcatcacccagcggacggatgatcggacctgcatgcaggataccgtcttctctttcacgccccttcgtacttccaaatttattgactttgcttccggttacgacatcacaccttatctgccaacgctgtgaacttccagagtctcttcccggcaaagtgtatgatcccaaattagatgagagagccaaagctgcagtgccacgccaaagaaaacaatgatatagccgaccaggctggtaaagaccggtctaaaataacataaaatgacagggctgccccagataccccagagcaaaagggtcgccggcagtttgccaaaagcaaacaaaaaagcattggtcagatgccctttgacccggttgtcatagtttgctaccagtgggaaaatccaaaagagcatactgactgccacaaagaaaagcacgccgccaaagaataaaaagaacatattgacaggctctgcgatcctgatggcataatatatatccccagcgcccaagaccatgacgctagcaaggaccagccacgcaccggtcgcctgcttaacgtcagcggcaaaggcatggaaaaactctaaagtcaaaataccgccctccggctctttcatttttttcatacaacgtgccccggcgctgagcgatgccccgattgtcacgatcgggatacagcccaaaagcacgagaaaattgagcagcacaaactgcccaatctttcccaagatccatataattttgttctcagatgtaaaattcaacatttcttttacccctttacgccaccgagtgatacgccctccacgataaatctggataagaggaagtacatcacaagcattggcaagattgtaatggagagtcccaagaatacaacaccatagtcggtacggaaggattcgcttgtcagcatctgcacaaacatggtcagtgtctttttctcagaactgctgatgatcagtgtcggcatgaacagattgttccaactagccacaaactggaagatcgcttgtgttgcgattgccggtttcatcaaaggtacgacgatcgtgttaaagatacggatctcaccgcaaccgtcgatgcgggccgcctctaccagttccggggaaagcgctccctccatgtactgtttcataaagaatacgaccgccggagtagtaatacccgggatgatcagcggccaatatgtatccagcagattcagtttcatcatgaactggtagaaaccaatggcaaaaacctgcgtcggcaccatcatgacacccatgataaatgcccatgctgctttgcgacctttaaaggagtagttgtggatgccgtatgctgtcatagaagaaaaatatacggacaatacggtaaatggaacagccaccttaaaggaattgaacatgctttgtaagactgtaacaccaagaccctgttgggatttgtcgaaatttgcgatattgttttttaaatttgatccaaagagaagtgatataccgctctgtacctgggtcgacgtgcgtgttgcattgacgaacatcagataaaatgggatcaaactgatcagacaaagcaggatcataatgatgttccgaaagatcttctgcctgcgtacggcttttgtcttattttgcaatggctgattactttccatgacgcttgccccctttcttcttttttccgcctccgccatatgcatcggatgtctgcatgacgcggaagaagatcaaactaatgatcagggtacagataaagagaagtacggatactgccgccgcccttccggtatctgtattgtgcagtctcataatgtacatggtcacagttgttgaagtatcgtttggtcctcccacatagcctgtgccctgccctacattaaagagtgccggaatatcgaataactgaagtccaccgatggctgatgtcacaagtacatacaacatgaccggctttaacagcggaagggtaatcgaaaagaactgctgtctgcctgtcgccccatccaactcggcggcttcgtaaatatcaggactgatacctatgatacctgcaatcagaagtaacatagtattgccataccacatccagacctggatcatggaaatggatatgccggttccccacttgctcatcataatatccgcattttgtgagatccaacccagactgcgcagtgtcgacatgatcggaccatacttgcttaagagggcacaaaagagaagggaaatagatgccgctgtaataatattcggcatgtaaagaacaaccttgtaaaagcctcttgcctttaattttgcacgattattggtcagccatgcggctgccaaaaggctcagcaagatctggggtacaaagtttaacaaccacagacgaagcgtattgcccaggtattttaggaaatatccctgttcaccatctgcaatacccagcacattcagataattctgaagtcctgtaaaagtgatcgttgtccgcagatttctggtggtgtactcaaacatgctgtaatagaaggtattgatcagcggccacagggagaaaaccagatatacgataaagaacggtgcaataaagagataaccatacttcccataactgaccgtctttggttttgtttctttttttcctgctttcatatggttttcacctcatttaaaatgattgcccggagcccaagtcctgctccgggcaaaggatttttactactctactttcaaataagaatatgtgtcatgtacggctgccttgaagtccttgatggcagtgtccttatcagattcgccggtcgcatatgcggtaactgctgccgggaacagggtctcattgatcgtcatatcttctgctgtaaccaaagatacatctacattctgtcctcttgtcgagaagaattccggaatgttctggtcgccgtaaaggctaaaggtagaagcaccctttaaattgtttgctacgatatcagagatagccttctggttgtttacaaagtcaccatttgcttcataaatgcttgtcatgaagtccttgtcacaagtgcaggacttgatgatctctgctgcaacgtctgtatcagcacattttgcggttgctgcaagtccggtaccgccccaatagaactgaaccggtgcgtctacaaggatggtgttcttatcccatgtatcagtcaggctccaataggtgtaccatgggcatcctgcaaatgcgatacatgcttctgacttctcgccatcgccatcttttaatgctgcccagtctgtcccccacatagtagtattaaaggtaagatcttcatcatataaggtctttgagtattccatgtattcttccatggcaggatccatctggatcacatcattgtcatcataccagccaacggtacgggcaccatttaagaagatgtacttcagatcatcatagccggagaagagttttacttttccgccggaagcatcattgacttttcttgctgcttctaagatagaatcccaactagagaaggtcttctcaagttctgcctgatcggtcgtgcccaagtacttttctgcaagatcagcacggatctggatacatccgggtgttgcctgccagaaagaagccttctgaacgccatccttgtcagaaccaagttcgatattgtaagagaactggtctgctgtatcagcatctgtgatgccgagatccttaaggctcatcagataatcagactgcacatatttctgcacataaccaacttccaaaagcatcatgtcaggataaagttcgttgctcggatcgtctaacaaagcatcgatcttgtcctgatagtaactggaaccaccgcagtttacaaataccagtctatccttgagatccgggtatttttctactaaaaggtcctgcaaggtcgtaaaatctgtgttccacgcccagacaacaaaagcatcttttgcactaggatcaccagtaatttcattttccggaatggcatcttcatcagttccactctcctctgttgcatcactgcttgcctgtttcttgtcccccccagaacttccgcaggctgccaacgagaacgtcatggcaaatgccaacaacatcgctaacacttttttcttcatcgttttttcctcctttaaaatttgaatacattataaatatttattgctgaaccacagcagttattaccactgtaattgtgcactatgttatgttgatgtcttttacagactctcctttttccacactgccttcgacaatgtatggacggatcagcgtcgtctttggttcctcgatcagactgatcaactgctctgctgccaatcgtccaatgctgtccgtgtcctgctttaaggtcgtcaactgcggctccaactgataggcgatccgtataccgtcataaccggctacggaaatgtcctgcgggatcttgagtccagcctgtcggattgccttgataccgccgaaactggcgaaatcatcctgatataagatgcaggtcggtcgatcctccaatgccagaagttctctggttctttcatatgcctcatccgcgttgcggtatgccgcttccttgatgtaagcatccgggatggataagcccttttgctccgccatccggtaaaaggtagacaagcggctctgggtaactgcggaatctgcgccatggatataagcgatcttccgatgtcctctttcatatacataggaaaagaggtcttccatgccctttgcattgtccgacatgatggcgatgcgattgtggaaaaggtgatcgatcgtcactaccggaatgttgctttttacaagttctatcacttccgggtcgttaaaatcgatacaggcgatcaccacgccatcaaatccacggtatctggcatgttccagataggtcatgcggttgggacgggtcttgcaacagttgataaaagtcatatcatagccctgctgctccgctgtctgcttgaaactgtcaagcacatgtgaaaagtaattgtgtgtcaaaccgctacgtgcttcatcgacaaacaaaacaccgatattataagtacgatttgtcttgagtgcctttgccgcagagtttggaaaatatcccatgtcttttgccacctgccgaatccgttcctttgtctcagcactgatatcattgtgatcgttgagtgccttgctgacggttgccacggaaacctgacaagcctttgcaatatccttgagtgataccatcctttctcctctcgactttgtaatttgttttgaagaaaaatttcttaatcgttttcgtaagttgaatgtacatcaatttgatatggtctgcaagccttttttgatgtttttacctatttttggcaaggtttcacagtttaaggacttttgttttgcccatttttacgaaactacattttcgtaattattttatataaggaaagcccataaaaagcctgtggttttcgtagtattttcgttgatttcctgttgattttccaagttttatacattataatctg

SEQ ID NO: 12611 - DNA, 8863 bp, Unknown
  gut microbiota DNA sequence
ttcgtcaacaagatcacatgcgatcttaagagcagccggagctgttctcttaccattacggcactgcagcatgtataacttcttgttttctacggtaaattccatatcctgcatgtcatgatagtgattctcaagagtctcacatacctgaatgaactctgcatatgcttctgggaattcctgctccatctgagcgatcggcattggtgtacgaacaccggcaactacgtcctcgccctgggcattgatcaggaactcacccatcaacttcttctcacctgtagcaggatcacgtgtaaatgcaacacctgtaccggactcatcatttaagttaccgaataccattggcattacgttaactgctgttccccaagagtaagggatgtcgttgtcacgacgatatacgtttgcacgtgggttgtcccaagaacggaatacagcctcgattgctaacttcaactgctctacaggatcagaagggaagtcctgtcctaactggttcttgtactcagccttgaactgctctgctaattccttgaggtcagcagcggtaagttcaacgtcatactgaacgcctctttcttccttcatcttgtcgatcaactgctcgaaatacttcttaccaacttccataacaacgtctgagaacatctggatgaaacgtctgtaagagtcatatacgaaacgctcgaacttcggatcagggttaccagcgatcattgctgctactacctcatcattcagtcctaagttaagaattgtatccatcataccaggcatagatgctctagcaccggaacgaacggaaacaagaagagggttcttcagatcgccgaatttctttccgttgatctcctccattttcttaacgccttccatagcctgtgccatgatctcgtcgttgatcttgcgtccgtcctcataatactgagtacaagcctccgttgtgattgtgaatccctgtggtaccggaagaccgatatcagtcatctctgcaaggttagcacctttaccaccaagaagattacgcatggtcatgtcgccttcactaaacatgtagacccatttgtttgccattttcaatttcctcctaaaaaatactttgtgtccttcaactcattcgtatctgaatgcatatggaacacaccactccatgtgctaagccgcacataattgattttagcataatttccaatttattcaatatcaaatccgttttattctgacaaatttatccaacagacagagccatcttcttctctttcttattcaccttccataaataagtaagaattcacacaagcaaaaaccagcttttcaacacctgtttgtgtaaaaaactggtttttgatacattattttttaaaaacgatatttaccgctgccgatattttttatctgtcctttccaataaactgttgcacttgcattacatggaatttgtacatccaagacatcctgtgtccattccactgtaatcggtcctgcttcgctgacataggtacatttgcattgtgtcaaacggtcatccatatttggtcggataataatgtgggaatatcctggtgtatcggtgtcgataccagccacataacggcagatccaatcataaacacaaccgaatgcgtagtgattataactgatatatgcgcctgtatgtttagcatcgtctgcatcccatccctcccagatggttgttgctccatgatctacctcatacaaccaggaaggtcttttatcctgccacaaaatctcatatgccagtttttcttctcccaactggcacaacacatccatcagatacggcgttgctaaaaagccggtatccagacaatttccattcttttttaccaaagaaatcagtttttccttataagcttctttcaaatcatccggaacaagatcaaatgcaaaagctagcacatacgcccccatcagataatctggcagcatatcccggcggataatacccccaacaatcgcctgcttcattttcgcagcaatcccaccataataggaagacatctcttcatcttctaaaatatggcagatttctcgcattttaaccatagtcatatagccaaagaatggtgcaatatagaatgccgactctttacacatgccatacggatcgccggttgtattcggtctgcttggcaccagccactctccaaaatggaatcctgtatcccatattttttcatcatattccttcggaatcccccaggttccttccttctgtgatgcagttcttataatattatctgcccactttttcatagcatcatagttttcagtcagtacactggtatctcctgtcatctgatacatatcatatggaacccagacaatggcatcactccatcctgcaacaccggtaatatccgcatcgccaaaagtctgacagacattccgaagcatgccatcatataactgcatataaggcgaaacaatcataaccgttccatctgctgtctgatccatacgcacagagtgtagccagcttttcaaaaatggcgtcatctgttcattcaacattgctgttctcgcataaatcagaatatctcccgtccatccggccttttccctggaagggcaatcggtagggaccgacatcatattgctgtactgtgaccagcgaatattctggtaaagacgatttaagcgttcatctgaacatacaaagtctcccgcattttctttctggcttgtcaataaaacagccgtaaagtcttcctttcttgcatccggcataccggttacacgaatatagcgaaaaccatgaaatgtaaacaacgcttcatgttctatcggtctgccatccgataccacggtatctttctgtggtgcaaacatggtattaatataattttcattttcatccaatgtctcaaaatattcaaaaacaacttgctgtccctgcggcacatctacgtggattctggctctgcctgccataacctgaccaaaatctaccaccatttcccctgccggtgtcaccataagatcaattgccggaatcaaacggtaaggaatgaccggatccaatggttgggcctttagaaattcatacccatagtccttaatattaaccggctgctcttcctgtttttccagcgtaaaatcctgtttttccccttggtagagatccgaataaacaatataatcggtccggcatgtctcacttccatctgaaaaaaaccactcgcggctttcatcctcatattccacccgcatctgataaatgacagatggttcctcatggtgttctttcataaccggtcttgcctgggcactaaagtaccacccatctcctacatacatttccaatatattttctgcatcctgtaagagttctgttacatcatatgtctgatagtacatcagacgatcatatggtgtaaattccggagccatttctctgttatccggtctctttccatttacatataaccggtataccccatgagcagatgcatatagaactgcttttttaactttccggttcaacgaaatttttctggtaaacataaccgcaggatatgttgcaccaaatttatactcattagcagcttttcttgtaaacggacattccacccagcaggctttccagtcctttttatccaaaaaggctgtagtaaaagcagacgtcttctctgccatatctccatgattatcccagactttgacactccaggtgtagtccacacaggatgccagcatatctccctggtatttgataaaattctgttttggcgatacgacaatcccggaatcccacacagtcttttgcgcatcttttacaataatctgatacttttcctgcaattcgttctgtgcatcactctctatcttccatgaaaattccggcatttcatcgataaccggttgattcctgtgcaaaacttttaattcgtgtaatttcatactattctagtccctttccaacttgttccaaaaagcaaatgcccgatccacccagccaactgcctccgtatttgttcccaatccaaatccatgcaacccatgctgcggatgttcataacaatatggtatctgcagcgtttgtaattgttctatgaacacctgactgttccataccggtacggttggatcgtcttctgcctgcaccacaaatgccggtggatatgttatatccatatgttgttcaacattataaacgccacacaccttctggctatgatcctttcccagataaccggaaagcatcatagcgcgaataggaagcggtgccagggagactgtcttccatacatcaaccataggatatgccaggaggatgatatccggttttgacacctgatatgcagcatatcccagttccggtgtgccccagcaggctgccagatgtccacctgccgaaaagcctccaactgcataatgttccatattgattcccaatgtatcctgatgttgcatcaggaactggcaggctgcacccatatcctccattggacgtggaaacaaagccttgccatctgccacccgataattcaagcaaaaagcgtctacgccaagctcagccaatctggctgccaccggaaaggattccaccatagaacaaacacttccataagcgccacctgctgcaagaataatcgtctttcgcgacccattattgcattgttttgcaggaaaatagattagttttacacattccttatccggactttcctgcacttctttggaatcgtacacatcaaataacacctgaccgccagatgcacagatttgttccaattggcgcagaccatataccatatcctcggctgcccaggttggatttttctgttctatctctttcagacatgtagcatcttttttaaaattcccggcgccatctcccacctgattataaataaaataaggaaacaaggtttttaaatccttatgttttctaaggtcttctaccttcgtattctctgtaatcatcaacgtaatcccttctctctcagttccttctgaatttctgcgattccatttttctccagatctatcttataaaaacataatgctgcaagggcaaataaaatagccggatagaagctggacaatatgcgaatcatgaaaatggcagaaaccggctgacttaccagcgtctcggcagaactgctgacatatcctgacaccgccagcataacgcctgaaatacctgctgccagaccaatacctatttttccacccatagtagcggctgatgagattgttccatccatcggttttccacaacgatacaatgcataatcacagatttcaccggtcaatgggattaaagaaattgtaaacggtaccactgctatactggcaacggatttcgctaacataaatagtgcaagattatcgttggcaaagaaaataatcgtatgtccaacagctgcaagaagcataccaccaacaacgcagtttcgttttccaaatttgttcatcattggcacagcaaatggaagtaggaaaatcataatcattcccggcagattgatgagtgtcgtaacccccacatcatggaacacatattttgcataataggttgccactggtgcagatgtcaaattgtagagaattgtcccgagtgcaaggaaaataaaatacttgttatgtaataactcatgtaaagtctctttcaccggctgtttttctaccaactgttccttagatctttccgtaactgtctctcgaacacaggcaacgccaataatggaagccacaatagacataacgccaaaaattaaggttgccgtagtatatgctgcctggctctcgtgcatagcagataaaatcttcggaaccaccaatccgataataacaacaggaaccaaagtaccataagcagaaaatacaccgagtacacctcgctttttagaatctgcagtcaaaaggttgtttagcgttccacaggaaacacttgccatagttccgaagaatggattggcaagaaaatacatacctgcacaaaatgccacctttgcgctggtagatagcgatgccggacaagaaaataaaagcatgatcgatacaccaattcctatgccgcctgctaaaacccacggacgagcctttcctaatctggtattggttctgtccacaatcattcccataataatatctgtcacaccatcagtaatctttgtaatcatgagaatcattgcaactgcacccatagaaattcctactgtatctgtataatacaaattgatatacccaggtacatatccggttgcgactgcactgaccatagcgcagaacatgattccgattttctgattcgcacctaatttttctgtcattgtaacagtttcatctaatttttcttttttcattcttcttctcctttttgatactgatcctccggtataacaaaatcaaaaaattccacatcttcttctgtttcccctaacagaatgcggcgaaagattctgccatccaccggagattcccatttttcctgtgtactcgcaatattgcctcttatatttgcaatcatccttgccggcatatctgccgggagttccacatcgtcatgggcagaaaagactcgtgcaatcggcaatgcctgcaaagccgccagatgctgcaaatatatctctaatggtgtccaatcagacatgccatacaatactctccgtgtaactgcatcgcccccaaacaaggtttttgtcatggcatcataaaacacataacatcctcttgtgtgccccggcacatgaattggcaatatctcccggtttccgagcgaaattatctgtcgatccaccaacggatgcaattggtagggaagtttgctatcctggtatccagcaggatccggggcaataccgccgccacaggcaagagcccaatcctcttttgccatatagacctctgaaaactgtgcgttgcatcctatgtgatcgatatggccatgagaattgaccataataaccggcagcccaaaagttgtttctatactatcccgaaaagcaggattctccggcaccggactatctatcaccataactgcgtgacttccggttacgacccaactttgcataatggctcctcctgccgtctgtctctgcatccatcgttctgttcgcaaggcataaattccattaccatactctgtaaaataaatctcatccatgctgttttatttctcctccttctcccagatggaggcaaccaattcttctatctttgcactaatataggatcctgacccctccagatctgaacgatttgtcataaacacaacctccaggtcatctgcagggctgataaaaaaatgggttccaaatgcaccactccatccataagtaccttctgatactgcaaatccacctttttccttgtcctgtcggatcttcattcccagcccccatacaaatccctgttctggctctaaatgttcttttggtgcttctgtatgtaacagttgtacagtctccggttttaatatccgcttaccgtgataagaaccttcatgcaacaacatatcaccaaaatggtcataatcatgcagtgtggaaaataatccaccgcagccatgttcaaaaagtatttctttctgatgcatgatgccctgcatatctttttttgttcctgtaacatttaccagtttgtctttctttcttttataaacatctaccaaacgttttttctgttcatcgttcaaaaagaacgttgtatctttcatgtcaagcggctggcaaatctccttttgcataaagtcttcaaaaggcatccctgatactacagaaaccaggtaacctaaaatatcaaagcctgccagtggagaatatcctgttcctcttcccggctggaagtccagaacataatctgtataatgcagcacaaaatcacgcaagttgtcatactgcttcttttctttcataagagccagcagacctaccagcccctgctgcagaccggaagaatgagaaagtaaatcccgtatcgtaatctcacgttcagcgtctgttctcttcactttattcatagaaaaggtcaacagcaaaagtggtatctttttcatcttatccatagaaaattcataccgtggatcctccataacctgcattccggcaaattccggaatatatcttgataatggagcatcgagttccaacaatcctttttcgatacaaatcataacagccacagcagtaatgcactttgtcatagacatcagtcgatatatgctgtcctctttgatttcttgattcgtctcacatctgctatatccccaccggttctcgtacaggatctcatcccccctgcgtaccaaaagtgctgctcctgatatctcctgatttttcacataatcttgcatgacttcattgattttatccatccccatgatttttcctccttatatagtattattctaataattccggttatcatttgcacataccatcttgctcaaaaatcatataattttgcgttttgtttcagttcctttttattctcatacatcatcttatccgcctgctctatcatttcctgcaaggtagttttatcgctggcttgtgcatatcccacggcaatctgaaaaacaaaacgatgttcctgctgtcgaatcctatcccattccccttgtaattcttccagcatactcgcaaaggaatcttttgaaatatttaaaagtaaaacaacgaattcatccccgccgatgcggtaacaacacccatgaggttctaaacatttacggatgcttgctgctgctttcataatataatcatccccgaccctgtgccccaggatatcattacattgtttcagattattcagatccatcataagaacataggacgctgcatctgtcttagaattttccatcagatactcttcataggctgaccgg

SEQ ID NO: 12612 - DNA, 4441 bp, Unknown
  gut microbiota DNA sequence
tcctcttttgcaataaacatgattataatgatagaaagcaaaatagccgcccacaggcggctattttaatagttaaataatattttatctcaggcaaatatagacaagataaatagcatacagaaccagcatgatgatgccttcctttttgccgatttcctttttggtcatgcaaaatacccatgtgatcagtgagaatactaaaagcacgataatgtcgatcacgttctccataaggaaagtgatcgggctgatggttgccgcaacgcccagcaccatcagaatattgaagacattcgatccaacgacattgccaactgccatatccaattcattctttctggctgccacaatggatgtcacaagttccggtaaagatgttccaacggaacagatggtaagcccgacaagcgttgcactgataccaaaacttgtagcaatggtagaggcagagtctacaacccaatcgccgccatatttgatagcaatagcgccacctacgatatagataatggatttccagacgggctgttctttcatttcactcatctcttcgttcatctcacgctctttttcagagatttctccacgctttcttgcatccattgcactcttgatcaaaactacgataaatcctacaaagatgaccaagaagacaattccatcgatacgccccagttccatgccaatgcatccgcaaacaagcagtagaatggcacatagcacagaaaacggatagtctctttttaagacatcccggcttacctgtaactttgagatcactgcacagataccaagtacgaccatcagattaaagatattggatccgacaacattgctgaccgcaagtgtattctgattgttcatggatgccgcaatacttacagatgtctccggtaaactggttcccattgcaacgatcgtcataccgatgatgagtgatggaacctttaacatctttgcaaccgatgaagcaccttcaacaaagaaatctgctccctttactaataatacaaaaccaatgaccagtacgaccactgcctttaaaattgttactgccatttctttccctcctataaatatactgccattctcttatcccaacagatgctcggtcaaaatttttaatcccagtaatactaagatcagaccacctgccagttctgctttcgtcttgtatttgtttccaaaaatgttaccaacaaagacaccgatcgcagatatgaccgccgttaccagacctatgatcgtaatggcttccacaatgttaacttccaaaaatgaaaatgtgatgccaaccgccagcgcatcgatactggtcgcgatcgccaaaatgaacatttccttgatatcaagtggcggatccatctgatcaatctctacgacttcattcttttccctgattgcctctgccatcatcttgccgccaatataagcaagcaaaacaaatgcaatccaatgatcaatcgcgctaatcttatctgcgaactgacttcccaagagccatcccaaaaatggcatcaacgcctgaaatccgccaaagaaaagcgcaatgacaaaacattgctttttgttgaccttgcgcatggcaagacccttgcaaatagacacggcaaatgcgtccatagcaagtcctacgcccatcaacatgagttcaacaagtcccatattactcccttcttctaaagtgtgtggattttaacttttgtatgtgtgcttgtccataaaaataaagattatcttatagaataaaaaagagactccatatgcatatgatctgctactacaaaatgtaatagtcaccatatacatatgagtctcaccatttaagatttgccaggctattgccgggtctgttgacaaatcacacaattcttatgtgctagctactccctcatagccatttcaatatatcggaaatgtcagaaagtgtcaatgtaaagcatgtctcatccattgtacttttatagatacaatcctactatgcaacctttgtttttttctcctccatcttgcgatagataaagcgtacaatgatacccgcgagaattgcctcaataatacctagaatggttcccgtcagcacgtctgttggaaaatgcacaaagacatacattctggaaatggcgatcagcgccgccaaaaccactgctgcaattccctgctttcgataccttgcatactggacaatggataccgcagatgcaaaagaggcagaagaatgccccgacgggaaggaataatcctttggatttttcactaagagcgttactgaatcatcaatccagcaaggtcttgcccgcatgactgtattttttaaaaatacattgatcaccagcagtgaaaataagagggcaagcgcagatgtccaagccaccttcttatctttgcagaaaatcagcatagcgatcgtaagcagaatccaaaagattccggcattaccaagtgatgtgatcgccaccacgatcttatctaagaccggattgtgcagtccctgaaaccaatacaaaagatcaaattcccagtcaaaataaaaaacatttcccattgttgctatcatatgtatacccccagaataattattttatgccaactctaccttgcagaatttcttcttgccctttttcaagataaattcctctgcaaaggcttctttttcataagttgcatgtgaatctgttactttttcgccattgacagaaacaccgccctgctctaccgcacgtcttgcttcattacggcttgtggcaagatttgcactgatcagaagttgtaagatatcaacactgccatccttaaagatatcctctgtgatggtctccgtcggcatatttgcagcacttccggtagaaaagagtgccttagaagcctcttttgcctttacggcttcctcctcgccatgcaccaatttggtaagttcataggcaaggatatccttagcttcatttaactggcttccttcccatttatccatctcgtcgatctgctcaagtggcaggaaagtaagcatacgcaggcattttaaaacgtcctgatcggatacattgcgccaatactggtagaactcaaacggtgatgtcttattcgggtcaagccaaacggcacctgactgggtcttacccatctttttgccctcggaattgagaagcaaattgatcgtcatcgcataggcatcttttccaagtttacgacggatgagttctgtaccacctaacatattgctccactgatcgtctccgccaaactgcatattacatccgtatttctggaataacatgtaaaaatcataactctgcatgatcatgtagttaaactcaagaaaactcagtcctctctccatacgctgcttgtagcactctgcggtaagcatacgattgacggaaaaatgtggtccgacatcacgcagcaactcaacgtaattcaagcccatcagccagtctgcattatttaccagaattgccttgtcttttgaaaaatcgataaagcggctcatctgctttttgaaacaatctacgttatgtgcgatcgtttctgttgtcatcatctgacgcatatcggttcttccggatggatcaccgatcatggctgttccgccaccgatcaatacaaccggcttatttccagccatctgcaagcgcttcatcagacaaagtgccataaaatgtcctacatgaagactgtctgcggtagggtcaaatccaatatagaatgtagcctttccattattgatcaactccttgatctcttcttcgtctgttacttgggcgatcagtcccctagcaaccaattcatcataaattgtcattttttcctccatttccgcaacctgacaaaagttgctcttatattctatgcgtggaagatctgttacagagcgttatttataggaataaaaaaacgccctctatcttcttccaaagataaaggacgagtaaactcgtggtaccacctttattcacaaatatctcacgatacctgcctcatcaagtctcataacaaataatgtcatgtgaaactcttagcacgataacgtgtgccaatccggcgcatcctacttttgaactatagatccaggttcagactgctactcaggaaggtattcaagataccgtcttctgcgtctcgcaccaaccgacgcttctctgattccgatctctgtatctctactcttttccatcaacgtatttatcaatcttcctcattatacaggcgcaggttttcatttgtcaacaagtaaaaaacggcatgcgcaatccaaggactgcacataccgcttttacaagaagggttttatctaaaatttacggaaattgccttgatccggttgttatcggtagaatttgtttttgtttttcccattgttgttttacccctttcaacacaacttgtattggatatttctatcatatataattatatgtgatagaaacatatcagtttt

SEQ ID NO: 12613 - DNA, 6516 bp, Unknown
  gut microbiota DNA sequence
agaacttgcagtacttgctcgtttccatacgatctggatgagttttcttgtcttttgtcgtattgtagttacgctgctgacattctgtgcatgccaatgttattttcgtgcgcacaacttccacctccacttaaatttttcttgtgtttttctatgccagaaatttaggcataaaaaaaagacctacttccgtcgcttaacaactataccatagcccttgcttttccgtcaatatattttttgtttttcataagcgttttttcacagaaagctttttccgtaaaaatccgcgccatcactcctttggcttcgtaatgtgatcataacactttatatccgcattataaataagaagtttccatattttgtggatgacaagccggcatttccgtactataatataagtgaataaatggatttttataccctgcctacaaaacgccatagaaacatggattgtttctcttattgttttgtagcgtatttcaaggaagaaaggaggggatgtcttatggcacgcattgatgccgcttacaattatctattgtctacctatggcaaggccacaggttctcgttatgattcccataagaagagtgaattgcgctcactttacaacaacatcataaagacaaacaaggaatcccctctatataagattacgcagacgggggatgtcaaagaatttgccattgatatcaaggccaatgcccatcaactgcaaagcgccatttctgcgctcaatgatgacggggatgatattgcatctatgctcaagaaaaaagtggcagtatcctctgatgaagataccatttctgtacattttgtaggcaacgatgctgaccaggaacaaaacggcttcaatatggaagtcatttctctggccggaccacagaccaacgaaggtcattatctgcgccgcaatgattatagctttgaagagggaacttattcctttgatttggacatgccaacgaattcctatgaattccagttcaatgtcaatcctggtgataacaactttgacgtccagagcaaaatcgcccgtttgatcaaccagtccgacatcggtctgattgcagaagtaaagctaaatcgccgaggcgagagtgcccttagcatccaatccaaacaaaccggactttctgcagatgaaacatccattttctccattcagtccggaagttcctggaacgaaatcaatacccttggtatttcacatattacgacgcctgcaaccaactctgttttccgtttgaacggacaggaacactcgtctttgtcaaatacctttaccatcaaccgctcttttgaagtaacaatgcataagacttccgctgatgcaggtaagccagtccatatcggctttcaggcaagcactgctgccatcacagaaggcattgacaatttactgagcgcatacaataagttatatgatgtaggaagcaaatatgccacattacatggcagccaccgcctgttaaacgaggtttctgccatcagtaatcatttttctgatgcacttgctgctgttggcatttcctctaatgaaagcagacatttacagctgaatcaagagcagttctctgctgccatctcaggaaatgatgcttccgagcattttaacacgttgaatcagtttaagagtgcgttgtccggtgaagtcaaccgcatctctattgatccgatgcgctacatcaacaaagtaattgtagaatataaaaatcccggcaagacttttgtagcgccgtacgccccaagtgcctatgccggaatgttgatcgatcaggctttataaaacattctcttctttcagaatgttacacatcttcctcattcgctcgatgtaggtatgatctgtttttacacgttcatacccacgtcgggcgatttttttacgttctttttcatgttttaaacaaaaatcaaaccctaatcatcccagacgctccaatcgctctaatgccggctcataatgacccgcttttctgtaaaattcttttgcttcatccatacggtgctgcttttcacgacactgcccagcatagtaacaagaaagataactgttgcttccttcaatcgcatccgggcgctcatttgtggcctttgcaaactcgatcacggcctgttcaaattggttctgttcaaaataaaccaatcccataatcatgcaaaaatcggcatatttaccaaaatcgtcatatacagcctcgagaacgatgccttccttcccctgaccactgttaagcaaagataagccgtagcccttcaccatctcaataacaaattcgtcctctgtatttaagttgaatgctaagcccgtctcaaaatactgtgcagccgtcgcataatcctctataatatagaaactttttccaagtgtatagagcagatagccaacttcattttgcacttccggtgctgcctcctgcaaatcctcatcggtatgctgatttacgaaattgtctaattccatttgcagcagttcgatgcttcgcaacacatcttcacgatctccaataaagtcttctacaaaaaaatcttttgccaatgtatccatgacgtctcccatctttccttcataataagtgttcctattgtaccacaaatgtgctaaggtataaacgaataaaatgatgaggttttcaatatgcataatgaaagaaaaaaagatccttatatgagcaactccgcaaagtggccgagcaaaagaatatcacatggcatgctctttttgtctcacttaccgctatgccatctgtgcttttctttatcatcggcatctgcggcatgattctcatgtttattttcggtgccaaactcgataaaaccgatgtcaaaagcaactggatcgagcaatgcacgaatctcgtggcacagttatgctttttgctggaaattatacttgtgtaatagaaaaaacgacgaattcaggttatcccgaatccgccgttttttattgacgatccaccaaactaactcgtatatccttgtcgagacagtttgcatatttgacaagtacttccatggaagtgatatgcttcttgttttcaatgcgtgccacattagctcgattgattcctgttttgtcagaaatgtcctgctgtgtcaaatccatctcttttcggattgctacaagttcgtcaatcaaacgatcattcaattgctgagaggctttttctatcagtaccttctcttgggatgtgttaattgtgtaatccatgtcatcctcactttcagttcgcataaacaatgctatgataggagtataccactctaatgcggaagttgacaaggtggaaaaaaggggcaaaaactaataattcttcatttgccataaccccttctcctttcaagttcttttgtatcactgataatacgctctgcaattagcatatgcaagaactttttctcgcaaatgatactttttctcccccacaatcatattttctcatattatataaccgcaatgcacgctccttgccctccatcagcatactaaatacgtcacttttgtactctctgttccccaacatacaaactcccttctgtgcctttgcaccttgcagaagttcttcgtctgaaccccctgctctaaattaaattgttgctgtgatttaaagcatgaatttctgaacactttgttgattaatgaacatttaagaataatagaaaaaatgctttgactggattatagcatccttcaaagcatttttacaagaactaattttcgcaagtgatacttgtaaaaattgaaaacgttaattccaccgtccgcactctcccagctctatataatcccagcagttcgcatcatctctcgcactttattgggcaggttatgttcttccaaaacgcgccgccttcctctctgcgcgatctctttgcgaagatcatcattttccaggtagaaccgacatttttccacggcatcttccatgctctcataaaccaccatatcttctccataagaaaagtattcaaccaattccggctgatagttggaaagcagaaaacctccgctcgccataacatccaatgctctctgtggcattcccgactggatccctttcacactgatattcaaattaatatccgataaagcaaaaacataaggcatttctttgtagtaattcactttcccacaccatttcactcctcggagcatcgcatactcctgtgtagagtataattttgtatcaaagcgcatgccaaggagattcagcagtaccaaccgctcccgtctgctggtttcctgatccaaaagatgaaccagttctgccttgcttaaccgaaactgtgtgtctccctgcaattctttaaaatgcacattcaagtcttctataaaccgctcgtcaataacatcatttaaaatgtatgccccatacaactgctgttgtgcgttgatcaccgcatccatatacccctttgcatatggcgtacagatttctgccacagccgggtatttcccctcatacaaacttccaataaaactaatctgtgctttatatttctgcctctgtgccgcagacggaatcatctttttataacgcttggcattcactcccaaaggcaaataatacaccgtatcaaatccctgtttttgatatgtttccgcctgcacacggtcaaagcagaatacataattattgggatttcccaatgtcttttctatgttgcgcacattaaaagggcaatcatagccccatgcaatgtattttagccctttgatatgacacaactccgataactccggaaaataattgatggaaaagcagaaatcatatgcatcagccgataattctgcaaaaaatgacacaagttcctctatattctcttgttcaaaatcaaacagaaacgtatcaaacgctattcctgattgccggaacgcgtcatgtatatcctctctgttgacataggtttttctctgattccaatcgtacaataatattttcactgctgtcgcccttgccctatctcttccgcaaataaaaatctgccatttcaaaatcttcctctgtatcaatatcaatactgttttcccttggcattatataggcatactccatttcatccagaagttgtatatcattgttgatatatgcaatcttccgtatgtataatgctccatttatacggtaatatgtcggtagattttgcctcggcatattgctattggtacacgcttccctatatttttttaaagataacgtctcatctaaacacatcgtccacaacggagaatgatccatttcacaaaccgaagtaatggcctgcgcgtgtttttgttccaacaatcgatacgcacctataatatcttccgtccgcctcagtggtgatgtgggttgtaacaaacatatggtatcaaatctctctcccatattatagtaattcagtagtacttctttaaccacatcccaactgcccgcaacgtcagtgcttgtctcatggctacgcaggaaaggcacatttgcaccaacttctatagcaacatctctgtaatgttcactatccgtacttaccatgatttcatcaaacacacgagatttctcggctgctttaatagaatatgcgatcattggtaaaccatttaattcttttatgtttttatcctttagtccttttgaaccacttcgggctggaataatagcaatgtttctcatatatcatcccctatatcaatatcataaaacgtttttttcacatcaattgattttgacgtaatttgtttcaataaatgcaccatctgttgagatgttgttccatcgccaaatggattttgcacctgcttcactttttctctaaactcactacttcccgcgtatcgaattgcattttgaatgcttcccttattactgtcacaatgcacaacactttccgcaaaatatcttccctgttgtcgatcaccaatatctactgttggaatatgcaaagcaggtccttctgttgtcccactagaagagtttcctatcatcatttctgcgtacttaagagctgacagatatcttttcaccccaagtgaaggaacaacataaaaatttttatgttcttttgctgcttcacgccacaaatcattaattttatttccccccgcatctacgttagcaagtgttataatgtacatatattctgtgaaactatccaatgcttgtattaatgcttctatctcatcctcttcatgtcccccttccattgtaactggatgatatgtaacaacacaatattttcccctttgcggcatacctatatcttttcgtatttcctcttcgcttaatttttcagcattataacaattttcaattgccaatgatcctacattatatacattttcaggggattctcctaactgaataacccttctcctatacacttcacatgtaacaaaatgaaactggctcatcttggtcaaagaatgacgatatacatcatcaatagcgcctgttgttacacttcctccgcataaatgaaccataggtatctgtaaagtacaagcagcaacccctaccccaaacattt

SEQ ID NO: 12614 - DNA, 44012 bp, Unknown
  gut microbiota DNA sequence
cctgtcacgatcaaaatatccggtctgttattacaataatactctgtaaacaactgaatgatcgcccctatttgttttcctatgccatcaggtgtattatcctcaatgttcggtatctcaatttgttcagaaatttttaatgggtaatttttcacttcccctaatgtataaccactaactgaccataaatgagatcctgtcacaacaaaatccaaatcaaaataattatccttttggagttttaataataagggtaacaattgcccaaattctgcacggcttccacttacaacagatatttttacttgagacatataagttcatcctctccaaaatctctaacagctttagttcccaatacctcataccatttcataggtgacacaccatttccaggtctcttcgtagtaatgttttcttctgtgaacacctcaccttgttttatatctcttttcgccacaatgctctttcttgccacaatgatattcggacgttcagcctctgagcattttttcacaccatctcccattgccctctcaacattcctaattccacgcactaaactagccaattcgtctggctcgatgcttgccttatgatccggaccgaccatattacgatctaaagtaaaatgcttttcaatcaccgttgctcccattgcaacggctgcaataggaacctctatccctacactatgatctgacaaccctacgggaacattaaattgttgtttgagtgtattcattgcccttaagtttacatgatccatcgctgtcggatagtcagtgtgacactgtaacaatgtaatctctgatgttccatattcgcgcaatattttcatagcaacggcaatttcatccatctcagccatgccagttgacataattaccggttttctcgtctttgcaatttcgatcagataaggaaggttggtgatttcccctgatgggattttccaaactggcaattgcaaagaatccaaaaaacggacactatcaatatcaaatgctgtagaaagatactttattccttttttagcacaatactcatacaactccctatgctgttccaatttcaaacggagtttcaatgccatctgtaactgtgtctcatcagcccctgtttcgcgcttttgatattctgctttcggcgcatatttagatgtgcagtccaccgccgtctgaaacttcacataatcagcacctgccttctttgcctcatcaatcagtcttttggctatatccatatctccattatgatttacacctgcttctgcaattataactgttttcatatcaattcctcttttccaactcttatcttcccctcaactccaagaatctgtctacttgcatttcttttctaaattcttcgaacaatttatgcacatcaaatactggttgatatcccagttcctcttttgcattaagaacatccatcaaaactccacctccagcgggcttgtcttgcaaacatattatttcagacttcacatcaaccgggcaaaaaacatctcgtatagcctccatctgttgttgtgatgtgaccggtattccggtaccacaattataaaatccatgtcctagtccttgaacttctatcgccttacaaaacatctgactcaagtcatctacatacaacatatcttttgcataatttctatctccccaaatttccagaggtttcccttccattgcattaaagattaatttatataaaggacgtaatgttttcttcccccccggataaatataatgatttgtgctataagaatatactgtaggaaaacgaaatacaaatgtattcaatccatattgttgatgataatgctctaacatttccactgcagtattcttacagatcacatacatcgcatgatctccagtataactatattttaaaggcatatctggtttaattatcatatcctttggatattcccatacatcaaaacaggtcgttgaatataaaattcgatttacgcaattcatgcgacaatactccaaaatattgtacgatccttgaataatggagttaatatattcttgaggatgatagccttccatatacgctggaattacagctgcaagcaacaccacagcataaacatcttcggttggaaatttttggatatcctcctgttttgtaatgtctgccgatatatattctatccccattgttttaaatacatttgctatgggtctttttccagatgcaactatctgatattcatctcctcgaaaatactcaaatgcatattttgtgaagtatgaccccacattaccagttgctcctaatactaaaatttttttcacagatacctcctatctacgatactgaatcataaaattattatttacatcaaatcccggatccatcctttctctacagaccagcagtttctgatatgcagcatcatcaaaaactgttcttcccaccgcaaaggggcttcttccgtttctattgaactgttttttaaatccaaaaagagaatcatctggtgccataccccctcccagatgaaatttttttatcccctttttatgtgcccaacatgccacttgatatagcaaaagattactcggagaatattttctaaattccgttttacttccagataaatgataatgtgcaaactccgaattataataaataatagcaccactaataggtacattccttcgcatagcataaaaaagacacacgttgtctttcatttcattcagtgaatcgaaatattctttttcaaagatatagtacttagcagcctgatttttaatcatagtttcattatacatatctataaaatcatctatttcttctatctccctttgttcaataatcacatcatttttctgtgccttacgaaccatattgcgatttttgctatccaaattagcaaaaatctgcttctcatccatatctacatccatatatatggtatctcgcaaatatctgctttctatcacattagacaacatgttttgattattcaacaatgggtgaaacctaacgaactgcgaaaccaccccattttctatacaatattgttttatctcatatgcaaaaattcgttgtgattccgtcgatattattttatcacccaagggtcccccataaccatatggtgtttcccaatcataatattttttcttttcaataattccagcaaatttttccgaatctgcaatatctttctgcatgaccacatagcaaaaccgctcccctagatgttcaaaataaatcaatttaatatccccatctccatgcaacataaaagagtaggcatattcatataaataatatatatcccaatgttcaaatgatttcacacaactattccattgttgtttatcatcttctccatatattcttaaaatgttagtgtcctcccatatcttttgattatatctatcatataatccatctcatctcttccatatctctgatcaattggaagagaaatcagttgttccgcattatcttttgcctgttttcttgctggcaccataaaactatctgttggccaatgaaccgcacaatatacatgattttcgagtaaatactgtctaaacaaatctcgtttcctgaccctcaaagggagcgcaaaagggcactcgccttctgaataacatctgataagcgaaatattcatactctgtaatgcgtccgaaagatacttttcgttctctttccgctttcttatcatattgggtatgtctacacattcaatctgcaaacgcgccaaatcagacattttttcaacaaccacttgtttatctaatctgtcctcatagcgttcaaatatatctctataaactctattggtatcgcacaaattcttgagaaaaactccttttagaaacattcccaaggctctctcatcttgattactttttcccagtttcaaataattctcttcgtccaacactccggtcttctccgcgtaaagaatccccccctgagaaacaggcatccattttcgtatgctcataacacccacgtcaccaataagtttttgtccagaaaaaaaactctgtgtagtatcttcaatcattagtgctcccactcgagtaactttatgataaatttctttcaaaagatttacatcctgtaagaaaccataataatgacatatatagaccacccccacactatcattcagttttgagaataaatcctgctcatcaatatcaaatttatcatcgatgtgataaaaaataatcctacttttctcataacatcggattactgactcgcaaatatactctggcaacaacactgtctttctgctatcatacgctatagtcctaatagccgatctagcactatcataccattgcaccatatatgattccaaatactgatataagttgttttcctttttggttattttctcacacgaaagatcaaactcacttcctaattccataagaacttcctctataaatataacctgcattctataacttattaaaacttcttttccatttgtgcatatatttccgtatgctttaaatgttcttgaattgttatttttttcccatcatctaattttttcaagaacgattctgtctgcttatatagccctggcttatattccttatctaacgcatcatcgatttcgtattcttccactgatacagagtttaatttctgcatctgtaatttttccatcggttttaaatataatctatgcttgtgagtcatgagttccaatgcccatcttcccggcgcattccaatcagcctgataggaaaaaagaacaccatttttcgtaatccctgcgccagaataaatgcaaccacatttatgccattccagactctcgtcctgtttcacataactgcacatttcttccggttccccaccgaaaaaccatgccaaatctaccacgtgcgtactatttgccaagaaccacgctttccgaatctcctcactcttgttttccacagaaggtctgaccctctctccccactctgtaaattcaaaatgcatatcccgaagtccgccatctgctctaattatttcaagtgctttctctgtagaggcataaaatcttcgattataagcaacatagaccttcgccttctgtgcataagaagcatcactgatctctttgatttctttgtagttgagtccagctggtttttccagcaaaatattttttattcctaaatgcaatacagaaatacaagtatcctttaaaacatctaatggtgtagcaacaatagcataatcaacctctttcacatccttcggctctatagactctacgccacctacaaccaccctacaacctgtttcctgctggaatttctccgcgctttccttgcctcggccaatggcaaatacttcacatttcattgcccgcaacaccttataatactccagccccatgtagcccacaccaaccaacaatacttttacgttatcggacatactcctttttccaatcctttcttttcaaaaaaatcaataaaaggctctatatactgcaaatgtaaatccatcgccaacttatatgtcgtcaaattacaggtccctttttccaaaatatcctccacaacttctgtggtcgtttgactcacataatatggttcaaattgctttatcgtcatggttccatcttgttccactgatgtatacagcccctttgattcatccacactgtattttttattatctgcaagaataaccgtttctgaatacaaatgattatcatagcaggaaattgtaaaattgtgacattttccacatctgcccgagacaataccaaatacttctttatatccttgtcttttactatctactactttatcctctaactgaacactttcaatccgaagttgatcactacccgagatcatacaaacagcatccagcatatggatacaattacatgcgaatccccaatttccgccatacgtatgaaattctatgtcatgggcatcctctaactccttttgcaaagccttccaaattggcgcataacgtcttgtacaatttacccacgcggatatatttaattccttcaatcgttccgatacatgtaagtaatcttccaccttttgaaataaaactttttcaaatactatgtacttaacgttggaatgttccaccagttgatcaaacatctcccttcgacctttcgacgacatgggaaaaatcactaattcaaaatccgtcgggaactccttgatatctgtgacaaagaaaatggttttattatgatacacatccttgggttcaaccgctttcatcgcctctggattgatatccatacagtagatttccataggttgccgacatttcatcacggcctccaaatgcctttttcctaaggctcctagtcctatcaatgcaacatttgtcatcgtattgcctcctgtctttattccaaaatcagtcgctccacgcctttgcgccgcagcatacaacgttcacacaaagtctccttatcatctgcatctttcagaaaaatatcacgatatcttcggtatccatcggaataccatgctttctccaaatcaaagtcctgtttcaaatcataaaagaaacaattggtatcatacgcatcgcagcagggcattactttcatgttcgcgcctatatacatggtattataaagaataggacacacatattcctcattgatcgttgcccgcgaatcatccatgattttatatttttcgataaaatccgcatcaaaattaagccgattcatcagcaccggtataaacaaaatatcatccacatattgtccaaaaatctttcgaacatcatcttgaatacctaatgtctgcttggtaatgacacaggaaatagatgtagcaacggacagattattctgtttgatgtactctgccatatatttgatattttcaagtacctgttcataatcatccctgccatgaatttctgcataagattctctatccgaggcattgacagaaaaacgaatggagtccagtccagcatccagaacttctttcatcttatctggagtggctaatgcaccgttggtagtaagaaaggtatattgaaatcccagatccttggcatattgaataacccttgccaagtccttgtgaatgaatgcttctccggccatataaaagcctacttccttttcgcctatgcccaatgcatgtgcctgatccagtatcgcgactgcatcctcatacttcatcatagttgtttccaactgctgataggccttttctccatgaaatgggcagaatacacatttctgattgcaattggtatttaattctatatttaacgattttggcaggggcggtttctcactaaaatttgcatctcctccaaaacgatttttcatatgctcacgcatggttttctccatcataccctcctactgattttcaccaaatagttcctcataatctgtctgtgcacgttcaaagtcatctaactgcccaatatccatccagtactccgtgagtggataacttaataatttttctccttgctgtatcaatctttcgaaaacatccggcatatccattaggttttccttttcaatcaaggagatgaccggtggatttaacacgtagattcctgcacttacaaagcaggtacttcttggtttttctgtaatacctcgtatttcatttccatcacattgaatcacaccatatggcacctgccaggaatatgttctggacaccatagtagcgcaggcgccttctcccatatgaaaatttaataaggcctctaaattaatatttgtaagaatgtcaccattcatcacaataagcggaagtttttcatcttttgacaggaattgcaaagaacctgccgtccccatcttttgtttctctcttagatactcaatggtaactcctctgtctcgaccatccccgaaatactcctcaatcatttcgctcttataattcacagaaataaaaaagcgatgaaatcccgcatcaataaaattatctatgatggttgccaaaattggtttccctcccactttcaacaaaggcttgggacaactctctgtcatcggacgcaatcgtcttccctcgcctcctgccatcagaacaaccgcattatcctttggtgttgcacagataagttcttgaaatgtcttaatttcacacaccacaccattatcatccacaacaggaatctgatggatattataatctcgcatcatcatcctaagttctgcatcagactgtcttaaattggcaattcgaggatttgtgttggcaatttccgtgattggatgaaaaaaatcaacttttctaagaaccgccctccgaatatctccatcattgataatcccgatgagtctttctctgtcatccactatgatggctaactgtaaaccggattcattcattttatctacagcttcgtaaatggtagcctccttatgaaccaggcactttctatatctggcctctcttttttctttctccataaattatatcctttgcatgctaatgaatgtgttttctaattatatcccgtattgcttccactaccagttccatttcttgcatggtcagttgcgtgctacatggtatgttgattatgcgctggctgtaataatctgctttctcaattcggtagattaacgcatttctatacggtctctgctcatgaatcaacccccaaatcggtctggtttgcacctctctctgattctgcaattcctcaatcactgttttcagatcacaatccattttttcaattggcagttcaactgcataaaaccattgatttgaactggttcccgaacgaaatgataataagcgcatttccatgtcatttctatcaagtttttgcttatagtagtggtaatttacattctttctcttgataaattctggcaactcctctaactgtgcaacgccaatggctgcctgcacgttggtcattctgtagttataccctacagcatcatggatataatagtggggatcatcctttgcctgcgttgataaataccggatgtatgccgtctcctcttttctcttagcagtgattgcccctccaccaccggtggtaatgattttatttccattaaaagagtacgctccataatctccaatcgttcccgcatatttacccttatattttccctcgatatactttgttcccaaggcctctgtagcatcctccactactttaagatgaaacttctgggcaatatccataacttcttccatatctgccatgtttccaaaaacatgcaccacaaccagcgccctaacaaccgcttgattctttttatagataaggtttcctgtatcctgacatatttcgcattcctcctgacaaaattttcgcaatttcacaggatccatacataggctatcatcacagtccataaagataggtcgtgcgaactgatattttaccggattcactgctgcaataaacgttaaggttggaacgatcaccatatctcccggctgcactccacaacaaactaacgccatatgcaatgccgcagttccactctggcatgcagccacatcctctacctgcaaaaattctgccaaccgatgctcaaactcatttatataggctcctcctgtagaaacccacccttgctcgatggcatcatctacatattttttttcgtttccttcaaagttaggaatagataatggtatcatttcgttcctttctactacattttactatccaagtttttgccggtttccagatgctcaaagtttggcagatacccctgcataagccgtactatatcctctttggttgcatctgtctgttcaaacgtttcctccaacgcattaaataagcctatcattctgtttctatcgggcattggcttatcctcaacaacccctaatgcctgatactctcttttatttacaatttcttcatctgtgtagaattcctcatagggcttttcccccgaagtatctgacatggaaaaatgtaccggatagtctctcacaccacttcgcagcgcctctgcattccgaatggcctcctcatctgattcacattgtaaaacccgatatccattttcctctataaaatgttctgcaattttgtcaaaactcatcatctgggctgtatccaatttagggaaaaaaatctctctattttttcccagtatacatgccaatacgcaaatctgcccactctcctccggagatacaaaaaaccttttgacatccttaggtgcactaatcggctgttctttcctcattctttcaataaaacctgcaggcaatgagccattagaaaaagccacatttgcaaatcttgctgttgtaaccgggaattcatccgaatatacaaaaatcaaatcctccatgatgcgtttacttgcccccataatgttaaccgggtttgccgctttatctgtcgaaacgcaaaagaaatgttccggtggatactccgttaataaatccagcagttttttcgcgttaaacagattgtttcttaggagtgcttctaccgaataaatatctttttctgacctcacatgcttatgagcagaaaagttggctacaatatcaaaaccacatctcttacgaaacatcttttcaaacacctttgaggaataatccataggatacgtcacataatcctccggcactttcaaattcggatcagttctgagatcccgtgtcaactcagccaacgcattctcattgacatcaaccaccaccagtgactttggcgtatagtgcaagatagttttaataaaggaagatcctatagatcctgctcctcctataaccaaaatatttttcccatctatcccttcctttaggcgttcttcatttgcatttatatcttgagcaaacatactttctgatcgttttgtaacatactgattgataaatttttcaatattgaccattctcatcctcaataaaaaaacctgcactaagtgcaggttttccttctttcttacgactccattcgcactttccattaaatccaatttaatgtttactttttcaatatttgtatcgtcatttcgtataaataacttagcttcttgccaaggcaaattgtgcatttaatcatgattcaattttcgatattcttccggtcgcaaattatccattccatcaatatatgctccacaagatatattaataaattgaactccattttctcctttaatacgcttttcaatccatttacgaaatgcatttaaacttggtatcgtatcaactacaccgccatcaacactctgaacctgatacctactctcttgcccatctgtagcaatccgtgatagtgcgcccgaaacatggctctgatgatttgtgtatgccaaatccaaccccagacaaataacctgccggcatccatatcgtatacataaatcaattgcagttgttgatacagagcctcccgtggacaccagttctatctccttatgcatagcgtagatttccgcttcatcgtatccactttgaaaaattgcatatttttcaccctcaaacgtcttcactgcctttgcattagcggtacataaatataacaatttgataggtagtccactatctatgtcctctatctgcgtacaaacttgattcattccatcactgacaatcacgtagtccggaatgattcctttactaatcaacagttttgccgatgttcccacacacaggacaatatcttctctttttctgtatttcaaaatatccatgctgacatccagagagggtcctcccgccacaagccaaacattcttgtcgcaaaaatcctctctacaattttcagaagaaaccacatgcttattcctcgtaatattttgtctgtaattccactctaaaaggccctgttgttcccgattcgtcatgattttaacataaaattcttctagcacttctttttcactttgcatttgaatatgacgcatacttggtttatgaatcaatatggttcccgcttgctcataagagccaagataatgaacataactgtctattacgagttgaaatctttcattttccaaaagttgtgtcaaatccctgcattgaaataccaatgagagtaaatatggatcttcctccaccattacaagttcaatatccggccgttcgtccaatatcacctgtgcctcatataacattccagcccccagcatcacatatttatactgtccttcttctatattcgcttcccaaaaacgatgtgcatcccgatatggattattatttccgctaagataatactgcgcctcattttcttccagacaaatggttggctgtccggatgatgtcgtctctatcctatataggcagccctctctcggatatgcctgactaaaaatatctagcagttctcccaacttggcattggtttctaaaactgccaaattttctattaaataatctgtcgtagaaaaatccaaggattctgttttttgttgcacaatgttctccaatgtcaggattgtctgtccttccaaaacatctgccatcagaatttcatcctcattttgctgtgcctccatcaacaatgggagacccaacatagtaataatttcttctcccgcgatttgcgcatattcagatatatgtccctccaacgtaatcaggaatttggacatcaagacaccggcacgcatcgaataattccgccgtaatagccagacaagttcctccgccatgtttagtaaatttatatccatccatacagaatttggtgccaatgcttctgttgtaatcgtttgtttgatccaatccgcaagattcttttgcgcatcatcaatcgctacaatctcaagtgtgttctgtatccactgcttgtgttctttctcctcaaataatgctttcgtttctggcagtaattccttagtcaatgccaactgtatcactgacccatctgcacaaatcagtcctgcaaagatagcatacgctagcattttgtatatacgctcctcttgcaaaaattccgttcgcattaattgctgcttattataacgctgtggatttttcttatacagcgcataagaaagcaacgcttgcttagcaaatggaagaatttctccatatgccttcaactcccaatatgcattgataataaattgcagtgtcccgaatttatcatatggacacaacgattttttcagaaactgtgttccctcttgtataatctgttgataatcttctttcctttcataacaataaagaatcactgtatggcatgcatcccaatattccgaatcactttttcgttgtattacctcatgggctcttttttgtgccatatcccactcttctgtatcaaataaatttatcacagcctgatactgcatccgcatatcccatgggcgttctttacactccagatctaacagttcttgatttctcttatgttttgccagtttttcctctagattcctatatacatatccataatgatgtacataactcgctaacgagtattttttctgtatttctatacccgcgtatgcctcatgaatacgtctttcaaaatgcaagcccggctgtatccgaataagtctatcaacattatggtctaggtatgttttcccttccatatccagataattacgttgtttataaaaggccacttgatactcatcacattgttctgacaacaaaaagttttcaatagcttctgtattttcaaaccattcatcatcatccagatacaaaaaccactgcccccttgcttcttgtaatcctacatttctggcagccgaaaaatcttgacaccatgtaaaattaataatatgatctgtataattctcaataaggtctcttacctctggtgaacaaccggtatccgtaagaattaactcagatggcacctcctgcatcaaatgattaagggattgcaggcacctagttacattttccttgttccctgaaatcaaaacggaaatcgtcagttttatattttcttttcccatataaaacttctcccaatctttttttaatttttgtgccgccaatatatatgcatctataatttctattccattatttgctatcttatcgatttcttcatatacattattctctcctcttacttccaaagaatcctgtaaatcataacttttttgattcgtgtacatacgataaagcatcagttccacatcattttccaattcactggtagcatcagaaatttctttcatgcattgcttaaactccgcagtttgattctttctttttcggttcaattccaataacgttttatattttcttcgaatcttctgaaagcgatcgacatttctctctatatggttatacatctgatctatctgcttaatcacctctgtctgtttctctcttggcaaaaagtaatccgcagaatctaacatttttctaaaatctactttacgttctggacaatatgtctccaaagcctcttttaatgacataacttccgtccccttgatgagtgcccctccctctgtagcatctatcacatgccattgcttttctaaaaccaatacatcctcataccattttcgataaatatccataatcgtctccgtcagcaccggttttccatccactccatctacataaaaatagatatttttttcttcatctatcttatcttctttcaagactccatttgcatggatttttccatccgggtaggcaaaatcctgccctatcaaaataatatgttttgcattcaaatatcgggcaagagaaaatgcattctgtgtcacagaacctcccgtgcctagataacctactttatcttctttcaaaaaatagtcataaaaatccacatttagggcaaaataaaacttccgccccttaaactgatctatataggtccaggaacattccgcatcagtcaaaagtggaatggtacgacatctttcatcttcaacgggatattttttccccaatccaagactaggatcaaccgctacattcaaatctggcataatgccatgtctcactaatttatttaaggctgattctacgcaaataataaaggttcttccttgatatttgcgtagcacgtcaatatttttatctaaagatggaccagcccccactataacgatcggatatcgttccattacctcttcatcaatcgcattttttatatctataagaccagcttcacgaaaaaaagatttcaaattgtacacctgattctgtgctcgctgcctcccctgttttaccagagtatatctttctaccaaattatcttctaatttatttttaagacactgatgaaactctttataatcttcttcccagattttatgataattaggtatctcagcataaagaactcttttataatttgtacatgttgccgtaacatccaaaatccggatcaaagtttcctttcgttcttcccccgcaagcaacatacaccttttatcttcacagattacccgatactgccctgtctgtaatagacgaattacattttcctcgtttggttcatagataataatgacattgtcttgaaatttttcccgcattttttccagatatgcaatgtgacccaagccaaaaatataaaaaacgttatccgaggtcactttctgaaactgctctacccatttttccactgcaaaagtcatattctccctgctttccagcaaccactctttcccatccgagtctagataagtcatgtcctcacgacattgataatggtcatatttttctatattaatctttatatggtcctgacatttcactaacttttcatatctttgctttaagtctttttgcatcctattcaacctcatctatcacttcttgcaatacaatagcaatatctcgccattcataatacagacaatctgccaatttataatcatccctatcacacatagcttgttttaaatgctcaagtgccacttctgcatattctgtcgggaaatcgattccaagtgtaaaaaacttctgtactttttgcttcataatagaaacaaacgttacgatttgcctatttaattcctctacgtctataccgcgtccctgccacaatcgggtggcctgtatatccatttcatctataaatttttctattctcatgtatgactgcctaacactttctcttcatgtagtattctagatacctcataaataacttttgcacagattctaatatcccatgtttttctgcctcacgaaacaaatttccgaccaaatcgtcaaaaagatccatctcctgcatctctctgtaatgtgaagccagcattttacaccttgcatgaaaatatcccgccccatcgcaagaaagactttcttctgtctgatatgcttcgaccaacacttcaggaatgaatccaatccgacttgattcagaaacacgaagcacaaaatcccaatcctccagagcacgcaaagtttcatcaaatcctcggttattctcaaatgtttctttttttactaaaattgtaggtgtaccaatcacattgttgatcaacaatgtaggcaaaagattcccctcacgctcccctatctggtcattgggcactggcaccttacagccatctatatgatgattcacaaaagaactatataccatgtcaagttctgcatgtttactaagatagtccacttgtttttccaacttatccactatccaaacatcatcgctatcctgaaatgccaaataatcataatgagctaatttaactccatgatttcttgatgccgcagcgcccatattttgtccatttttgatatatgcaattcgttgatccccaatactttgaacaatctgttgtgtactgtccgtcgagccatcatccacaataatcaattcccactttgtataggtttgatccaaaattgactgtattgccctcatgataagcctgcctctgttgtaagttggcaaaataatactaatacccacgttgtccggcatagacgctccccctttttcatcctctagtatacccgtatattatgaaagggagccatagcattctatgactccctttatagtattgtgtacgaatactctgattctcagatgttttatcacctcagattactgaagtaatgataaaacaccttgtgttgactgatttgcctgagcaagcattgactgaccagcctgctgcaggatattgttcttagagtacttaaccatctcgtcagccatatctgtatcacgaatacgtgattctgcagatgttacattttcaacgacgttgtccaagttgtcaatagtgtgctctaatctgttctgaacggcaccaaaatctgaacggaactcagaaatcttctcaattgctgtagaaattgtaccaagcaatttctttgcgtcagaactggtcttaaatgaggaaattttttcgactgctgacttcaatcccttaccaccaatagtgatgttattcgctgtctctgtagtatatcctacaaaaatctctacaccttgaccagcaagcatcttcttaccattgaagtctgttgtatcagcaatacgattcatctctgtcttcaactgtacaacttcatcactgatagatttaacatcctttgtagagtttgtaccgttggctgcctgaactgccaactcattcattctctgaagcattgagtgtacttcgttcaaagcaccttctgctgtctgcactgcagatacaccatcctgtgcatttgttgaagcacgatccagacctctgatctgcttacgcatcttctcagaaatagaaagacctgctgcatcatctgctgcacggttgatcttgtatccagaagataacttctctgtgctctttgcctgctgtccagctgtaatgttaagaactcggctagcgtttgctgcctgcatgttgtgttgtactaccataattcattcctccttgaatataatctgtcttccatgacagatgtgattaaataatcagtgagtccacctttgccgtacacgctcgggcttcctcacgggcaagtatttcttgcccttgtactttctatatcggagacattttccaatacttaatacctaaatggaaattttttattttttccgatccataaactgcggatcaaccgtattcatcttcatcatattttgataataagaattgacaaccttacggctctggcggatctccttggtctgggtgcggatctggctgaacttggctcttgccaattcagagttctgcttctccaagacctgtaggttggaactgcgctgtgtgatctcccggatcatctcctgcatgtgagcgatggaatcacggtactgatcccgattgttttccaactgatccttgacctttgcaaagaaagcatcaaagccctgatccagagccgaaagccgatcgatcagttttcctttttcttcgatattctcttcaaaagcctccggcgacgcattgggatcctttaagatctctgcctgttcctgacacagcacctgcaagcggcgcaaaagatcgatcttagactccagactgtcttctaaaatctgaatataatttttctcgtccatccttgctcctcttatgctaccactgtgccgttctttgtgatcttcatgacttctttccatgtatcacgcatcgtgcgcagatgttttaagacctcttctaaaatctccggatcttttttcatattcgcctgaatcaggcgatccagaagataatcatagacagcatcgaaatcttttgccgttgcatatttatgattcaaggttgccttaaactcaccgataatccgttctgccttctggatattggtattcgccttggcataatctttattttcgatcgcaacgaccgcaatattgcaaaacttgattgccccctcatagagcataagtgtcagttctgccggtgaagccgtcatgatcttattctttgcatacgcattatacccattattaggtaccattggttttccccttcctactcaattatgaatttccaaacaaggatgacaaggatgatgtcgaactctgcagttttgcaagagaggactccatctttgaaaactggttatagtaacgatcttcataatcctggatctttttttcccactgcttgatcaaggtggtgtagttgctatactcagaagccatctgcttgtcattgtagatggtataggtacttcttaaattggtacccttcatctgcttatccagtgctgtatacagaccggaagtcaactgcttcataaagtcaataacagaatccggatcgttttccagtgccgtcatgagtttgtcggtcttgccggaggtagcagtatcctcagaatccccatcgatatgatatgcatagttctcattcttggaagcattcagatatcccaaggtagagataccaaaacttgccagagaataggacttaccattaactgtataagactgcatcatggcactcgtcatagcattctgaatggttcccagcgtggaatcctttcgcaggatggcatccttgatcttggtctcccacttttcgatctcggaatcgctcatagaagacttttcatcatctgtcaatggatcgtaacccttagcggaatctgcattgtaaagactggtaatctcattgatgatctcattatactgagtcagaaaatccttgatcttgtcataaagcccctgggtatccgtatcggtattgatgctgagtgtctcacccgcagcagtcgttgcaagcgccttgatcgtcagcccattgatattaaagttattggttgatgacgtaaactccgcatcatttaagatgatggtcgcatcctgtgcatctacacgggtcgcaccttcattgtaagcaaacgctgtctctccggtcacgatctcttttgccgttgtgatcttatccgtaatggatgctgccagatctgccagtttatcactgcttaaaaccccattctcatagtacgcagaataatccttgacatcccagtaactgttagccgcaatggtagcatcgttggtcttggttgccagcgcgatctcttccagtcttgcctttgcctctgtcatctgatcatcgctcagataatatgccgccttatcctcgtcggtatagatggcattatcatccacagccattaccgtcttcaactgtgatttcaaggtatttaaagctgtagaatctgtcttttcggtctctgtgccatcttccgcggtctcagtttttttcgtgatcaaacccaacttctctgcaagggtattgatctcttcagatgccagttcaatcttctcatccgcagatacatccagagacggcttgtcctcatcttctacatccagataggttccattgaccttgatagtcttagtattgtaatagtgatagccggttacattaccatcgtcgtccttgacctcactccgtccagtgtaggtctgaccatccggtccgacatagaccttatcctgatttgccgtctttaaaagttgaatcaggcgcgagcctttatcttttgcaagaacatcatttaccgcattttttgcttcggtataatcaatctttgaagtcagttctttcttttctgcatctaacttgctgttgctgtcataggcattggcaagtttttccatgatctcctggattgccttctgagtctcggaagcactgtaagtaacgcctgcgcgcacgatcgcctttccgtcagaatcatacttgatattgccatcatcatccaattcaaaataggaaaccacattgccgtctgcatcggtgcccatggtaccaagtgcataagcagcatttgccttataggcagcatctgtcgcatcggacttcaccaggattcccaaggatgacaagaccttgagtccattgccatctgcggccgccagagcaaaatcattggccgtaccggtctctgtggaactgacaaacattctggagttggtcgcatcaaaactagccttaacacctgcatcattcatggctttgacaacatcagagatcttgctgtccttaccaatcgtgatatccttggtgccggatgctgtcttgacagagattgtcgtatctgcaccggtatagcccaaagaagccagtgtcgtatcctcagtcgtgcctttggcaagtttggcccctgtgatataaccggatcttgccaactgcctgatctgcagactctgtgtaccattgatggcattgctgcccgctgtgatcgttgcctttgttgcatctgaaaccgtcgtctttttcatgctgtaagcagatgaaaaacgcagactactgatagatgaatataaactatatactttggtattcaaagccttccatgcatcctgcttgtaggacaacttggtctgggctttctgatatttttctttctttgatacataagtagataccatagcggatactaatgattctgtatccatacctgataccatacctgacatacgaattgtcatatgctgcctcctatcttctctcgtctaccatgatccccgccatttcccagaccttggcgatcatatccaatgtcttttccggtggaaactccttgatgacttcctttgtctccttgtccacaatcttgatcgtcacacggttggttgcctcatggatgccaaagacagcctcctcattgtgtgcattcttattgatcgtatctacagcctgacggatctgttcgttgctcgcctgtccatcttcccgaacatttcctgtcttgacaccatcttccgtgatcgtaacagcatcctttgccttttgctgcatgctcatgtcattggtagacgctgtaccactctttgccggtacagcctgcgcagccacattagcacttccctgactctggtaactgctgtttacctgttgcattgactctactttcatccttacacctccgtgtgcaaaatataaacgacatcaattcttctacatcttatatcgactgtgcgctggaattcttaaccccatatgcaaaaagagatttgcggatcttctcccacaaatctcttcctatccattctttttaaaacaggttttccagtgcttccagaccttccacattcatggcttccttggtctcttcctggatctgcaaatatacttccttgcgatagatcggcacatcctttggtgcagagataccgatcttgatctgatctccgcggatctccaatacgctgatctcaatattattgttgatgacgatggattcgcctttttttctcgttaatgccagcatctcttactcacctgccttctcttttctgctctttaaaatgtcatagatcgggaaacgtgtctgcacttcatcttccacgatgatctgctcgccacggagattatcggtgttgatgatgatcggtcctttgagattgatcgtcatccgggtaatgtccgatggcacacggatcgtcaccagcacaaacaaagattcctcactaaactgacccagtggtgttaaaagttcatcattgacggtcggattgtagtccgcgcagatgcccgccggatctacgaccggtatagcaaactgtggctcatccagtgattgcagccacatgatcttgccctgcttttcctcatcaaagatcagggtaaaacgtttcatatccggataaccgatcaagcctctgcccaaggtgatgatcttttcctctgctatatcaatttccccaaatagtcttgtttctactcgcatattcctctccttttgcctttgttatggcacattttataaatagttcaaaagtgtcatgccactcagttttcctgccgctgtcaatgatgactggtaggcattatacatggctgtataattgatgatgatctctgaaagatccaagttgtcattgtcagactgcaattcctgcaaagtctcctgctggttgctcattctggtctcggtcaactgcaactgatcccctgtacaccccacctgggtgatagacaggttaatattgctcagatagccgtcaaccttgccgatctcggaactgaacaacttttgcagatggtcatccgcgtaatcagcctctttctgggctgccgtgatccattcatccagtttggtctggtactctttctcggcatactgggtttcccccttcattgcctttaactcggtcagtttgtcatgcgcactgatcgcattggtcacagatgtgatcatatcgtcaatatctctttggatatcactgttgaaagcatcggatgcctcggtatttaccgtcagttcctgattgttggcaacggtataattgatatcatagccgatttccttgccgttttcatcatactttttataactgatcggattgttggcatccgtcttgttggtacagttgaaataatactccggccgcagttcccctttgtcaaatccggtcttgtcataggtcgtagaaatggtcgccttgttggtacggaactccgaggaaacctgctcgccaagtacaatgtttccgttttccttgatcaggacaatatcattgtcgccgacctgcttctgtcccatagcagccgcccagtcctcctcagtatcaaagacatacatggttcttgccggattgactgccgcaccgcctgcatctactgcggtagccgtcttgtaggtaaaattagagccatcggcattggtgccggtctgatctgttgcatttgccagatcgatggtcatggtctgttcctgaccgttggcatccttggtcgtgtaagaaaatgcctgcatgtcatcgatcttgttataagaggtacgcagtctgtaataattagactgcaaggtatcggaaatatcgctgtttaagacctcatccttagttgccggcaccttgacattgccggtataatagcgaaaactctccagatcttcataggtaaaggtctgatcgatctgataagaggtcttggtttcattctccgtaaataccagatcctgatcggtacgatagccggtaaataccgttcttcccgcatagtctgcattaccttctgcatacaactggctctgcaaagacttcaactgcttgaggatggtattgcggtcttcctgattcagggtatccgtggatccgttgacacactgggtacgcacatccgtcatcaatgacttcatgttgttgagggctgtctcagttacatccagccaggactctgcatccgggatattcttcttgtaatactgatcaacacggctcaggctggtgctcagacgaagggagcgaatagcaaccaccggatcttcggatggcttattgatcttcttttgtgtcgtcatctggttcatggatgaattgacactgcctttcgttccattgatattataggaagagttcctcaaaatcatattgttcgtaacacgcatactcgtcaccttttccttttcttataaatcacacgttctaaactacacacctgtgtttaagatcaactggtcgtacatatctgccaatacggaaatgcacttggatgccaaattgtaggcattctggaatttcatcagatccaatgcctcctcgtcctcgtccacgccggatacggacattctctggttgttgatcgttgtacttatgctggtatagttatcggtaaaaacatcacattcctgcgtatctaccgtaacatctgcatagatacattgtaaaaaagtatcgccaccgccaccgcggaagagttctgtcttgctctgcagattttttaattgctcgatcagatcataggcatctacgccatcctctgtatctgacttggtatgggtcgcaaaacgatccgggtcgctgcattcctctgcgatcttgacattgcccgcagtcagttgatagtaattatttgccgaagaagtaaatgtcgttccagagacattgccgttggcatcggtctcatttaaggcatcggacatatcatactctgtccccagcgctttgttctgtgccacaaagacagatcccatgtcattgccatcggcatccacgccggttctttcaatgctgttaaacgcctcacagaaagatcgcaggaaagtgttcatctggttcatgtaatacggaacccccatgaaactaacgctctccccgactaccagtttcttgttggcaagtttggtctgttcatccgtcgtgagcggcttgttcagatcaaaggtataggaagtgatgttgccatcggcatccgtttcacattcaaaggaatcatagaaatactgcttattgttgacccagatagagccggatgccggcatgttcatcttgtcgatatctgtaatattggctcccgtgatcgtcatggaagtgctgctcgtcttcgtcacacgtccggtcagattctcgctgttgttgccatcgcggatctcaaacatggcacgcaattcgccgctcatgttggtcgcagtcgcatcaaaacttgctcctgtggacgcccagaccagatcgtaaagtccttccacatcggactgattgtatttgtaatctctggacttgcaggcaagggcattgtattcgtagttgtctaccagggtctgtccgttgatcttgactgtataataggtagcccctgtatattgatcctcgtaattactgttggttactttcttttcctcgaccttggtcggtacgatcttggaaagttcatctaccagcgttgcacgctggtcgcggagttcgttggcatgtcccccctccatctcaatgatattgatctgcttgttgagcatggagatcttcttggcgatggaattgacattgtcgaccgtcgtcttgatctcatcattgatggaagtctgtaaactctgtaactgctgtgccgtactgttaaaataagtgcagagttctccggcggtgcttaagaactcattgcgggatgcacttgatccggcattagtcttgacagcatctaaggcattgaacatcttggcataaatggtagagaaaccggaacttgttgtggtcgaaaacgttccgtcggtataatagttctggatctgctccatatagtagagtttcttttcgtaaagccccagtgtcgcctgattgttccagtatttctcgtcgtaatattcatcacgtaattgagtaacggaatccgccgtaacaccggttcctgtgctgccgtatctctgatagcagcgaagggcagaagatgcggtcagattgacgacctgcttgctgtatcccttggtctgcacattggagatattgtttgccgttgtattgatggatgcctgtgaggcatttaagcccgagtaggcaacggtaagtccaaaaaatgaagatggcatagcgtctttgccctcccttctataatgagttcagcagataatcgatcatggtactcaccacattaatatatcggctggatgcgttgtatgctgattgataacggatcatgttggtcagttcctcgtcggaagaaacccctactaccatctgcctgttgttgtcgatggtatctgctgtcccctgcaaactgtcagaagtcgtactgtagacggaaccgacggttccaacctcgccgatccatttgatgtaaaaatcggtaaaggtacatggcgtcgtatcggtaggattgagcagataattttcctgatcccagatacgctccagattggcgcccaaagtataatcgatttctcctgtctgttttttatagggaatcagactcttttcatcgatgatgtccgggttgatgacggtatcctcgatggtatagcaggtcgattcatcgctcggatcttcttcgttatatacataaactgtactgccatccgcaagggataccttggtgtaacggtcgcaaccgatgcgggagaaaagttcgtgtggcggcaattctccatcactgccgaccgaagcatttgcctcatctaagatcttggtatccgccgtgatcgtccaagtctttcctgtcgcatccacaccggttatgctacctccgccaagattggaattaactgccccataggtcgtattcggacagagggtatcattgatggcggtcacgatgctatggaaaagagtgtccagttccgcctctgtattcatcatgatggaattggaaagcccggtactatagtcgtatgcgctaagccctgccatatccagataattggcatgaccgctacctcttgccaaaagaagcgccttgacctctcccacatccgtgccgttggtggcattggcattgtccgtatcgaatacataatagtagtcttcattctcggtatcagataactgcggccagtatggggtctggaaacctgtcagtttatcctcgtgcatcgccatctggtagacgttattctcggtaacaaattccacattgtcgatctgtaccttgacaataccatcaacattttcggaataagatacctttgcaagactggagagttcatctaaatagaggtctctctgatcgcgcagatccatggctgtctccactttgcctgcttccactctctgtatttgtaaatttaattcctggattttggtgcccagttcgttgatgcggtcaacatcatcggaaatcttacgattgatcgttgactgataactttgaagtccctgattcagactacttacacggctgacaaaaagggatgccttctgcatgaccagattctggttgactgcatcggacggatcctttgcaaattcagaaaatgcttcatacagatcggcaagcgaggtctgaaaagcctgtccctgcgtttcctgtaaatatgtctctacctcggagaccgcatcataactggcggcatagaatgcctgacgtcctgttgcggaccgatatgctttatctaaaaaaagatctctcgcatgaaccacatcaccgatatccacaccgagtcctgcccgctgtgtactgatagatgctgatgcaaaagatgtataatttctatctgcaaatacgacctgctggcgtacatagcccttcgtatttacgtttgctaaattgttggcaacaacattcagtgcattttgttgtgtctgtaatcctgacgctcccacgtacaagcttccgaatccattagccatggtatatcctcctctaactctaattcaaaagccccggttatccttttattgggatgtatcaaagctactgctgccaagcagttctcccgtgttgtaagcgttcttgtcataattcgctgtttcgggtgcctgcttcagactcttgaacaaagtcaggtcaaactcaaccatctctaatgcctgctggagaagtacactgttttgtgcatttgctgtctgtaaacgtgtggcaacgtctacaagtgcgtctctggctgccgtcagatcgccctgctcttttggctgtccgtctaactgctcgatgacattggtcacagtcaactgctcaccgtcatgtcctaaaactacagccatatcgcgaagaatactcacgcgcttgttttccagatttttcaagtcactactgatactttcttctgtagcagtcacctcttccagatcagccactgcacctgcaatgatcgcctgtctcttgttctcggacagttccagtaatctggtataacatgcatcttcttttttcattcctacgagtaattcttctactaaactagccacttacgattctccttacagtcccatctgatatttttcaagcaatttgcttgcaaaatctccggtatctacctgataatcatttgactcatactttgatttcatttcagcaactttatcttccctgatatccgaagcttctgcgactgccttctttgcgatctgatagtcacgtccaaaagatgaaatctgcacttcgtctcttcccatagcacttgctgacgccgggcgggtgcttgaagtcttattcgtcttatagagttgtgctacctgattatatgcttctatacgcataatggcactctcctttcttccttgaaacatgaagctctttttgcttttacacaatgattatcggtattctgaaaaaaaatattataccccggaggaaaatttttcttccggggtagtgtttaaagaataatctccgacacatcgctttcttctgtgccgacatatttgtctaattgcttggaaacatgtagtacctgatccagaatactcttggtctggtcggcattggtcaggttcttgctgctcaagccctccgcctgcgccgacgctgccgtaacttcttccgaggttgctgacaggtgggtaatgctgtccacgatatgattgttggcttcggaaagatctgtcagcatagtgtcgatatctgagatatcctgtgtcagttgtcctacattagtattcatttcatcaaaggtctctactgctctgccgatcagttcattctgctgtccggcggcgcttgcagatttggcaacgacattcacggcatctgctgcattttcggaaagttgacccagaatcgatgcaatgttttccgtctccacacgggtcttttctgccagttgacggatctcatctgcaacgactgcaaagcccttgcccgcttcgcctgctctggcactttcgatggatgcattaagcgctaacaggttggtctggctggaaatatcaaaaatggtatcagcgatacccttaacggcattggcacgttcctgcaaagtctgcatggttactgccacctcatcattggtctctgcgatcgtttcagactggttctggatctccttgacgatggataagttttcctcgtttaactcctttgccttttccgcgatcgtaaccatgctctcagagtgatgaagggtcttttcgatcgcatcctggatgctctgggtcatcacggtctggttctgtatattctctgcggtcgactgggtactgtcggaaatatccttgactgcccctgtcacaacgctggtggattcattcaactggttcatgatatccatggcacccgccgtaccctttcgtacttcacttgccacatagatgacatcctgcatcatcttttcctgctggtctttctcatcctgtaggctgcccagcatatccagacggaacttcttgccggtcccttcgataaagcagactacgatcaggtagaagataacgatcgccgttgccgtacagatgtcaatacggtctaccgtgcaatccggtttaaagaacttttgcacagttgttgcgatctctgtcagcatgatcgctaccgcggaactgaccatgaacttggagtcataatacaggatatagactgccatcggtgcaacaactgcaaagcgcatataataactgtcaaaggcagtggtcgtaaacagtgtcaaaagcaccagtgccaccagtgatatccaacggatcttgctgctgtcgcgcttgcgcagatatgcgatcagcatagccaccaccgtgaccgccgaaataagaaaagtcgtccctgtaaatgccgctgtcctgtatcccctcaaaaaagcaacaaatacgatcataaaattacagatagaaaaaatcgtaaagacctgccattccaaccggttcacatgctcggtctgacgatcactatccgcataaagatatttttgtgtctctgtcatgatattgaaatcccccttcatcagcattttgtaaacatatttctattatatacatagagtccctgcaaaatctacgctttttcggcatttttaccgaaaatttacgaaactcctaataaaacacaggaaaaaatccacatgccttgatctgacatgtggattttcattcgtaattgagtttttcttaatatatgactagtttgctgcttctcttctcttcttgagttctgcaacgtttgcatctactcttgccttattcagagggaaaatgaacataagtactaatccacaaagaatatagataactgctgggaagaaagtagccaagttataaataccatttgcaactgcctctgtctgtcctgctgcaagttcatcgtatccaatccatccaagtgcccatccggaaagaccaccagcgattgcctgtccaatctttcttgagaatgagtagataccataaatcgtaccatcgtcacgatttcttgtctgtacttccatatcatcgataacgtctgtaacaagtgcccaacactgcatctggaagaagtacataccaagcatagctacgaataccattcctacgaatgcccatacattcttgatgtgtaagcatccaatgataaagtagagaataccagatacgaacataccaaccatactacattctctcttaccaaattttgtagcaagttttgtagaaatacctgcaagtacgatcatacatggaagcatcaataatgcaaatacagacaacgcctttgtgttcttaaagtaatcagcaaataagtatgtgttaataccctgtcccataagagatgctaacagaagtaatacagctgaaagtacaagtcctaacaaagctctgcttgtaaaaagagtctttaatgtctctgctgttgatttcttttcgcttgctggctttggcacatatgcaacacgttctgttgtgagtgtatagcaaagtaagtaacaaataatagcgatgacagagaatacgcctgcaaccacagaaatacgagatgcagatacaacctggttaccctgtgcatcggtatgatatacaagcatcggtgccataataccaatcataataccggcaacaccaccacccatagaacggaatacagaaagagaacttctgtccttaggctctgctgaaataacagatgccatagatccgtaaggaatattgatggatgtatagaagatagatccccaaaggatatatgtgataaacatatatgctactttagcaccataagaagcatcaaccaggaatgactgatacatcataaaggatgccagtgctacgaaagcacacatacgaagaatccatggacggatacgtccgttctttgtcggctttgaattatcaacaatacgtcccatgccgatatctgtaaatgcatccagacatcttgcaacaaggaacatcgttcctaccatacctgctgaaatacccataacctttgtgtaaaataccattacataactacttgcaaagataaatgagaaatcatttgccaaatcgccacacatgtagccgattttgtctcgtaagccaaaaggtcttacttcttttgttttactcataataaactcctcctaaaaaacactttttattatttgtcttttctcttaatcttattgagttttctgttcagttcaagaagttcttcttttgtaaactgcttgccaccgcctgcagttcccataaggttgagcatacgcttaacagagaaaccaccaagcatcttcatcatgccttcacggtcaacaccagctgctgctcctgctgcgccgccatcagcgtctttcataatcttaagcatcaattcgccaatgaacatcttacccttgatggtcttcatgatatcaccaatctgatcattgatgttgaagtatccttctggcatatcaatatcaaaccagttaagaacttcgccttcttccttcaaacgatattcttcattgaaggtatctaccttgcgaatcttgctttcatcgctgcaatcacctgcttttgcaacaagtgtgctttcgcctgcatttggtacatcaaagtagaagaaatgcacatcacttgtctgcttgccaaggctttcaccatttacaaacaattctacttctggctgattagagtataccgtaacctttgttgtatcttctacacggtctacatagcgcttaccacagatatgcacgaatggatcatctgataaccatgccttatatgcataaaaagcatccttcttgtactttctatcaaatgtaaccaagcccttatggttcatgccgttctctccaccttctgctcttgcatcagcggcgaagtcatacatattccatacatgtgtagcccagataaaatctcttgtaaagagctgcttaatcagttcttcatgatagtatgcctgatattcctcagtataatcaccctgaacaggatttgatgtatgccagtttaaagcttcacatccatactcactcataccaattggaatatttggatatttcttgtggaagtcatccatgaactctccgttcatatccgttgttccaccgtaccatccataatagtggttgtatgaaatcacatctggaatctgtacatattttgcatcaatactgcacatagatacaacagccattgtcgtaagtcttgttggatccatctggtggcacaaatcatttaagatgttgtgattttcaatcagatcagcatcttctgctccacccatagtgatttcgtttgaaagtccccagacaacgatacatggatgattgtaattctgtgtaatcagttctttcatctgtgaaacggtattttcacgtccgtttggtaaatgtttagagatatatggaatctctgcccagatcacaagtcctgcttcatcgcacagatcgtagaaatactgattgtgctgataatgagcaagacggatggtattggcacccatttcaaggataaggtcgatatcctctttgtgttctttatgtgtcaaagcgttaccaatgtgtggtctgtcctgatgacgggatacaccgtgcagtggatagcgctctccgtttaagataaatcctttttccggatcgatagcgaacgttctgcagccgaagcgcgtgcttctttcatctaatactgcatcatttctctttaaagaaacttctgcggtgtaaagatgtggatccttgcgtccgttccaaagatgcacgttttcaatctcaaaagttgcctttgtctcatcagcagaagtagtcttggttgccaccacagcgtcaccgtctttgataacatactctaaagtgtcgccttctgcagcatcggtaacaaatacctcaacctcgacctcagcgttagcaccctctaccgtcggtgttacggcaatgcccggtgttccgtaatagtccagatcaaagtgtgcatcagatacactgatcacattaacatcacgatagagaccgccatagaatgtgaagtctgccatctgtggatatacatggtcgtttggtgcattgtctactgcaacgacgatctcattgtcctctgccagaagatctgtgacattgactctccaggtagagtaaccaccgtcatggtgtcctgcctctttgccgttgacataaagccatgcacttgagtttgctccctcaaattccatataaacgatcggatctgagccaaactcgtcacgcttcatgctctttgcataatagcatgttccacgatagtaatcgttaccaccgtcctgtccgtcatcaccattccatgtgtgaggcagatccaatgtctcccagttgccctgagataaaacggatgtgccttctgcaacagaaactgcatcttttgtgaagttccaagatgcattgatgttcttctttgttgccattaaatttaccctcctttttcgaaaatgagcacacggctcttttctttctcacttgctttgtgaacccagtatagcaatccaggataaattgctcttgtcttacttttgctattttggtaaaatttttacatgaattgtattcttgacaaaaaaattacagatacctggaaatatatagaagcaaaatatgtcaaacatagaaaaaacatatacgaaaggagcacttatggcatttgagaatatcagtacggatgattttttcccattatttaagcagacactagcggacagttttaaggtcgattcctttttcatgcatgcgccctaccacgatttcgaaaaaatggatatgggacttaggcgcatggtctggggtgaatactctaccaattcgcccatcttctctatagcagaggactctccctatcgtatcgttgtcttggaaagcacgctggacttgtacaatatgatcatttccctgaccgcagatgaagaaccggatctgatcggtatcatgccatttcggacggaaccgatcaaccaggcaaatatcaaccgcatcatgaaagaaaacggcattgctccccagcatacctcgaccatgtcccacttttatctgtccctgccggtcgtagagttgaacgatctgatcttgaccatagagcatctgataacgttcttttttcctgccttcgcggatcaccgtgtagaatatgtcaattacaaatcagaaaagcacgccctcaatcccagcgaagaacgctttcataagttttcttctgattatgttgaggaaatgcacaagcgtatcgaggcatgcagcaaggctgtaaccagtggaaatcagtcgcaggctctcgatcatatgaaatccctgttagactatgcggctccttttcagtccagtcctctgctacagataagacatgaattatttgcaatgaatacctttctcgcggcaaggcttttggagaccgcagttcatccttactacatctttaaccaaatgcagaactttgacctcaagattgcagaactcaactcccaacgcgctctgacacatcttccttttgagatgaccagaaaatatgccctgcttgccaaaaactacacctatgaaaaatactcctatctgattcgcaatgtcgtcaactatatcgaccaacatttagttaccgacttgagcctttctgtactggcagaggaatttgacaaaaatccttcctatctgtcaaatgcatttaaaaaagaagtcggcgagacgctgacttcttatatcggcaaacagcgcatccaatcctccctgcgctactttaatacgaccaccatgagcgtcgctgaggtcgctgaggcggtcggtattcctgatttcggttatttttctaaactctttaaaaagcacgtcggcgtcagcccgcgtgaatacaagaaaatgctggacaaatagtccggcattacttttctgtcagtctgactgccgtaggagaagtggcaagtccgcccagactggtctccttgatcgcagacggcatctcattgccaatcctgcgcatggcatcaatgacctcgtctaccggaatggcagacgtgatccctgccatcgccagttgggctgaagtcaatgcattcactgcgcctgccacgttgcgcttgatgcagggaacttctaccagtcccccgaccggatcacaggcaagtcctaacatattcttgagggcaaaggctgctgcatctgcaatctgctcggcagaacctccctgtaaataagcaagtccgcctgccgccatggcactggcagaaccgatctccgcctgacaaccgccggatgctccggcaagtgaggcattctctgcaatgacagcaccgataccggcagagacaaacatagcctcaaccattttctcctcaggcagagaaagcctctcctctaccaccagaaaaactgccgggatcacaccgcaagagcccgccgtaggcgctgcaacgatacgatgcatgcaggcattggactcgcccatcttgatggctttttccatgacctgtcctacaagccctccacagagattggcacccttggcattgtagacatgcagtttctcccctgcaccgccagccataccggatgcggaatgtatagtcggatcatagcccgcatccgcatctttcatcgcctgatacatatggcgcatggtcgcaaaagatgtctcataggaaacacctctctcctccatatccgcctgcaggacgatctgccagaaagggcatgatttctcttcactttgtctgataatatctgctatcgaatgatacatctatctattctcccgtcattccaagataggttaccttacggataccgtcaaatccacgcagccagtcaatgccgctctctggcacttcctgatcacactcaaccaccatgacagcctcgccgccacggctggagcgatacaagcgcatggatgcgatattgatattctggttagaaagcatggtcgtcacttcggatacatgccccggacgatcctcattatagaccacaagcgtcggtgactctcccgaaaagttggtctcaatgccatccaactgtgcaatattgatccggctgccgcccagcgactgtccgatgatctccagacgttgcccggatctgccatgtaagatcaactgcgcggtattgggatgtgcctcacgcaggatggcctgtccaaaactgacgacaattccccgctcctcagcgatctccagtgcctgtgggatgcggatatcgtctgtctgcatacctaaaagtcctgccaccagcgcttttttcgtaccgtgtccgtccccggtcgcaagaaaggagccatgcaggttgatctctgcccgcaccaaaggctcccccagcaagcgcccggaaatatagccgatcttgacggctcccgctgtatgagaactggacggtcctaccatgaccggtcccaccacctcaaagatgttcatacgcaatcctctacttcatcaattctgcgacaatgccatttatgagcttgccatctgccttgccttttaagtcagccatgacagccttcatgatctgtcccttgttgcctgtggcgatcacgtctgcaaacttctcctgcaagtatgccttgatctcctctgcatccatctgctttggtgcaaattcactcatgatctcatagcgcttcttatattcttccaagaggtcttctctgctctccgggcaggtgtcgatctgttccttgcaagactttaactcttttaagatggctgtattgaccatgtcatccgggatatcctcacggcatcctgcatcaataccgctcttttttgcagcggataccaaaacagagatcgcatccttacgaaacttatcctttgctttcattgctgcgatcatcgcgtcctgtaattctttcattttactcatgctgtattccttctttcctgcttttataaaaacattactgctacctattatagcacagcctgtctgcatgcaaatgcttattttgtatcttcggcaatatcatagacggcgtctaaagaaatctctgtagcatcgctaaagatcagagcacgcgcgtaggcatccagacgtttgagactgccggtatattcctgataagcgccaccctctttcttctcatccggtacaaaataggtcacacggatgggcagtccctcagatccacacacctgtaaacgggacaaaagatattgcaatttctcatccagacgttccttagcatcctcgtcaagttcagttctctcctctgtcaaacgcccggtctccgcaatcgccgcctcatgtccggtcagggcagaaaaaggcgaaaactgtgccgcccgatcatataaagacatctgcggatgcttctttgataccggatgtggcagatttatgatatcactgtagtccttactttttctctgcatcatgccctatgccctccgatctggcggttgcggtcttttgccgtcgcgccctctcgcagattcatgccttttaagatggcgtttttgccatattttttcttaatatcgatcatggcatgctggatatttttctcacgttccagatcctttttttcctgctgatcttcggcttccttctgccggtaatcggtaaagagatccaactgctcgtaggtctgatcttcccgggcatccgcctccggtatcagatgattgaccgagagattgatccggcgtaccaggagtgccggatccacaatgcggtcataaagtgctaaaaccttttctgtcaccagccgggtcgaggatgtgtgcctgcccagattggcagtaccgtgtgcgtgtttgggcacagatctgccatagcggtcaatggtgacctctccgcgatatgccttgcgccgcttgggatctgtcaggttttcgatatcatagccgatcgtgaggacgacctgatctgtcaccagtcccttatctaccagatccaagacctgcagatcgatcatttcctgtacgaccagacgggtcttggtaaaatcataaggacactgcagaacctgtcccgaacaaaggctgttggtggtcggacggtaggacttgatcatgtccatcgtgcagggttcatagccccaggcatggtcgatcagaagttccgcattgataccgaacatccgatacaagaggtcttcattataaaagttatcctcccgcccgatggaacagcgtgccacatcccccatggtgtagatgccgctcgcctccagtttgcgcgcataacccgcgccgacccgccagaagtctgtcaggggtctgtgatcccataaaagcctgcggtaagacatctcatccaattccgccatgcgcacaccgtccgcatctgcctccacatgctttgccacaatatccatggcgatcttgcagagatagagattggtgccgatcccggcggtcgccgtaatgccggtctcctccaagacatcctgtatcatcttgcgtgccagatctctggcactcatgccataagtgcgcagataggcagtcacatccatcatgacctcatcaatggagtagacatgaatatcctccggggcgacatattgcagatagatatggtagatccgggtgctgtattccatgtagagtgccatccgtggcggggcgatcagataatcaatcgcaagggatggatccttttgcagatcgtcatgtaaataggaagtgccctccaagcgatgccccggtgctgccgctgcccgcttttgattttcctgccgcacacgctgtacgacttcaaaaaggcgggctctgccgggaataccataggacttgagtgagggtgtgaccgccaggcaaatggtcttttccgtgcgggcagcatctgccacgaccagattcgtattcaaaggatccagatcccgctccctgcactccaccgatgcaaagaaggatttcagatcgatcgcaatatagattctatcctcagccaagcctatcccccctttataatttgatacgaaaaaaggcacttgttatagcaaatgccctaatttctttgttttatgtatgataacacatttcgaacatatgttcaatatctttatcgacgttcctttaccatcataaggaaggtaccaagcaaaagcgcactggatacccagatggctttcatgccccaatgcagggagcagataccgcccaatcctgcgcccagcgcaaagatcaggatgattccataataatgcgccgcctttttcaaggctcccttctggtggtcacgcagatagacagacagactctcggttccactgcgcagattaccaatacacatggtgctggcatagccgtatccgtgcaccttacggaaggtctgcacctgcatggagcaggcaaaggaaacgatcatattcgccgccatattatattttgccgggataaatcccacaacaaaaagcagggtcatttcgatcacaacaatgatctgacgccagtggatgtgtttggcatatttgtatttatgcccgatctgctctgccaccagaacaccaaaggcaaatgccacgatcgggaatagataatgcagtgccttataccaatctcccatcaaaaagtgctggctcatgagtaccacgtttccggtttgtgcattggaaaagacctccccgcgcacattgtaggtataagcatcctgaaagcctcccgacaccgctaagatcgcactcaaaagaaaggtctccgacgtctgcatcttttgtttctttttttcttccatcatcctgcctcttctattttaaataaatatatgccctctacaatacttctcgctaagaattgtaccccttttttctttttttgcaatgccacaccgatgtccatctcaacgaatgcgtatttttgacttctgtcggcttgccaccagtggcagcatgataaaatcaggcaccagacgctgcaagactgcacctatgcgtatcataaaggtcggcacgatgatggtacggcgcaggcgcatcccccgcagggcttccgctacacactggtctgccgtgataccgggcagggcaaaaacaacattcgctcgcgcattaaactctgtatcgacaggtcccggacagagcgcgcagacataaacaccgctttttttctcccgctgttcctctgcaatactttttgtcagactgacaacatatgccttggtcgcataataggttgccatataaggcccccccggcaaaagtccggcagacgatgccacattgaggatggttcccttgcccttgacctgcatctggcgcaggacctccttacataagatatgcatagcctcgacattgacacggatcatatccatatccttggaaagatctgtcctggcaaaatcgccgcagtttcccaatccggcattattgataaaaatatctatggtctcctcttttaaaatttcacagacacgatagcactctttctctttgaaaagatctgccgtctcaatccgacagggaactcctaaattttctgctaatttttccagacgcccctgtcttcttgctgttaagatcaggcgatatccctttttcgcatatgctttggcaaatgccagtccaataccggaacttgcacccgtgatccatactgttttctgcttctttttcatacctagccacctttcttttccacatctgtctattatcacaattccgttgaaaaatgacatttttcacgctataataatagaaactataataatggatatttatatatgaaggagtattccctatggacaacaaaaaaaatcttatagccaaactactcaaacccctcataggatttttagtactgatgcttgcctttgagattattttatttgaactcttatctcatggtttcctgaatacactggttgccatgatcatacagatcatcgtcatcgccgctatcttcggactgctgacctcttttatcctttcgctcctgcaccctttcttagccgctatccgtggtaaggaagcaccggcagaatccgaaaagcaaaaagagaaatttaaaaaatttgcacagcgcgacgatgcactcggcgaggctgtccgtaccatccagagcaatacccttggtcttgctactatggtaacacagatctccagtgcaacacaagaacttgccgctgtttccgagagtttcaaacagatctccggtgagatgtccgatgccatgaccgataccgagtcagccattacatccatcgttgacaataccggcgcacaggcagacagcacactggatatgcaggacaagatcaacgcgatcggcgatgcgatcgacaagatcgtagccaatgtcgctgccctcaatgcttctgctgacaaggttcgttcctgcaacgaagccgcagagaccatcatccgcgaactgatcctcaacagtgaggaaagcggtcaggccattgagcaggtgcgccagcagacagaacttaccaaccagtccacccagcagattcgtaccgctacagaactgatcgcagatatttccgcacagaccaaccttttggcactgaatgccagtatcgaggctgccagagcgggcgatgctggcaagggatttgccgttgttgctgacgagatccgcgcgcttgccgatcaatccaagtcttctaccgagcagatcaatacgattgtcaatgaacttttgagcaatgccaatgtcagcgtagagattaccgagaaagttaccgattcctttgcaaagcaaaacgaaaagatcaacgagacaaaggatatctttggtcagttgaacgaggagatcaatctggtaacccagtctatctctgatattgataccgagatcactgagttaggcgatcacaagaaccgtatcgaaaacactgtaaacaatctggcatcctccgcagaggaaaatgccaacaatgccgagattaccggcaagaatatggaacacttccacaatatcgctcttgccaatgagcgcgagacggaccgcatcatcaaggtatccgacgaactggtatcctttgctacacagatcagcaagggaaaggaagaaggcgtcaacctcatcaagagtgtcagaggtcagcagtaaatttattttagaaccataaaagagtaggcatttgattgcctactctttttatgtctatctctcatctacaacttggaagatgaagaacttcagataataagattcatctgccgcccacaggatcggatgatccgggctctgggtgcgaaattccacctgacgcagacgcttgtgggttgccttggctgcctccttgatggtctttgccagaagttcctgtgtcataaagtgggagcaggaacaagttgccagataaccgccatttttgaccagtttcatgcctttcatgttgatctcacgatagcccttgatggcattctttgtcgcctctcttgacttggtaaaggcaggcggatccaagatcaccacatcatactttgccccctcatttgccagacgcggcaattcatccaggacattggcacagcgaaactttacacgatcttccagatgattgagaactgcattggctcttgcctgttctatggcaaactcggaaatatccagccctgtgacttccttggctccggctatcccggcattcagggcaaaagttcccatatgggtaaagcagtctaagacggtcttgccctgacagatgcgctgcatagcaagacggttgtacttctgatccaaaaagaagcccgtcttttgtccgtccacaaggtccaccatgtagtgtacaccattttccacaatttccacattggtggcaaaaggctccccgataaagcccttgacacgcggaagcccttctttgagccgcaccttggcatcgcttcgttcatagacaccgcggatcatgattccgtcttttgccagtgtctccttcaaaagcccgacgatggtctctttcatgcggtcgatccccagcgccagcgactcgaccaccaggacatcctcatatttatccacgaccaatcccggcaaaaagtctgcctcgccaaagatcagacgacaggaggaagtatccaccgtatccttgcggtactgccatgcattttccacacgccgccgcagaaaattttcatcaatcaactgatccggttctcttgtcatcatgcggatgcggatcttggaattctggttgatataaagctgacgttagataacgatacttttg

SEQ ID NO: 12615 - DNA, 783 bp, Unknown
  gut microbiota DNA sequence
cttcatattgatcagaccgatgatattgtccgtgtctccctcatagaccggcagtcgcgtgaacatatcctctttaaaagtttccactaatttgtcataggaccagttcacattgaccatggtcatatcaatacggggtatcatgatctccttggcggtcgcatccgtaaaatcaaagatgttatggatatactctcgttcttctccctcaatctcgccactctcatggctggcatctaccatgatgcgcaattcttcctcggtaatggctccctcattctggttgggatctacgcgaagcagacgtaaaaatgccaaagataacttgttgattaaaaagatcaccggtgtcaaaatcaccattaagccccaaatgatctttgcataagacaaagatatcttggtcgcattgagtgttgccagtgtcttcggcgagatctcaccaaagatcaggatcagcagggtcaaaagtcctgttgctacccctgcgcccacactgcccaacaggcgtatggcaagtgtcgttgccagtgatgatgctgacaggttgactacattattgccgatcagtatcgccgacagcatctttgccgaatcatctgttaccttgagcacacactgtgcccgcttatcgccatcttctgccatagatttcattttgatcttgttgacggttgtcagcgctgtttccgcagaagaaaagaacgcagataaaagtaaaagaacaaccaagatcactaactgaagtatcgagacggtatccaaaaaacatcactccttttt

SEQ ID NO: 12616 - DNA, 45589 bp, Unknown
  gut microbiota DNA sequence
atatgatcttgaaaaaaatataattttgtgcaagatgaacagaaatatagagaagaatatcgacgctttgtgtaatattaagtaaaatgtgtgcaaagtgttaaatgttcgacgaaatgcgacatttgtccttcaaaaggacaaataccctgcaaaggaaaactgtaaatattacccgaaattttaatatttttcacgaatttttgatttgacaaaggaaaacacctgtgtttaaataggtcaaatgaaacgttggaaacgctttcattgaatgtagtttcgcggttttaaagtgaaaaggagtgaaaaaaatggaactgaaggtaatgcttaaggacgaaaaagaagtacaggaattcgtgcaggcagcatccgtttgtccagaagccattgatttaaagagtggcgccatatatttagacgcaaaatccctgcttggtgttatgagcatggggatgaaacgagagatgcgggtactttgcagtaaatatgatccgacctttgtgcaggcggttcgtaaatttgcagtagcctaaattgtatggaagatgccctcggcaggtttacctgccgggggcattttatgttatactaaaaatatgaagatcagtaggcttttacaagaggaagaattaaaaccgcagattgtgatctctgtccgcaatctcgtcgaatttctgatgaatgcaggtgatattgacgaccggcatggcgggcagatgcgcatggaggctatgcaggaaggcagccgaattcaccgcaagatccagaggcgggcgggagccgattatcacgcagagatcccgctcaagttcatagtctcttatgaggagtatgatcttgccattgagggcagagccgacggcattatttatgaggaaggcttgttagaagagaccagccgttttctagaagatccccggatggatcttgaagaagggcaggaagaggcaaagccgttcgttatgatcgacgagatcaagggtgtctatctggatgtggagcagatggcagagccgaacgccgtgcatctggcacaggcaaagtgctatgcctttatttttgcgacccagcatgccctgcctgccatcggcgtgcagatgacctattgcaatttggatacggaggagatccgcagatttcagatgcattattcctatgatgagatcgagtcttggtttttggaactcgttgcttcttataagaaatggtcggattttttatttcaccacaagatgattcgtcagcagtccatccggggtttggaattcccctatgcctaccggcaggggcaaaagaaactggtaacggatgtctaccgcagtatcatgcgcgaaaagaccttgtttttacaggcaccgacagggacgggcaagactctggctaccatctttcctgccatacaggcgatggggcagaatatgggagacaagatcttttatctgactgccaaaaatgcgaccggtgtcgtggcacacgatacctttcttctgatggaagaacagggctatgagggaaagacggtcgtgatcacagccaaggataagatgtgtcttttggaggagagatcctgcaacccggacgactgtccttacgcaaaagggcattttgaccgtgtcaacgatgccgtctatgacattttgcaggaagaaaatatgatggatcgtgattgcattttgcgctgggcaaaagatagacgggtctgtccttttgagtacagtctggatattgcatcctgggtcgatcatatcatctgtgactacaactatgtctttgatccaaatgtctgtctcaaacgcttttttgcggagggcatccggggcgactatctttttctggtggatgaggcacacaatctggtcgagcgtgccagagacatgtattcggagactctggtcaaagaagactttcttgccatgaaaaagaagttaaagatctatggaaaaaaactggaaaataccttggagcgctgcaacaaggaaatgctggtcttaaagcggcagtgtgagaaactgcttgtcttagaggagatggattcctttttgtttgcccttttccgggcggcagcggcgatggatgagttgctgcaaaaagaaggaaatatcatagaccgtgacgtggtcttagacttttattttaaggtgcgcaattttgtcaacctgtccgacgattttgacgagcactatcgtatttactgtgattatgatgagaaaggacagttctgcctgcatcttttttgcgtagatccttcctatatgctgcaaaagcggctggatcggtcgcgcgcctgtgtctttttctcggcgaccctgcttcctatccgctattataaggaacttttgtgctgtgatgatgatgtctatgccatttatgcggactctgtttttgaacaggaaaagcgggcacttttgatcggcagggatgtcagtagccgctataccaggagaacttttgcggaatatctggcttttgcggactatatcgaagctattgtggaaaagaaaaagggcaattacatggttttttgtccttcttataagatgttggaggagatcagccagaagtttatggcaaaaagtctgggctcctgtgacgtgatctgccagcgctcgggcatgagtgagcaggagcgggaagattttctgaaagaatttgaagaagtaagagagcgttctttcgttgctttttgcgtgatgggaggtgtcttttcggaggggatcgacctgacggaggaaaaattgatcggtgctatcattgtcggtgtggggctgccccagatcgggaatgagcgggaagtcatgaaacagtattttgaggcgaccgggagagacggattttcctttgcctacctttatccgggtatgaataaggtgattcaggcggcaggccgcgtcattcggacaaaaagtgacgagggcgtgatcgccctcttagatgagcgttttacaaaaagtgaatacaggcagacctttccgcgggaatggaatgacggaaagatctgcgatcgtcatacggttggagatctagtggatgatttttggcaaaagagataaaaaggcttctgctgaggcgccgagaggcagggacggatgtgtcgctgcgaccaggcttcttggtggaagtttttcttttgtagaaacaacggtcagatcctttgaggaatgtttgatgcagtagtccgggataaaggcaatgccaagaccgatgcgcgccaggtcgatcaaaagatcattggaatacaactgaaaagccggtaccagatccagacgatgttccaaaaagatctggtggagatattcactggtcgtagaatttttgtccagcatcaggataggcagaccggagatctccttgaaagtcatttccttagtgacctgcggaaaatgtgtgggattggcgatgaacacatcctgaaaggttgtcagggtctgggtgatataagaagtattcatgcgggagttgggatggttggtgatgatgatgtcaacctttccctgctccaagaggtcgacgcaggacttgcttgtcgcattggtgatgcggatgggtacatccgggtagagttcgtggaacttttggatataaggcaccagaaaatagcggcagatggtatcgctggcgctgatgtggagttgtcccaatctggtgtcgttgacattctggatctgttcttcgccgcggcgtataaggttcatggctggttcgatgtgctgtaagagcagttcaccggcaggggtcagttggacttttttggtgctgcggataaagaggggctgaccgatctttttctccaaagtcttgatcgactgcgatacggcggactgggaaatgaaaagctgcttgctcgcctcggagaaactgagggaagatgcaacatggtaaaatactttgtatagttcgtaattgatatccataaggtttcctttctttttttgtaacgcaatgttatcattcatattatataagcacaaataatagcagtcaaggatatagataagatttactaatatatctgattagggataataattatgtgcaggtcagcgcgatgtgctatactatgggtaaatgtgatagggcatatcctatgtccaagtgagtgaaagatggaggtatagcatgggaaacgtaagaagagtttatgcagagaagaaaccccagtatgcagtggcagcaaagtcactttacagtgagatcaagagttatcttggcattactacggtaacaggcgtccgcgtcctgatccgttacgatattgaaaatatttcggaggacacttacaagaaggcattaaagaccgttttttgtgaacttccggtcgatgattattacgaagaagaatttgcttatgaaggcaggacgttcagcgtggaatttttgccgggacagttcgatcagagagcggattccgcagagcagtgcgtcaagttgttaaaggaagatgaagatgtcatcatccgttccgcaaccacctatgtcattgaaggacagatcacagacgagcagtttgaagccatcaagaagcactgcatcaatccggtagactccagagagaccggtatggataagcctgagactctgaccgatcattttgaagatccggcagatgttgccatctttgatggctttagcagcatgccggaaaaggaattaaaagatctctatgattctcttggacttgccatgaccttcaaggatttcttacatatccagaagtatttcgctcaggatgaaaagcgcgatccttccatgacagagatccgcgtgttggatacctactggtcagaccattgccgtcatacgacattctctaccgagttaaagaatgttacctttgaggacggttattatcgtgccccaatcgaagattcttacaatgattatttggataatttcaagatcctttacaaggaccgtgatgataagtttgtctgcctcatggatctggctctgcttgccatgaaaaagttaaaaaaggacggcaagttggacgatcaggaagaatctgacgagatcaatgcatgctctatcgttgtgccggtagaggttgacggcaagacagaagaatggcttgtcaatttcaaaaatgagacccacaaccatccgaccgagatcgagccatttggtggtgcggctacctgtctgggtggtgctatccgtgatccgctttccggacgtacttatgtatatcaggctatgcgtgtgaccggtgctgcagatccgaccgtatccgtcaaggataccatggaaggcaaactcccacagaagaaactggtgcgtgaggcagcccatggctattcttcttacggtaaccagatcggtctggcaaccggatatgtcaaagaagtatatcatccgaattatgtggcaaaacgtatggagatcggtgccgttatgggggctgctccaagacgtgccgtgcagagattaaattctgatccgggcgaccgcatcatcttgcttggcggaagaaccggacgtgacggaattggtggtgcgacaggatcttccaaggcacacaacacccagtctaccgcagtctgtggtgccgaagtacaaaagggaaatgcaccgacagagcgtaagatccagagacttttccgtcgagaagaagtaagttatatcatcaaaaaatgtaatgactttggtgcaggcggtgtgtccgtagccatcggtgagttggcagacggattgcgcgtacagttagacaaggtgccaaagaaatacgctggtctggatggaacagaacttgccatttctgagtctcaggaacgtatggcagtggttgttgcaccggaaaatgttgaccagttcttagcatatgccaaggaagaaaacttagaggcagtcgaagttgccatcgttaccgaagaaccgcgtctgatcttggagtggagaggcaaggaaatcgtcaacttaaagagatctttcttagataccaacggcgcacatcaggagacagatgtcgcagtggaaatgccggtaaaagaggacaattatttccatacctatgcagttgagggcgttgcagatgctctggctgtaggcgatgtgaaaaaagcctgggagactactttatctgacctgaatgtatgctcacaaaagggcttagtggaaatgttcgatggttccatcggggcaggcagtgtctatatgccatatggcggacgctaccagttgaccgagacccagtctatggttgccaaacttccggtagccgaaggcaagtgcgataccgttaccatgatggcatacggctttgatccatatctgtcttcctggagcccatatcacggatcatcctttgccgtactcgaatctgttgcccgtatcgtagctgcaggtggtgattacagcaagatccgctttactttccaggagtacttccgtagaatgtctgaagatccaaagagatggagccagccattcgcagccttgcttggtgcttatcaggcacagatgaaattcggactgccgtccatcggtggaaaggattccatgtcaggatccttcaatgagatcgatgtaccgcctacactggtttcttttgcggttgatattgcaaaagagggcgacatcatcacaccggaattaaagaagacaggccatgctttggtattcttccgtgcaaaacgtgatgcttatgatctgccggattatgatcaggtcatgaagttatatgatgtcatccacagcctgatccaaaagggagccatcgtatctgcttatgcaccggatgcaagtggtctggcagcagcattttctaagatggcatttggtaataaactgggtgtgacgatcgcagatagcgtagcggcagaagaactttttgcaaactgcatgggctctatcgtagccgaagtaaacggcgcggataccacggtcatccttgatgctatggaggcggcaggacttggtcatgacgtaagcgtgatcggatctgtaaatgatagtcggaactttatctataaagacatgagcctttctatagaagaggctttaaaagactgggtgacaccactggaaaaggtattcccgaccagagccacagaggacaaagatcctgttgataccggattgtatcaggcaaaagagatctatgtatgtaagaataaagtggcaaagcctaaggtatttattccggtattcccgggtaccaactgtgaatatgacagtgcaaaggcatttgagcgtgccggtgcagaaccgatcgtcaaggtattcaagaaccagtcagccgaggacatccgtgattcggtcgaggtatttgcaaaggcgatcgatcaggcacagatgatcatgttcccgggcggattttccgcaggtgatgagccggagggaagtgctaagttctttgcaactgctttccgtaacgaaaagatgaaagaagccgttatggatcttttgaataaccgtgacggacttgcccttggtatctgtaatggtttccaggcactcatcaaattgggacttgtgccatatggtcagattcatacccagcaggcagatgcaccgaccctgacttacaatacgatcggacgccacatttccaagatggtctacaccaaggtggtatctgacaagtcaccatggctggcacaggctacgctgggacagacttattgcaatccggcatcccacggagagggacgtttcgttgcaagcaaggaatggttggacaaattgtttgtaaacggtcaggtcgcaactcagtatgtggacgaggcaggcaatccgaccatggatgaggagtggaatgtcaacggttcttatatggcgatcgaaggcatcaccagcccggatggacgtgtgcttggtaagatggcacattctgaaagacgcggagaatccgttgccatcaatatctatggcgagcaggatatgaagatctttgaatccggtgtcgcatattttaaataatagaaaaatgagagagccttttatctttttgatagaaggctcttgcaatatagaaaatcatgtgataacatactataagtttaggcatttttaaaatttaacatgtagaatttcgaaaggacagggcaaaagatgagagcatttcttattctggaagatggcactgtgttcgccggtgagagcatcggatcgacacgcgaagtcatcagtgaaatcgtatttaatacatccatgactggatatctggaagttttgacagatccttcctatgccggacaggctgtcgttatgacatatcctttgatcggcaattatggcattacaccggacatggagtcagaaagaccgtgggtggacggatatatcgtccgcgaactcagccgtatcccaagcaacttccgttgtgaggggaccattcaggatttcctgaaagaacatgacatcccgggaatctgtggtattgatacgagagcacttaccaagatcttgcgtgacaagggaaccatgaatggcatgatcacgaccgacgagaattacgatctggatgagatcttaccaagacttgcggcatataccacaggtgatgtggtatccaaggtcacatgtgctgcaccaaaggttttgccgggtgacggcaagcgggtggcacttttagatctgggagccaagagaaatattgccaagtccttaaatgatagaggatgcgaagtgaccatctatccggcagatacaccggcagagaccatcttggcaggcaatccggacggcatcatgctcagcaacggacctggggatccaaaggaatgtacagaggtcatcaaggagatcaagaagttatatgactcggacgtaccgatctttgccatctgtctgggacatcagctcatggcacttgcgaccggcgcggatacccacaagatgaaatacggacaccgtggcggcaaccatccggtcaaggatctttccaccggacgtgtctatatctcctcacagaaccatggttatgtggttgatgtcgacaagttggatccgtccattgcgacaccggcatttgtcaatgtcaatgatggcacaaatgagggattaaaatatacaggaaagaatatctttacggtacagttccatcctgaagcttgccctggcccacaggatagtggatatttgtttgaccgttttattgaaatgatgggaggtgaccagtaatgccaaagaataaagacatcaaaaaggtacttgtgatcggttccggtccaatcgtcatcggacaggcagcagagtttgactatgcaggcacacaggcatgtcgttccttaaaagaggaaggcatcgaggttgttctggtcaattccaatccggcgaccatcatgacagacaaagagatcgcagatgaggtctatatcgagcctctgacagccaaagtcttagagcagatcatcttaaaggaaaagccggacagcgtgcttccaaccttgggtggacaggcaggactcaaccttggtatggaactggcagagtcaggctttttggaagagcatggcgtaaaactcatcggtacaacggcagagaccatctttaaggcagaagatcgtcaggcattcaaggacaccatggaaaagattggtgagccttgtgcggcatctttggtcgttaagaacgtagaagacggtatcaagtttaccaataccatcggttatccggtcgtactccgtccggcatttacccttggcggcagcggcggtggtatcgcccacaacgagacagaactcgtagacatcttatccaatggtctgcgcttgagccgtgtcaatgaagttttggttgagcgttgcatcgcaggctggaaagagatcgagtacgaagtgatgcgtgatgcagcaggcaactgcattaccgtatgtaacatggaaaatatcgatccggtcggtgtgcataccggcgactctatcgttgtggcaccgtcacagactttgggtgataaggaataccagatgctccgtagttctgctttaaatattatctcagaaattggcattaccggtggttgtaacgtgcagtacgccctcaacccggatagttttgaatattgcgttatcgaggtaaatcctcgtgtcagccgttcttctgcactggcttccaaggcaaccggttatccgatcgctaaggtggctgcaaagattgctttaggctatacattggatgagatcaccaatgccattaccggcaagacctatgcatcctttgagccaatgcttgactattgcgttgtcaagatcccacgtctgccatttgataagttcatcacggcaaaacgtaccttaacgacacagatgaaggcgaccggtgaggtcatgagtatctgcaacaactttgagggtgccctgatgaaggcaatccgttccttagagcagcatgtagactctcttatgagttatgactttacgggatttagtaacgaagaactggaagaccagttacacgtcgtagacgatagaagaatttatgtgatcgcagaggcactgcgcagaggcgtttcctacgaccacatccatgagattaccaagatcgatatctggttcatcgacaaaatcgctatcctggtcgagatggaagaaaagttaaagagcgaggaactgacaccggaacttttaaaagaagcaaagcgtatcgagttcccggataatgtcattgcagatcttaccggcaagaccaaagaagagatccgccagatgcgctatgacaatgatattgttgctgcatttaagatggttgatacctgtgcggcagagtttgaagcaagcaccccatattattactctgtatttggcagccagaatgaagcggtagagaccaatctgaagaaaaaggtactcgtacttggatccgggccgatccgtattggacagggtatcgagttcgactattgctctgtacattctacctgggcatttgccaaggaaggttatgagaccattattgtaaacaacaacccggagacggtttctacagactttgatattgcggacaaactttattttgagccgctgacggaggaagatgtagaaaacatcgtccgttttgaaaagccagatggagctgttgtccagttcggtggtcagacagccatcaagttgaccgaagccctgatgaagatgggagttactatcttaggaaccaaggcagaggatgttgatgccgcagaggacagagaactctttgatgagattctggaaaagacaggtatcccgagagcatccggcggaacggtatttaccgcagaagaggcaaagaaagttgccaatgagatcggttatccggttctggtacgtccttcctatgtactgggcggacagggcatgcagatcgctttcaatgatgacgaagtggatgagttcatggagatcatcaaccgtatcgcacaggatcatccgatcttagtggataagtatttacagggtaaggagatcgaagtcgatgctgtatgcgacggtacagatattttgatccctggtatcatggaacatattgagcgtaccggtgtccattccggagatagtatctctgtatatccggcacatacgatcagtgatgccatcaagaaaaagattaccgattatactgagaaactggcacaggcactgcatgtcgtaggtctgatcaacatccagtttatcgttatgaatgatgaagtatatgtgatcgaggtcaatccgagatcttctcgtaccgtgccgtacatcagcaaggttaccggtattccgatcgtggatctggcaaccaaggtcatcatcggaaacaccttaaagggtatgggctacacaccgggattgcagccggaagcagagtatgtggcagttaagatgccggtattctcttttgaaaaactgcgtggagcagagatttccctgggaccggaaatgaagtctaccggtgagtgtctgggtattgcaaagacctttgatgaggcactttataaggcattcctcggtgcaggtatcgtactgccgaagtacaagcagatgatcatgaccgtaaaggatgcggataagccggaagccgttggcgtggcaaagcgctttgcggccttgggctacaagatctatgcgaccagaagtaccgccaagtatttgcaggagcatggcgtagatgcactctgggtcaacaagatcactcaagaatcaccgaatgtcatggatctgatcctgggtcacaagatcgaccttgtcattgacacaccgacccagggacacggcgataagacccgtgatggcttcctgatccgtcgaaatgcgatcgagacaggcgtacactgtattacagcaatggatacggcaaatgcactggcaaccagtttggaatctgccacagatgaatttaccttagtggatattgcaaaagtcaagaacatctaaataaaacgcactggaataagtgtgagtttcatattgcgaaactgctttcttttggttactatggaaagtagtttcgctttttaagtgacagaaatctttagatacgagggaaaaagatgaaaataggagaattcttcaaggaaaatacacttctctgtgatggtgcaatgggaacctattatgcctctaaatttcatgatgaaacactggtagaacgtgaaaattttgagcatccggagcgcattgcccagattcacggggaatatttagaaagtggagcgagactgctccgcaccaatacatttgctaccaattctaacttcttttcttccgtcgaggagatggaaaacaatattatgatcgcctgccagatcgcaaaaagtgcagtggaagcatactatgaaaaaacaggcctgacaaaagagacctatcctgtttatgtggcagcagacatcggtacgatctatgatatggagcagaaagatgatagcaatgttctggcagaatatcatcatatcgtggatacgtttgtatcggcaggtatggatattttctggctggaaacgcaggtggatgtttactatctgaagagattgcttgcttatatcaaggaaaaagcaccgcaggcttatgtgatggtttccttttctatggataaaacggcctatagtaagggtggcttgcaatttgatcgcatggtgcgactgatgagtgaaatggatgaagtgaatgcctatggattaaactgtggcatggaagcagcgcatatgtaccaacttttgaaaaatgtaacctttccatcagaaaaacctgtcatcgccttgccaaatgccggttatccatatcagttgcgcggcaagaccatttacggaaagaatgaatcttattttcagaagatgctattgcagatcgcagacttagggattgatcttgttggtggctgttgcggaacgacaccggattatctgaaagagattgcagaacagttgaaaggcaagaagaaaatggaaaaaaagacaggctcgccggagacacctgctgtctcaagaacggagtctgtattttggaaaaagttacaaagtggggagaagccctttgtggtagaactggatccgccatcggatatcaaggttgaaaaactggtatcgggagcgcaattgttaaaggaacatcgtgttgatctactgacactttccgattctccgatggcacgcagccgtatggatgcgtccttgctgggcagtaagattcagagggagaccggcatttatgtcatgccgcacttgtcctgccgtgatcggaatgtgatctctctgcgcggtacgatgctcggtgattacgtcaatgatttaaggcattttctggtcgttacgggagatccgattgcacagaatgacagaaacacgatcacacaggtatttgattacaattctatcaagtttatgggacttttgcaggaaatgaatgaagaccagttttatcaggatcgtatcgtttatggcggtgccctaaattatcagggcgtaggtgtggatgccatcgcaagaagaatgaaactgaaaatggaacagggatgtagtttctttttgacacagccgatttatgcagacgcggatgtggaacgtatcaaggacttgaaagaccgtaccggtgcaaagatcatcggaggtattatgccacttgtgagccgaaaaaatgccttgtttatcgcaaatgagatgccgggtatgcatgtgccaccggaaacgctggcatattatgaggagggcatgagccgttcggaatatgaagaagttgccatccgtgtatccgtggagattgccagaaagatgtcttcgattgttgacggttattattttatgacaccgtttaaccgcgtagaactcatctgtaatatcattgagcgtatccgtgaagaaaatttatagaaatttaataagtatgaacagaattttgggtgacattggaaaaaaagagttctacaataagaaagatataaaaaataaacacatgtataagaatagggagacaagatgaaatttttatttcaaaacttatgggaacggaaaaaggcagttgccatagttattgtgcttttgatcgcacaggcattatgtgaactgtcacttccaaactacacagcggatatcgttgatgtcggtattcagcagaatggtgttgactctgtagcagtggaagaaatgcgtcaggagacacataactggcttcttgcttttatggatgatgatgagatttcttatctcaatgcctgctatgaaaagcagggggagacttatgtcctaaaggatgaggtttcagaggataaagacaaaaaaacagcattggaacaggttttgcaggagccaatggtgctgacctactttatggaatatggtgcgcaagagtccggcgattcggaatatgcatccatgatgggggatgcggctaagatgcaggagcagttaaagcaacttgcacaggcaggtgcactgacaccttcctctttgtatgatatgcgtgcggcggtgacagaaaagtttggtgatctgggtgacacgatgatcgaccagatgtccattgccatggcgcagcaggaatatgaggcgttggggtatgatatgcaccagatgcagatggactatctgcttcgtaccggtggtgtgatgattctgatgacacttggcatgctgctggcagccgtattgttgggatatgtttcttcaagaacagcggcagacattgggcgtagtttgcgtaaaaaagtttacaccagtgttatctctttctccggaaaagagatcgatcagttctcaacggcatcactgatcaccagatgtaccaacgatattcagcaggtacagatggtagaagtcatgctgcttcgtatggtattgtatgctccggtgcttgccattggcggtattatcatggtgaccaggaccgatgcatccatgagttggatcattgttgtggcggtcgctgttatcatcagtgtagttatggtactgatgaagttttctatgccgaagtttaagatgatgcagaaacttgttgaccgcatgaaccttgtttcacgcgagatcttaacaggtattccggttatccgcgcattctcacgtgaggagcatgaaaaggaacgcttcaaggatgccaatacagaactcatggagacacagttatatacaagccgcatgatggcatggatgatgccaattatgatgctgatcatgaactgtattaccgtagcgattgtatggtttggtgcaaagggaatatccgcaggtcatatgcaggtgggagatatgatggcatttattacatatgccatggtcattgttatgtccttcctattgcttaccatgatgtctattatgcttcctcgtgcaggtgttgctgcagaacgtattcaggaagtcatcggaacgagatcatccatcacagatgctgagcagttagcagatgatgagatgggagatatccgtggagaacttgcattccataacgtaagttttgcttatccaaatgctaaggataatgtactggatggtcttgattttgaggctgagccgggaaaaacgacggcgattatcggaagcacgggatgtggtaagtcgacacttctaaatctgattccacgtctttatgacgtgacagaaggaagtattactttggatggtgtagatattcgtaccatatcacaaaagaaactgcgcgatgccatagggtatgttccgcagaaggctgtcctgttttcgggagacatccgctctaatatcaaatatgcggatgagacgatttcggatgacaggatggaagaggctgctgccattgcacaggcaacagaatttgtcgaagaaaaaaagaaaaagtacgacagccatattgcgcaggggggatcaaatgtatctggcggacagaagcagagactctctatcgcgcgagccattgcgaaaaatccaaagatttatctctttgatgacagtttctccgcactggattataagacagacaaggcactgcgtgcggcattgtttgaacatgcgaaagatgcaacagttatcattgttgcacagcgtatcagcacgatcttacatgcagatcagatcctggtcttggatgatggaaagattgtcggaaaaggaacccatcaggaacttttgaagcaatgtcaggcatatcaggagattgcggcttcacagttgagccagcaggagatagaaaagacgaaaggaggcttagcctaatgagtgagtcaaatgaaagagcaaaagcacctcgtcgtcatcatggtcctatgggcggaggcccgggcagaccggtggaaaaagcaaaagattttaaaggaacactaaagaaattactgaattatctgagtgtttataaaatagggattgcagttgtaatcttttttgcaattttaagtaccatatttaatgtaatcggaccaaagattttaagtaaggcgacaacagagttgttcaccggtctggtcgcaaagattcaggggacaggaaatattcgttttgatgtgatcggcaagattttattgatcctgcttgcaatttatatctttagtgcgctgatgagttttgtgcagggatatattatggcaggggtatcgcaaaagatgacataccgcatgagatcggaaatctccgaaaaaatccatcgactgccaatgtcctattttgaatccaagaccgtcggtgagatcctttcgcgtatcaccaacgatgtcgataccttaggacagagtttgaaccagagtgtgacacaggtgattacctcggtggcaacaatggtaggcgtacttgtcatgatgctttccatcagcccgttgatgaccttgatcgcgcttgttattttaccggtttctattgcacttgtaatgctggttgttaagttttcgcagaaatactttattgcccagcagagaaccctaggtgagataaacggtcaggtggaggagaccttctctggacagaacatcgttaaagcattcaacaaagaaaaggatgttttagcggagtttgatacaagaaacgaagaactttataactctgcatggaagtcacagtttttatccggactgatgcagccgatcatgacatttgttggaaacctcggttatgttgcagtggccattgtcggaagtattcttgcagtggcaggaacgatcaccgttggcgatattcaggcattcatccaatatgtaaagaactttacgcagccgatccagcagatggcaaatgtttctaacctcttgcagtctaccgttgctgccgcagagcgtgtttttgagttcttagaagagaccgaagaagttgagacggaaaacccaatgatcatggatcatgtttcgggggcagtttcttttgaacatgtcaaatttggttacaacgaagataagatcatcatccacgatttttcaagtcaggtaaaaccgggacagatggttgcaattgtaggacctaccggtgccggaaagacaacgatggtaaaactattgatgcgtttttatgatgtcaacgaaggctgcatcaagatcgacggacaggatatccgtgcgttcggccgcagcaatctgcgagaacattttggtatggtcttgcaggatacatggttatttaagggaagcatcatggagaatatccgttatggaaaactcgatgcgacagatgaagaagtgatcgccgcagcaaaggcagcgcatgcacatcactttatcgagaccttgccgggggggtatgatttcgttttgaatgaagaagcaaccaatgtttcacagggacaaaggcagttgcttaccattgccagatctatacttgccgataatccaattctgattttggatgaagcgacaagttctgtagataccagaacagagcagagaatacagaaggcaatgaatcatctgatgcagggcagaacaagttttgtcattgcacacagattgtctacgatcaaagatgcagacctgatccttgttatgaaagatggcgatatcatcgagcagggcagccatgaagatctgatcgctcaaaatggtttttatgcagaactctacaacagccagtttgaagaagttggataatgtaatcaactaatgtttatacacacacttgtcgaaaaaacacaaaaatggatgacagactgaaagacgagtgttatactgttcttataaattttggtaagggaagggatgaatgacatggaattgatgcaacggcagatgaaggaaaagaatcgcgtcgcttttacagtggcggtgattattacgggcattgaactggcactggcacttcttagttttacacaggccgacacgctgatcgcgaatgcaatcgtacgaacggtagtctgtgcagtggcaatggtacttttgatcgttgtgtataataggaataaggcagatgaacggtttgaaaagatatttatgattacattgatcgtggtatatgctgtttatattctttctgttcgcagtatcggtatgtatgcttttatgtacttgatcttattctccatggctgtttatatgcatccgaagtggatcatggcagggggcattgcctttagtatcgtcaatgctatcaaggtcgtgcagtgcaaggtcatttatgcggacgaatctttgttttcaaccagtttcgttcagttgatctttgcggtggcgacgacggtggttgcttatatcgtagtcaagatgatgcaggatcatcatgcacaggacaaagaagaagtagaacgacgtgcaaaagaacagcagactgtggctgagaatatcatccgtatgtccgatgaactggtgcagatgtttgaacaggcaaaggggaaggcagaacgcctgacagagagcatggagaccagtaacggttctgtgcaggagatttctctgggtgttaaatctacagcgcaggcgatcgagcatcagaccatgatgaccagcgatatccagaccagtctggaaaatgccggcaatggtacggaacttatgaaagaggcggtagaggtatccacaacgacagttcagaacggagcccagttgatcgaagaactgcgtgagcaggcaatcggaacagcccagatcaaccgtcagacaaaggatacgacggacgaactgaacaaccgtatcaaggaagtagaagagatcgttggaaccattcttagtatttccggacagaccaatctattagccctcaatgcatccatagaggctgcgagagcaggagatgcaggcaagggatttgcggttgttgcagatgagatccgcaccctttctgaggagaccaaggaatctaccggcaagattacggctatcattgaaaaacttacggtcaatgtaggagaggcatcggaaaatatgcgcaagtctaccgagtccgtagaaaaacagaatgagatgatcgctacaactgcagaaaacttcaagttgatcgaggaaaagatgcaggaagcatatacagagattcagagtctgagcggagaggttaatgatatcctaacatccaacagtcagattagcgacagcattacagacctgtctgcaaccagtgaagaagtggctgcatcatctgagagttgtacaacagtctttggacagagtgtggcagatctagagacactgaacgaacagttgaatcagatcttccgtattgctgagaatctcaaggatgtggcagaacaggaaaatgacatgattgtgccagaatagaaggtttgccggcctactggcgagcaagtaaagggttgcagaaagcaacccttttttttataatgaaggctgattgaaaaactgcagaagtataacatatataaagataaaaggaagaaacaaagatgacaaagcaggaactacaggatctttttcaaaaaggaccgatcatattggatggagcaacgggctcaaacctgatggcaaagggtatgcctatgggagtatgcccggaggattggatctatcatcacaaggatgcgatcgtttccttacaaaaggcatatgtcgaggcgggaacacagattttgtatgcaccgacttttacagcaaatcgcatcaaattagcagaatatggcatggaagaccgcttagaagaattgaatcgtgccatggtgcgctacagtagggaagcggctggagatcgggcatttgttgctggagatcttaccatgacgggcagacagttatatccggtcggagatctcatgtttgaggatcttgtggatgtctataaggagcaggtgagggcaatcttaaaggagggtgtggatctctttgtgattgaaaccatgatgagtttgcaggaatgccgtgcggctcttttggcagtcaaggaaacctgtgatcttccggttatgatctccttgacctacaatgaggacggcagaactctgtatggcacatcgcctgagatcgccatggttgttttagagcatatgggtgcggatattgtcggcgtgaactgttcgaccggacctcttgctatgatccctttggtaaaggctatgctgccttatgcggatatcccgatcatggtcaaacccaatgccggcatgccggaactggagaatggtgagacggtctataagatgaccccggaggagtttgcggatgcctgcgaacaattagtagatgccggagcatcggtcgtgggtggctgctgtggtaccagaccggatcatatcaaggcgctggcagaccgtatgcgtggcaagaaagtggagccgatccaaaagaagaacagaccggtgctgacctcggagcgtggctttgtggaggtgacgctggacggtggctttaaggttgtgggagagcgtatcaacccgaccggaaaaaaggcattgcaggaagaactgcggtcaggcagtatgcagatggtacgtcagtttgccagagatcaggagatcgcaggagcagccattctggatgtcaatatgggaacgaacggtattgacgaaaaagcgactatgctggatgccatctatgaggtgatatcgacggtagatctgccgctttccatcgatacttcttatgtggatgtcatggaggcagcccttcgtatctatccgggacgagccctcatcaattctatttcctgcgaagcagaaaaaatgaaagaacttttgccgatcgccaaaaagtacggagccatgtttgttctgcttccgctttcacaggcaggactgccaaaggatctggacgaaaagaaagaacatattacccatgtattagaggcggcgcgtgcgatcggattgcaggataacgatgctgtggtcgatgtcctggtggcgactgtgggagccaatccgtcggcggctttggaatgttttgagacgatctcctattgcaaggatactctacatctgcctactatctgtggactttccaatatttcttttggtatgccacagcgtatctttgtcaatacggcatttttgaatgtggctctttccaagggactgaccatggcgattgccaacccatcacaggaactcctcatgtatacggcgctggctacagatcttttgcttggtaaggaaggggcatcagagcgctacttgggaacagtacctacgacagccatgaagatggtcggctccaaggatgtcaaggtagatagccagacgaaagaagaggctcatcacccgatctttgactgcgtggtaaagggagacaaggaatccatcatacgggaagtaaaaaaagaggtggaagcgggagaaaaaccatcggctgtaatcgaaaagtatctgatcccgggcatcaatcaggtgggagaatattacgacaacaaaaaatattttcttccacagttgatcgcgggagccaatgccatgaaagaagccatggagtatttagagccattgcttctggcagacaaaaaggatgaggcgaaggcgaccgtcgtcattgcgaccgtagagggcgacatccacgacattggcaaaaatctggtggtgctcatgctcaagaactatggttatcgtgtctttgacatgggaaaagatgtgccggcagagtcgatcgtaaataaagcgatagaagaaaatgcacagattatcggtctgtcagcccttatgactacgaccatgatgcgaatgaaagatgtcgtggatctggcaaaggaaaaaggctgtcaggcaaagatcatcattggtggtgcctgtatcacggagagttttgcggaggagatcggggcagacggttattccaaggatgcgtcagagtgtgtcaaactgatagattcctttatccagtccaaattgttgaaaaagtttgaaaaataaaaaaattgaaaaaatttttaaaaaagtgttgacgaaagggtacaagtatagtatatttaatttcggtcgcgatgagcggcaatgaaatgggatcttagctcagctgggagagcatctgccttacaagcagagggtcataggttcgagccctataggtcccattccaacactttaatatggcgaggtggctcaactggctagagcgtccggttcatacccgggaggttgagagttcgagtctctccctcgctactgaatgaagccttgatcctttggattgaggcttttttgcatcacgttcttttttattgaaaagcaacttgtggatatggtatcatatagggtggtttttgaatttgaagatcatgttatattttacggataaagaccgtagaataggagggaaagacctatgcggattggaacaggttatgatgtgcataaattagtggaaggtcgtaagttgatcttaggtggcgtagaggtgccgcatacgcttggtttattgggacattcggatgccgatgtgcttttgcatgcgatcatggatgctatccttggcgcggcaggactgggagatatcggtaaacattttccggatacggatgaggcttatcgcgggatctcatctatgaagttattggaacatgtaggtgctttgatcgcagaccacggttatgtggtcggcaatattgatgctacggtgatcgcacagcagccaaaactgcgcccttacatcagccggatggaggaaaatgtagcaagcgtgctcgggatttctgtggatcaggtcaatatcaaagcaacgactgaggagcatttgggatttaccggaagagaagaaggcatttcttctcaggcagtctgtttgttggaatctttttatgagagcagcgtagccgttgctgattcagcaaaacgatgttcgtcctgtcagggatgtagcaaagaattttaaaaagagaatagacaaagaggttgttagtcatgtttaaacatataaaggaagaatttgcggtcattcaggagagagacccttccatcaaaagtccgatggaagtgatcctgtatccgagttttaaggttatgatcagttaccgcagggcgcacaagttgtatctgaaaggtcattatttctgggcaagatggatttcccagcgtgccgccagaaggaccgggatcgagatccatccgggagcaacgatcggcaaaggattttttatcgatcatggtaccggcgtcatcatcggagagactacgatcattggagataatgtcaccttataccagggagttaccctgggtggaaccggtaaggagacaggcaagcgtcatccgactttggaggataatgtcatggtcagtgccggagccaaggtcatcggttcctttactgtaggcaggaattccaagatcggtgcagggagtgttgtgatcgaggaagtgccgcccaactgtactgtggttggtgtgccggggcatatcgtcaagcagaacaatgtcaaggtgccgaccagcgatatggatcagatccatttaccggatccggtacaggaagacatcaaggtcttgcaacaggaaaattcagaactggtcaaccgtgtattgcagttggaaaatgaaatacgcagtttaaagaaataagaacataaggagaatttcatgaagatctataatacattatcaaagaaaaaagaagagtttgtgccgatcgaagagggcaaggtccgtatgtatgtctgcggaccgacggtttacaattacattcatattggtaatgcaagacctatgatcgtttttgacacagtgcgccgttatttagagtttatcggttatgatgtcaactacgtttccaacttcacggacgtggatgacaagatcatcaaaaaagcgatcgaggaaggttccacggcagaagaagtgtcaaagcgctatatcgcagagtgcaaaaaagacatggcagacatgaatgtcatgccggcaacgacccatccactggcaaccgaggagatcgggggcatgatccagatgatctctaccctgattgaaaaaggctatgcttatgtggtatccgatggaaccgtatattaccgcacacgcaagtttgctgactatggcaaactttctcataaaaatctggacgatctggaagccggacacagaagcatcaaggtagtcggagacgaaaaggaagatgactttgactttgtgctctggaaaccaaaaaagggtggcgagccatactgggagtctccatggtgcgacggacgtccgggctggcatatcgagtgctctgttatggcaaagcattatctgggcgatgagatcgatatccatgccggtggcgaagatctgatcttcccgcatcatgaaaatgagatcgcacagagtgaggccgccaatggcgtagaattctccaaatattggatgcacaatggtttccttaatattgacaacaaaaagatgagcaagtctctgggcaatttctttaccgtaagggagatcggcgaaaaatatgacctgcaggttctgcgtttctttatgttgcaggcacattatcgcagcccgctcaacttcagcgcagaactgatggaagccgcaaagaatggtctggagcgtatccgtaccgcagcatccaatctgcagttcttagcagatcacgcagaggcagaggcatttttggacggcgaggaagcaaaacttgcagaagcaaagaactatgtagacaagttcaaggcggccatggaagatgattttaacacggcagacgcgatctcttctatttttgaactggtaaaatatgccaaccagaatgcagacggatcttcctccaaggcatatgtgcaggcacttttggacgagttaaagacactttgcgatgtgctcggtattatcgtagagaccaaggaagaaatgctggattctgacattgaggcaatgatcgaggaacgtcagcaggcaagaaagaatcgtgattttgccagagcagatgccatccgtgacaaacttttggcaaagggcattgtactggaagataccagagaaggggtaaaatggaaaaaagcctaaatcaagagatcaaagataaatttgcgatcgctgacgttgatatccgtacctactcgccgctgacactggcttatatcggggacgggatctttgatgtgattatccgctccattgtggtaggcaggggcaatacgccggtcaatcaactgcatcacaagaccagccatgtcgtcaaggcacattcgcaggcgatcatggcggaggcactgatggatgtgctgacggatacggaaaaggatatttaccgcagagggcgcaatgccaagtcacacaccatggcaaagaatgcaacggtgacggactaccgcagtgctacgggatttgaggcattgatgggatatctctatctgaccgatcagatggagcgcatgatggaagtggtcagcattgggctggaacgctgtcatttattataagcaggaaaggataaagaatggaagagacacaaagccttacaatagagggaagaaatgccgtgttggaggcatttcgctcaggcaagaccatagacaagttgtttctcttggacggctgcatggacggaccgatccggacgatccagagagaggcaaaaaagcacgacacgatcatttcttatgtgaccaaggagcgtctggatcagatttctgagaccggaaagcatcagggcgtgatcgcttatgcggctgcctacacctatgccagtatcgatgatatgttacaaaaggcaaaggatgccggcgaagatccgtttttgatctttttggataatgtggaagatccccacaatctgggcgccatcatccgtacggcaaatctggcgggggcgcatggcgtggttatcccaaaaagacgtgcagtaggactgacggcaaccgtggcaaaggcaagtgccggagccatcaattatacaccggtcgcaaaggtgacaaatctgtcccagaccatcgaaacactcaaacaggaaggtatgtggttcgtctgtgcggatatgggcggaagcaccatgtatgatctgaacctgacaggaccgatcggacttgtgatgggcaatgagggaagcggtgtcagtgaccttgtgaaaaagcactgtgatttcgtggcatccatcccgatgaaaggggatatcgattccctgaatgtttctgtggcaacaggcgtgctgatgtatgagatcgtgcggcagcggcttttgaaaaaataggggagcccatggacagatatgacgagatgacggatgaagtcttggtagcagcctatcgcgcaggcgattttgcagccatggagcatctgtgcaaaaaatatcaaaaagtggtttctgcttacggcaaaaagttctttatcaaaggcagtgaagaacaggatgtcgtgcaggagggcatggtcggtcttttcaaggcgatccaggattatgacccacagacgcaagtgagcttttcgcattttgcaaggctctgcatcagccggcagatctataaggcgatcgaggcggcggatcgcaagaagaaccagccgctcaattcctatgtgtcgatctttgattcggaggacgaggagagcccaaaccggcagatcatcgagaatatcttggcggatgatgtgcagaatccggaaaatgtatggatcgatgcggaaaagacagagcagatcgtagaacagatcatcaaaaatctgagcaagatggaactggaagtctttttttacatggtacagggactggactatcatacgatcgccgtaaagatggacaagacagaaaagaatattgataacgctatccagaggattcgacaaaaagttcgtcgcattttggcataatatgtatgatgtcaagggcgcgatgaatttttttgttgcactttgcggtaactgatgatagaatccatgtgggagtttaattaaaaatgttaaataagattttagaacacaaaacagaagaattaccatctttagagcgttttaagatgctgggatccaaggtggtagtggagatgaaaaaaccggtactttccagttttaatctgcgcaatctcaagtattttaatgagatctatgggacagcaaaaggggactggctgatcacacttatggtggattatttttgccgggaaaacaaaaagagtattttgggaagcatgagttatgtggaccatttattagttctctgtgaggcgggtggagatagcgatgaggagatcttagccttttatcaggatattgcagaccgcttcttggagcgagtcagtgagcattatgaccgtgtcaagatccatgtggagtgcggtctgtacgtcatgcagccgggagacagttttatctatgcacaggacaatgcacgctatgcacgcaggagcatccggcatagttattcaaatacggttgctttttattccgaagacctgcgccgcagatccatcaagaaggcaagtattattccaaattttgaacatgccattgatacagacgggatccaggtctatttacagccaaaatgttctgccaagaatgaccgtatcattggtgcggaggctctgtcacgtttttgtgacgaggacggcgagatcttgtcaccggcgatctatgtgccgatcttagagcaggctgggatcgtttccagactggattatcaggtgctggtaaagagcgtagaacttcttagtaaatggcgggacgacggacatgaacttttcccgatctcggtcaatctgtcgcgtgtggaccttttggaagatcgttttattgaatctctggatcatctggtggaagatgcagggctggacaaacaatatatcgaatttgaattgacggagacagtgctggtcaaggatctggatatgatcattgctaaaatgaaccacctgcgcgagaagggctaccggatcgctttagatgattttggttccggctacaattccttatatgttttaggacaggttccggcaaatgtgatcaagtttgatcgtggatttgttttacattccatccaaaatcagatgggaatgaccattctttccaatctggtcaacacctttaaggagatcgagtttgaggtcttgtgcgaaggggtagagaccgaggaagaaaagcagaagatcgtttcctgcggttgtgatgtcattcagggctatctgtatgacaaaccgctttgtatcgatgattttgaaaagaaatatatttatgcataaaaagcgcaaaagatagcataagataaaaatcgaagtcaggaccgttgtaaggacagccttacaacggtttttttacgcattctttttgcatgtgatggaaagcaggcgcaggtatgccatgaaagccgatacgacctgactgcacaggacgccaagcaggaaggcgcggaagccgtaaagcgggatgccaaagaagatgaaggcaagacggatcagggcaccggtcatgctgttaaaaaaggtatctttgacattaccaagaccgtttaagatgctgttcatggtcgtgccgagaaaaagaaaaggacacagccaggacagggtgcggatgtagataccggcgacttcgtttgcaaatattttctgcccgatcaaagggctgaaaaaataaaagaaaaaggaacataaaaagcctaagaacatgcagaggaaaaagccaacggtgatggaatgccggatataatagttcctgccttcttccttggcgcgcgagatcgagggcaggagcatgaccgcgatggagttggaaaggacggtcggaaaaaagatcatgggcagagccataccgctgtagatgccatagatgctgagggactgggtattggtcagcccgaagcgcaccagacaaagcgggatcatgatattttcaatgccgtgtaagacagtgaggagcaggcgggtggcggtcaggggacaagccatggacaaaagatctttgcaggtggtgttgacttgtgcgctcggcttttgccggatctgcttctggctgagggacaggagatttaagtaataaaaggttgctgcgatctcgcccaggaggagccctagcatggcatgaaatttcgtgaaaggcagaccgctatgtatggtaatatagtagatgcccataacactgccgatgcgtaccacttgttcaatgcactgtccgatggatggaatctttgatttttgcagaccatagtaataaccgttgatacatccatggatgcattctaaggggatgcacaagatgagcggatagaggagtgtctttatggaaggctcatgaaagagtccggctgcgatgctgtcagcaaaaagcagacaggggatgcaaaagacggcgctcagggcaagggagaggcacattcccatagccaggtaggatttttccctgccatctttggcggaagaacttttggcgacaaaacgggagatagcggtgtggatgccggagttggcaaaggctattcctactgccaagaggggcattgccagttggtaaagtccgagttcctttgcaccgatggcgcgtgacaaaaagatcttataataaaagcctaaaagacgacagaaaagcccggtaattgtaagaagtaatgcaccagaatagacggggtgagtattttttcgcaagagatttccatcccaaaaacatttttaacattatatgttagaatttggttgacagaacaaaatgggaatgctagtatatcaatatcctagtaaaaaggtaggaaataaaacgaggtgaaaacttatgaaagaatttgtttatttggacaatgcggctacgacaaaagtcagaccggaagttgtggaagcaatgcttccttattttacagagatttatggcaatgcatctgccgtttatgattttggacagaagtgtaagcaggcgattgaagatgccagagagacgatcggatcctccatcggaaccagggcttcaaatatatattttactgcaggcggaagtgagtcagacaactgggcattaaagggtgttgcagaggtctacaaggataagggaaaacacatcatcacgaccaagattgaacatcatgccatcctgcatacttgcgcttatctggaacagcagggctatgaagtgacatatctggatgtggatgcagacgggctggtttccccggaagatgtcaagaaggcgatccgcccggataccattctgatctctgtgatgtttgctaacaatgagatcggaaccattgaaccgatcgaggagattggtgccatcgcacatgaacatggcattttattccatacagatgctgtacaggcatatgcccaggtgccgatcgatgtggaaaagatgcatatcgatcttttgagcgccagtggacacaaactaaatggaccaaaaggtattggtttcctttacattcgtcagggacttaaattaaaatcctttatccatggtggtgcccaggaaagaaagcgtcgtgccggaacggaaaatgtgccgggtatcgttggacttggcaaggcggttgagattgctatggcaaccatggatgagcgtatcaaaaaggaaagcgaacttcgtgactatctgattgcaagaatagaagatgaaattccgtttgcaaaattaaacggacacagagttaagagactgccaaacaacattaacttctgcttccgttttattgagggcgagtcaatgttgatcatgttggatatggctggtatctgtggatcatcaggatctgcatgtacatcaggatccctagatccatcccatgtccttttagcaatcggtctgccacatgagatcgcacatggatcccttcgcctgaccttaagtgatgagatcaccaaggaacagttggattatgttgtggatcatttgaaagaaattgttgcaaaacttcgcagcatgtcaccactttatgaggactatgcgaaaaaacatttgtcataagtatttaaaacggaggaaaaattatgtatagtgaaaaggtaatggatcattttcaaaatccaagaaatgtcggagaaatggaaaatccgagtggcgtaggtacggttggtaacgctaagtgtggcgatatcatgagaatgtatctggatattgacgaaaatggtattatcaaagaagcaaagttcaagacatttggctgtggcgcagcagtggcaaccagcagtatggcaacggaacttgttgcaggaaagacggtacaggaagctttggaagttaccaataaggcagttatggaggctctggacggacttccacctgtaaaggttcactgttcccttttggcagagcaggcgatccatgcagcactctgggattatgcacagaaaaatggcatcaagatcgagggcttggagccaccagtcaatgatatcgaggaactggaagaagaggaagaatactaattgaaacaaaaagtagttgttggtatgtccggaggagtagactcctccgtggcggcatatcttttaaaagaacagggctatgatgtgatcggcgtgaccatgcagatctggcaggatgaggatgaatttgtgcaggaggaaaatggcggctgctgtgggctttctgcggtagatgacgccagacgtgtggctgcaaggctggagatcccttattatgtgatgaactttaaatcagagttcaagcataaggtcatggattattttgtggaagaatatttacaggggcgtacccctaatccttgcaatgcctgcaaccgctatgtcaagtgggaggcacttttagaccgtgcgctctccatcggcgcagattatatcgcgaccggtcattatgcaaggatcgcgcagctacccaatggaagatatgcgatcaccaactctgtgacggctgctaaggatcagacttatgcgctttataacctgacccaggaacaactgtcgcatacattgatgccggtcggtgtctatcacaaggatcagatccggcagatcgcggaagatcttggacttccggtggcacacaaaaaggacagtcaggatatctgttttataccggataatgactatgcatcctttattgatgaggccgcaccggatcgtgtaccgggaccgggagattttgtcctgagcgacggtacagttgttggaaaacatgagggcgttacgcattatacgattggacagcgtaggggacttggcatttctgtaggcaagcgcatttttgtcaaggagatcgatgcgaaaaataaccgtgttgttctgggcgatgatgacgatgtctttacggatcatctggtcgcagaccagatcaactgcatggctgtgccggaattcttggacggacaggaattccttgccaagatccgttattcccacaagggcaccaagtgtcatgtgaaaatgcttgcagacggacagatgcggctggactttgaagaaccggtacgcgcggtcacacctgggcaggcagttgtcctttatgatggacattatgttgccggaggcggcacgatcgttcaagagatgttatattagaaatcagagagccatctcattacgagatggctctttttgtgcttggcgcgaaaatgtgcagaagcattttttatatgccggaaaattagtagatgctatgtggatgtggcacacggtggagatagaccatatattcgtcaaatccacaggaggcaagaaagcccggcagacggtcaaagcctaatgcaatatcgctgggtttgtgtgcatctgcaccgatcgtgatcagttttccgccgagttcatggtagcgctttaggatctgcgggcatggatttggcacagaaagcccacagcggaaggcaccggtgttgacttccagtgcaatatcatgtgcaatgagaaaacgcaggatatcatcgatcagcggcgcatatggcgtgtaagtatcgtaaggctgggcaggatcctgcggtccatagcgaaagacatagtccaaatgtcccagagcgtcaaaattgtgaaatgccgccaggttctcatagacggcctgataatattctgtataggcttccgcaggatcgcgcctctcaaaataaacagggtagtaaggatctcgcgtatgtacgacatgcacagagccgatgacatagtcaaaggcataggatgcaagcagatcggcatgcttttgtgcaagatgcggttgcagacccagttccaagccatgaagtacaaagaaaggcgcagcctcttttcgcaaagccggcatggctttttcgcaagcatccagatccagatcgaaaagatgtggttcttccttatagtctaaatccaagtggtctgtaaatgtaatgccggacagacccaactgtctggctttttctatcatatccaaaggatccgcgtcactgtcaccggaaaaatgacagtgcatgtgattgtcccaaagtttcattggtaaagtacctccattcacttaccaattatagaaaaatgtcgcataaaatgcaacgaatccgcaaaatgtcaggacagaggaaaaaccttagtgaaaaaattatcaaactttgtttttggggttgaaatgtaggtagaaattggttaaaatgaagtcagtttgggaatgttattccctagacatagtatttttaaatcttaggaggaatttaaaatggcagtaagagtagcgattaatggattcggccgtattggtcgtcttgcattcagacagatgtttggagcagaaggatatgaagtagttgcaatcaacgacttgacaagcccaaagatgttagcacatctgttaaagtatgattcatcacagggtaagtatgctttggctgatacagtatctgctggagaagattctatcacagttgatggcaaggaaatcaagatctacgctttcccggatgcaaacaattgcccatggggagaattaaaggtagacgtagtattagagtgctctggtttctacacaagcaaggaaaaggcacaggctcatatcaatgctggtgctcgtaaggttgttatttctgcacctgcaggaaacgatcttcctacaatcgtttacaatgttaaccataagacattgactccagatgacaagatcatctcagcagcttcttgtacaacaaactgcttagcaccaatggctaaggcattaaacgatgcattcggtatcaagtctggtatcatgagcacaattcactcatacacaggtgatcagatgacacttgatggcccacagagaaaaggtgaccttagaagatctcgtgcagctgcagttaatatcgttcctaactcaacaggtgctgcaaaggctatcggtcttgtaatcccagagttgaacggaaagttgatcggatctgcacagcgtgttccatgcccaactggttctacaacaatccttgttgcaacagttgagaagtcttgcacagttgatgaaatcaacgcagcaatgaaggcagcagctacagagtcattcggatacaatgaggatgaaatcgtttcttctgatatcatcggaagcacatatggttctatcttcgatgctacacagacaatggttggagaagacaacttagtacaggttgtttcttggtatgacaacgagaacagttacacatctcagatggttcgtacaatcaagtatttctctgagttagcatagtcctagccaacatggggtccggtcgttgggaccggacctcttttttattaaaagagtggaggatttaatcatgggattaaataaaaaatcaatcgatgacatcaatgtaaagggtctgcgcgttctttgcagatgcgactttaatgtgcctcttattgatggcaagatcacagatgagaaccgtctggtacaggcacttcctaccatcaagaaactggttgctgacggtggcaaggtgatcctttgttcacatcttggcaagccaaagggagagccggttccggaactttctttagcaccggttgctaagagacttacagaactcttaggacaggaagtaaaattcgcagcagatccggaagttgtaggaccaaatgctaaggctgctgtagaagcaatgaaagatggcgacatcatcttacttgagaacacaagataccgtgcagaggagaccaagaacggagacgagttctctaaggatctggcatccctttgtgatgtatttgtaaatgatgcattcggtacagcgcacagagcacattgctcaaatgttggtgtgacaaagtatgttgacaccgcagttgttggttacttgatgcagaaagagatcgatttcctcggaaacgcagtagagaatccggttcgtccgttcgttgctatccttggtggagcaaaggtttcttctaagatttctgttatcgagaacctccttgacaaggtagatactttgatcattggcggtggtatggcatatacctttatggctgcacatggcgagcctgtaggaaagtctcttctcgagaaggattacatggagtatgcacttcagatggaagaaaaggcaaaggaaaaaggcgttaagcttttgatccctattgataccgttgtaggtgatgacttcaagaacgactgcaacttcaaggtcgtagaacgtggagagatcccggacgacatggaaggtatggatatcggacctaagacatgcaaactctttaccgatgcgatcaaagatgcaaagactgttgtttggaacggaccaatgggatgttttgaaatgccaaactttgcaaagggaacgatcgctatttgtgaagcacttgcaaatatcgatggaacaaccattatcggtggtggtgactctgcatccgcagcaaacaaccttggctacggcgacaagatgacacatatctctaccggtggcggcgcatctttggaattcttagagggtaaggaacttcctggtgtagcagcagcaaacgataaataagaaaaggggttattataatggcaagaacaaagattattgcaggcaactggaaaatgaacaagactccaagcgaggcagttgctttgatcaacgaattaaagccgttagtagcgaatgatgacgtagatgtagtattttgtgtaccggcaattgatatcattcctgcagttgaggctgcaaagggaaccaatatccacattggtgcagaaaatatgtattttgaggagagtggcgcttacacaggcgagatcgctccaaacatgcttacagatgcaggcgtagagtacgtggtactcggacactcagagagaagagaatacttcgctgagacagacgagactgtaaacaagaaggttttaaaggcatttgaacatggtttgacaccgatcatctgctgtggtgagactttgacccagagaaaacagggtatctacattgaatggatccgtatgcagatcaagatcgcattccagaatgtcacagcagatcaggcaaagaaggcagtcattgcttatgagccaatctgggcaatcggaacaggcgagaccgcaacaagcgatcaggcagaagaagtatgcggcgcaatcagaaaatgcatcgcagaagtatatgatgaggctacagcagaagcaatccgcatccagtatggcggatctgtaaatgcaggcaatgctgcagaactttttgcaaagcctgacattgatggcggacttgtcggcggtgcttctttgaaggcagattttggcaagatcgtaaattataatgcataatggcatcgttacaactgctattgtaactctaggagacatccaattctggatgtctcctttttctcttgtgacacttctttatatatgctaaaataagccgtggttaggtgcgtatggatcgaaaagaaatgcgtatttttgacaggaggaatagatacaaatgaagcgtggacttgttataggacttatacttaccgcctgcttactggcaggatgcggcaaaacagataaaaaagagactaaggagaccgtcaaagaagtggcaaaacaggaagtctccgactacagccagttgtcgatcaaggaattggaagtgctgggtgcagataacgatgaagaagccatgatggaactggcaaatcgttatgattatggcagtgaggactgcgaacaggattttacagaggcaaaaaagtggtatgaatccgcaggagaagtgggaaataccgatgcactttgtgtactgggatattatgccctcaacggtattgcgcaggatgtggatctggaccaggcagcagactatttccagacggcgatcgatgccggaagtgagcgggcatatgtaggcttggcgcgcacatatctggctggttatgaggatgaggcagacagacctgccaaggcatatgaaaatatcaatcttgcctaccaaaagggcattccggtagggcagtattatatggcttatcttttagagaacggtatcggttgtgcgcaggattatgcacaggcgatgagcatatatgagcaggtggcagaactcaaagaccttaccatctatgacgcttatcttccaaatgctgcggcgacggatcttggcatgatgtatatgcgtggtgagggcgtggcacaggattatgaggaagccatgaagtgtttcaagacagcggcaggcaaagattatgccatggcacagtattatatgggacagatgtttgaaaacggttttggctgcgatcaggattataaggaagccttacagtggtatcagagcgccgcagatcaggactatgctccggctttgaaccagatcggctacctttactataatggatttggcgtggaaacagatattgatcaggcaatctattatcagaaactggctgctatgcagggttatgcggttgcacagatcaatttgggatatttgtttgaaaacggtattggagtagagcagaactacagcacggcactggcatactatcgcatggcggcagatcaggataatgagggtgccaaggaagcagtcgtgcgtgtgctcaaactgatggatgaaaaagagtaagaattacgtgggcatcgtggcggcggtctttgtgatcgccatgatcgctttggtctggtatctgctctttggggcagactttatccggcgtgcacaaaagtccgacggacaggaagagaagcaggaggagaccacggaaaaggaagaacttttaaacatttccaacgtggatcaggcctatgatgccatactcaacaaaagtacaaaagaatttataggaaaccatccgatcgacgaggagtttctttcctggttcaccggcaactatggtatagagcagttggaaaagatcgcttcttatgcccagttggacgatggagagatttggtacgaaatcacagggaacagtatccatgttttgtggtatgattattgtatggagactgggatccagcagtatgcctatgacaagacgtatgttaaagagtgtcaggatgcagatcgtatcgtgctggattttaccggtgatttttctctggctgagggcgtggggacgacagactattatcacagtgtgggggatgatatcaccaaatgcctgggggcagatctgcgtcaggaaatgctcaatgcagatatcatgaccatcaacaacgagtttgtctactcgacacgtggacaggcactggcgggaaaagcctataccttccgcggagatccaaagacctgccagaacctcgtgctcctgggcgtagatgtcgcgggacttgctaacaatcatgtctatgactttggagagaatgcctttttggataccttagataccttaaaggcgcagaatatcccttatatcggtgccggcaggaacctggaggaggcatcggagccgatctttttcattgcaaacggcaagaagatcgccatcgtggcggcgactcagatcgagcggagcaccaaatacaccaaggaagcgaccgaggacagtcccggagtcctaaagactttggactcggcgaaatatgtagcccagatcgcaaaggcaaagcaaaatgccgattatgtgatctgctatgtgcattggggcacggaacacacacatcaatacggcagtgaccaggtcaaactggcaaaagattttgtggcggcaggagcggatgccatcataggcgctcatccgcactgtttgcagggggcagacatcatgaatggtgttccggtcttttacagtctgggaaatttttatttttcgcaggaagcagaaatgccggatgattatgatactgccatggcacagatcatcattgatgattccgggacactgagtgcaagactcctgccgtgtcatttttcgggaggaaatctggaactggtatccgacccggaaaaataccgccagatccttgctgatgtagaaggatattcggaccagatagcttttgatggtgacggctatctacttgtccattagttcaagtgtaaagtgcatgttttttagttattgtgtccattgatttttaccatgaaatcgggatagaataaatataatttcagagaaaagaggaaaagagaatgagcaagaagccagttgttttaatgatcttagatggatttggtctgaatgacagacacgaagcaaatgccgtatatgaggcaaatacaccaaatatcgatagtttgatgcagaactatccttatgttaagggaaatgccagcggacttgcggttggactcccggacggacagatgggaaactctgaggtaggacacctgaatatgggcgcaggacgtatcgtatatcaggaactgacccgtattaccaaagaaatcgaggacggagatttcttccagaatgaggctttgaaaaaagcaatggagaatgctaaggcaaaggattctgcccttcatttattcggacttttatcagatggtggtgtgcacagccacattacccatttatatggattgctcgagatggcaaagcgcgagggcttgagcaaggtttatgtccatggatttatggacggccgtgacacagcaccgaccagtggtattgagtatgtcaaggctttagaagaggagatggcaaagatcggtgtcggtaagatcgccagtctttccggtcgttattatgccatggatcgtgacaatcgttgggatcgtgtggaaaaggcctaccgtgcacttactcttggcgagggcaatacagcaagcgatgctgtcagcgctatgcaggcatcctatgatgatggcaagacggatgagtttgtgatcccgaccgtgatcacagaagatggtcaggcgatcggcaaggtatccgcagatgacagcgtgatcttctttaacttccgcccggatcgtgcgagagagatcacaagagccttctgcagtgatgattttgacggatttgacagaggtcagcgtctgccgcttacctatgtatgctttaccgagtatgatgtgacaatcccgaataaggagatcgctttccacaaggtagagttacacaatactttcggcgaatttttagcagcacatggaaagacccaggcaagaattgccgagacagaaaagtatgcgcatgttactttcttcttcaacggtggtgtagaggagccgaacccgggcgaagaccgcatccttgtaaagtctccaaaggttgcaacttatgatcttcagccggaaatgagtgcttatgaagtatgtgacaaattatgtgatgcgatcacttctgacaaatatgatgtgatcatcatcaattttgcaaatccggacatggtaggtcataccggcgttgaggcagcagccatcaaagcggtagaagccgttgactcctgtgtgggacgtgcagtagaagccttgaagtctgtagacggcaccatgttcatctgtgcagatcatggtaactgcgagcagttagtaaactacgagacaggtgagccgctgaccgcacacacgaccaatccggtaccattcatcctggtaaacgcagatccttcctatggtcttcgtgaaaatggatgcttagcagatatcattccgaccctcatcgaactgatgggtatggaacagccggaagaaatgacaggcaagtcacttttgatcaaaaagtaagatccgcctgtattttgcaggcgtatatcataaaagcataaataattaaggataatggaggaaagacaaatgaaaccaatgaaagaaggcaaggtccgcgaagtttacgataatggtgacagcatcatcatggtagccaccgatcgtatctctgcatttgacgtgatcttaaagaacaagatcgtagacaagggagcgatcctgacacagatgtccaagttctggttcgattacaccaaggatatcgttccaaaccacatgatctcagtggatgtgaaagatatgccggagttcttccagaataaggaatatgaaggaaagagcatgatgtgtaaaaagttgcagatgattccgatcgaatgtatcgtccgtggttacatcacaggaagcggctgggctagttatcaggagaacggcacagtatgcggcatcacccttccggttggtttacaggagtctgaaaaattgccggaaccgatctatacaccgtcaacaaaggctgagatcggtctgcatgatgaaaatatttcttacgaacagtctgtagaagtattggaaaaggctttcccgggcaagggagaggaatatgcttccaagatcaaggaatatacacttgcactttacaagaaatgtgcagactatgcacttaccaagggcatcatcattgcagataccaagtttgagtttggtctggatgaggatggcaatgtcgttttggctgatgagatgctgacaccggattcttccagattctggccattggagggctatcaggcaggacagggacagccttcttttgacaagcagtttgtaagaaactggttaaaggcaaatccggacagcgattatttgcttccccaggatgtcattgacaagaccatcgcaaaatacaaagaagcatttgaaatgctgacaggaaagaaatttggagcgtagacaggagatgcagatgacgacaacagattcaaataaggctatgccgtttgaaggactgcatgaagaatgtggtgtctttggcatgtatgattttgacggcggtgacgtggcttcctctatttactatggcttgtttgccttacagcacaggggacaggaaagctgcggtattgccgttagtgagacgagcggaccaaagggcaaggtcacttcttataaggggatgggacttgtcaatgaggtttttgacggcgagaccttggaaaagatgcggggtgacattggtgtaggacatgtccgttattcgaccgcaggagagtccaccagagaaaatgcacagcctctcgttttaaattatgtcaagggaacgctggcgctggcacacaatggaaatctgatcaatgccaaggaattaaaaaaggatctggaatataccggagccattttccagacaacgatcgactccgaggtcattgcctatcatattgccagagagcgcttgcagtctaagactgcagaggaggcagtacgccgcgcctgcatgaagttaaaaggtgcctatgcacttgttgtggcttctccacgaaaactgatcggtgccagagatcctttcggctttaagccactttgcattggtaagcgtgacaatgcttatatcttagcatccgagacctgtgcgctggataccatcggtgccgaatttgtccgtgatgtcttaccgggcgaagttgttacaatcacaccggaaaagggcattgagtccgatatggaaatggcacttccaaaagaaaaagaagccagatgtatttttgaatatatttatttcgcaagaccggacagtcatattgacggggtcagcgtttatggcagccgtatcaaggcgggcaagttccttgccatggactcaccggttgaagcagacttggttaccggcgtaccggagtcgggcaatgcggcagccctgggctattccttacagtccgggatcccttacggaactgcttttgtcaaaaacggttatgtgggacgtacctttatcaaaccaaagcagagcagtcgtgaatccagtgtgcgtatcaagttaaatgtcttaaaggaagccgttgcaggcaaacgagtcgtcatgatcgatgactccattgtgcgtggaacaacatcagaccgtattgtgcgtatgctgcgtgaggcaggtgcgacggaagtgcatgtgcgcatcagttcaccaccattcctctggccgtgttattttggaacggatattccggagcgcgaacaactgatcgcctacaagagatccattgaggacatccgcaagatcatcggtgcagattctcttggatatcttggcatggaacgcctggatgagatggtggaaggtctgtcgatctgtcggggatgctttaacggcaagtatccgatggagccgccgaaggaagatatccgtggtgaatattttgacaaagagatcgatatggcaaagaaattggaacgcaatttataggaggagagtatgagtacagatcgttacagtagcccactttcagagagatatgccagcagggaaatgcagtatatcttttctcaggataaaaagttctccacatggagaaaactctggatcgcacttgctgagacagagatggaattaggactgagccaggacggcaagccggtcatcacacaggatatgatcgatgagatgaaagcacatgtcgacgacatcaattatgatgtggcaaagaaaagagaggcagaggttcgccatgatgttatgagccatgtctacgcatatggcaaacagtgcccgaaggcagcaggcatcatccatctgggagcgacttcctgctatgtaggtgataacaccgatattatcatcatgcgtgatgcacttcttctggtgcgcaagaaactggtcaatgtcattgcagaattggcaaagtttgcagatacctataaagatatgccgacccttgcttttacacattttcagccggcacagccaacaactgttggtaagcgtgcgacactctggttaaatgagttcgttatggatctggaagacctggattatattttgtctagtttaaaacttttgggatctaagggaactaccggtacacaggcaagtttcttggaactcttccagggagatcaggagactatcgacaagatcgatccgatgatcgcaaagaagatgggctttgagaagtgctatccggtcagcggacagacatattcccgcaaggtggataccagagtctgcaatatcttggcaggcattgcggcatctgcacacaagatgagcaacgatattcgtctgcttcagcacttaaaagaagtagaggagccatttgaaaagagccagatcggttcatctgccatggcatacaagcgcaatccgatgcgtagcgagcgtatcgcatccttatcacgttatatcattattgatgccttgaatccggcgatcacatctgcaacccagtggtttgaaagaactttggatgattctgctaataagagactttctattgcagagggatttttggcatgtgacggtgtcttagatctttgcctgaatgttgtggatggtcttgtggtctatccaaaggtcatcgaaaagagactgcgcagtgaactgccatttatggcaaccgagaacatcatgatggatgcggtaaagaatggcggcaaccgtcaggatctgcatgaaaagatcagaaccctttccatggaagcaggaaagacggtcaaggtagagggcaaggataataacctcttagaattgatcgcagcagatgatgagttcccgatgggcttagaggaactggaagcaaccatgcagccggacaagtacgttggacgcgcacctcgtcaggtagtcaaatatttagaagaagtcatccagccgatcctggatgaaaataaagatgttctcggtgtaaaggctgagatcaacgtctgatcagaatgcaggaacttcctgtgcaattatgcacgggaggttttttttgcatatttttatcgcgggaaaaatcaaaaaatgcaagttaaaaattttaat

SEQ ID NO: 12617 - DNA, 33019 bp, Unknown
  gut microbiota DNA sequence
cattgcacttcaacgcgataaagtatataatgtcactagattttgtgagaacaaggtcggaaagaagttttgagtaggaggacacaatcaatgaaattcgagagtagttatttgcagagagtgtatgacggacttgagagccgtaacgcagagcagaaagaatttttgcaggcagtggcagaagttctggaatctttggagcctgttgtggcagccaatccggaattggagagatggggcatcatcgagcgtatcgttgagccggagcgtattatccagttcagagtatcttgggtagatgacaatggcaaggttcaggtcaaccgtggatacagagtacagttcaactctgcaatcggaccatacaagggaggtcttagacttcatccatccgtaaacctttctgttattaagttccttggatttgagcagatcttcaagaacagcctgacaacacttccgatcggcggtggcaagggtggttctgacttcgatcctaagggcaagtcagacatggagatcatgagattctgccaggcatttatgacagaacttgagaagcatattggtgctgatacagacgttccagccggagatatcggtgttggcggacgtgagatcggatttatgtatggtcagtacaagagactgcgcaacgaatttaccggcgtacttacaggaaagggacttacttacggtggttctcttgctcgtaccgaagcaaccggttatggactctgttattatacacaggaggcattaaagagtctcagaaatacagactttaacggcaagacagtcgcagtttccggtgcaggaaatgttgctatctacgctatccagaaggcatatcagttaggcggtaagccagtgacatgttctgattctaccggttggatctatgatccggaaggaatcgatgtagaccttttgaaggaagtaaaggaagtaaagcgtgctcgtttgacagagtatgctgctgcacggccatctgctgaatatcatgagaagaagaacggagagcatggtgtttggtcagtgaagtgtgatatcgcgcttccttgtgcaacacagaacgaattggatgaaaacgatgctaagatgctgatcgacaatggcgttcttgctgtatgtgaaggtgcaaacatgccttctacaccagccgctattgaggcacttaagaaggctggcgtcctctttggaccggcaaaggccgcaaacgcaggtggtgttgcaacatcagcacttgagatgagccagaactctgagagattacattggacatttgaagaagttgacgagaagttacagcacatcatgaccggtatcgtacacaactcactcgatgctgctgcaaagtacggcctagacggagatctggttgccggtgctaatatcgcaggctttgaaaaggttgcagatgctatgatcgcacagggtgttgcttactaaaatatagcattttcagaggcgttccttttgaacaaagggacgtctctttttttctcctttcattcgggcggtctataaaaaactcttgcgtataaggtatgactgtgttatactttgttaagttgtgacgaatggctcgtagttacgggcttacattaggaggttctcatggaagtattaaagacaattcttatgattgcatttattattatatgtttggctattatcgtgattattctgatgcaggaaggtaagtcagcaggtcttggttctttgagcggacagacatctgagacatactggagcaagaataagggacattccaaagagggaatgcttgtcaagatcaccagtgttcttgttttattattctttgtgcttgccgcagttttgaatatcggaagtttttaatcataggtatgtgagccatcgtggaaacggtggcttttttctttatgaaaagagtgaggacggggcatcctagtgatgtcagggagattggatatgaacgagaaaaaattggaagaacgcaaaaaaatgatatatggtcttttgtgcgatgaactttatgttcctatgcgcaccaaagagatcgctatgcttttagatatcccaaagagcaaacgtcaggatctacaggaagtgctggatgctctggtcgaggagggcaaagcccaggtatcaaaaaagggcaagtaccagaaggcagaaaaagtggtaaaagagggggcttttatcagccatgccaagggctttggctttgtttgtgtggaggatgagggtgaggactactatatcccggaggaatatgtcggaaatgcttttcatggtgatcaggtgcggatcgaacttttgccaccgtctaagggaaagcgcagagaggctaagatcatagaggtcttgtcccatgatatttcgacggtcgtcggaacgtatgaaaagtcaaaaaattatggctttgtcatatcggacaatgcaaggatcacgcaggacatctttatcccgcaggggaaggacatgcatgcggtggacggacataaggtggtctgtcagatcacgagttatggcaaaaagaaccgcaacccggagggcgtgatcacggagatcttagggcaccgtaacgatccgggcgtagatattatgtcgatcgtacgtggctttgacctgccgacggaattcccggaaaaggtcttaaatcaggcgacgcgtgtggcgaatgaggtgtcggaagccgatcgtgccggaagactggatctgcgcggggttaccatggtgaccattgacggagaagatgccaaggatctggacgatgccatttccatctgccacaaaggcgacggttacgaactgggcgtgcatattgccgatgtgtcaaattatgtgcaggagcggagtgccctggatgaggaggcgaaaaagcgcggcaccagtgtctatctggtagaccgtgttatccctatgctgccgcatacactttccaatgggatctgttccttaaatgctggggaagaccgtctggcactttcttgtatcatgacactggatgccaagggaaatgtgatcgatcatacgatcgcggaaacggttgtcaatattgatgcgcgtatgtcttatacatcggtcaagaagatcctggtggacaaggatccggcggaatgtaaaaagtatcaggacttggtgccgatgtttgccctgatggaagaattatccggtctgattcgcaagaagcgtatgcagcggggatccattgattttgattttccggagacaaagatcgttctggatgcgcagggacatgctgtggatgtgatgccttatgagcgcaatgtggcaaccaagatcattgaagattttatgctgattgccaatgagacggtcgcagagcatttttattggcaggagatcccgtttttgtatcgtactcatgcaacgccggatggcgagaagatccgtaaactggctacctttatcggaaattttggctatacgatcaagggtggcgcggatgaggtgcatccgaaagaattgcaaaaactgttgggtaaaatccaggggacaccggaggaagattttatttcaagactaacgctgcggtctatgcaacaggcaaaatatacggtagaatgtacaggacactttggattggcggcagattattattgccattttacctcgccgatccgccgatatccggatctgcagatccatcgtatcattaaggaaaccttgcgtggcagatataatgagacaagacgggaacactatgaatcgctgttgccggtcattgcaacagagaccagtcggctggagcgccgggcagacgaggtggagcgggaggtagacaagttaaagaaagtagaatacatgagccgacatatcggagagaccttcgagggtattgtttccagtgtgaccggatgggggctttatgtggaactgccaaataccattgaggggctcgtgcatatctctacgatccggggggactattatcagtttgtagaagaaacttatgaacttgtcggagagcgcacaaatcgacattataaactggggcagcgtgttaaagttgtggtagacgactgcgataccatggcgcgcacgatcgactttgttttggcggaggatgaagatgagtaaagagagcaagaaactcatagcaaacaataaaaaggcatatcacgagtattttctggaagaaaaatatgaggcaggcatcgcgctgcatggcacagaggtcaagtcgcttcgtatgggaaaatgtagcatcaaagaggcatttgtgcggatcgagaatgatgaggtgatcatttaccagatgcatatttctccctatgaaaaggggaatatctttaaccgggatccgttgcgtcccaagaaacttttgatgcacaaggcagagatcaataagttaaaagccaagatcgccgagaaaggttataccttagtgccggtggaggtctatttcaagggcagtcttgtcaaggttgagatcgcgctggcaaagggtaagaaactctatgataagcgtgcagatattgccaaaaaggatatgcgccgtgaagcggaacgcgatttcaaggtgcgcaatctttagcatatgggaaatgtaactctagaaaatgacaagttgacttgaaaaaaagccataacttgttataatatatctgttccgagtcaccgatgtctatagtaggaggcttggaagttacaagtgaatatgggctagtaaaggtttcgacagggattatgaagctggagaagcgagtcgtatggtaatgcgttaaatggccaaattaaaattaaacgctgaagataataatttagcatacgctgcctaatttggcagtagtctgacctagtgcactcacacattaggacccaggcttcgactatgtgagaaacgacatggactaagctttgcgtccatgggcgtatcatgaagctactaaaaccgcaagggtgtttgttcccgggcggcagagggaatgtcaaagaacaaactacactcgtagaaggacaggggattggtttttggacacgggttcgactcccgtctagtccactctaaaagccttgagttttcaaggcttttttatttttatgacatatcctgtgtcatattatgaactccccattgaacagcatttacaaaaggtatctgtaaatactgcggagcaggtagaaccggagtttgaagagagagcaccaaaaatgtagcgtgccaacagccggcacaaaatggaaaatgtaagaaaagatacaggtggatcatatgaaagaaaaagtctttaacatcatccagatcggggataaaagtaatcgcatcagccgggcgtttgacgtctttatcacgatcaccatttttgcaaatatcgcagtgactgtcttactgacttttcaggaattggcggcattttttttcgtatttcatatcatagaatggatcactctgtttatcttttttgtagagtatgcactgcgcatttggacggcagattatctttatccggacaagagcgaattgcagtctcgcctgcattttctgatatcttttgatggaattgtggacttgcttaccatcattccggcatttttcctttccggcatggtgatcttccgcatgctccgcgtggcgcgtattttccatctgttccgtctgaatgccagatacgactctttcaatgtgatcaccactgttttatatgaaaaaagaaatcagatcatatcctcggtatttatcgtgctgatcctcatgcttgctagcagtctttgcatgtatagtgtggaacatgcagcgcagccggaggtctttcgcaatgcctttagcggtatgtggtggagcatgagtaccctgcttacggtaggctatggggacatttatcccatcacgactttagggcgtgtcatggcgatcgtgatcgcctatcttggggtaggtgttgttgccatcccgaccggtatcatcagtgcaggttttgtggagcagtatcatagaaagagcagtatttcagactggggcagggaagatatcaaagagatcgcagaggtcatggtggattcccgtctggcaggaaaatgtctggaagatgtggaggaagagggaaataccaaggtctacctgatcctgcgggataacctgtccattctgccacaaaaagatacagaactgcaactgggggatgtcctgatcttaagggacgagactatagatgaaaactaaccatttgtggtataggacatgcgtggggaataatccatactttagatagattttacatggattttacttgaatttcacatacaaatcttatacagtgtaattgtgtgtgtaaaaatattttacatagaatttttgacaatactatataagaggagataatgatggacatttttagcgtgttatccatgataggtggtcttgccatgttcctgtatggaatggagaccatgggagatggacttgccaagacggcaggtggtaaattggaacacatcttagagaaattgacatctacaccgatcaaaggtgtacttttaggtgctgcagttacggcagtcattcagtcgtcatccgcaacgacggtcatggtcgtcggattcgtaaactccggtattatgaaactgtcacaggcagttggtatcatcatgggtgccaatatcggtacgacggtcacatcctggattgtcagtctatccggcatcgagagtagcaatattgttttacaattcttaaagccgacatctttttgcccgatcttagcactgatcggtatcatccttctgatgtttactaaggatgaaaagaagcatgatatcggtggtatcttgctgggatttgctgtcctgatgtttggaatggataccatgtcaaatgcggtaaaaccgttggcagatgtcccggaattcaccagcatcctgaccatgttttccaatccggtacttggtatgatcgccggtgccgtccttacggcagtgatccaatcttcttcggcatccgttggtattttgcaggcactttgtgctaccggcagcgttaccttcggtacagcacttccgatcatcatgggacagaatatcggtacttgtatcacggcattgatctctgcaatcggagcaaagaagaatgccaagcgtgcggcttttgtccacttatactttaatattattggcacgatcctttttatggtcgtattttacactttgaatgcatttatgcattttgccttcttgggaaccgcggccaatgcggcagggatcgcagtgatccacagtgtgtttaacgtggtcgctacggtatgcctgcttccgttccatcgacttctggaaaaattggctaccattactgttcgtggaaatgatgatgatgaggaggacgaggagatggaaggacttccatccgaacttgctcttttggacgagcgttttcttgagaagccggcattcgccgttggacactgtgtgacagttgctcgcaagatggcagaactcaccgagaaatgtttagtcctttctaccgatcttttggaacaatatgataaaaagacggcaaagagggtggcaagtttagagagccagatcgatacctttgaggatatgcttggcacctatatgatcaaattatctgcaaagccgctcagcgtcgcagataaccagaccatttctacgatcctgcattgcagtggcaattttgagcggatctccgatcatgccatgaatatctgtgaaacggcgcaggatatgaaaaaaaaggaactggtattttccgacaaggcaaaggaagaattgcagatttacatccgcgccctgcaaaagatcgtttctatgaccatgcaggcatttaatacagacgattatgaactggcaaagcacgtagagcctttggaggacgtgatcgacggtatcaacgacaaggcaaagaagcatcatatcaagcgcttgcagaagggcaagtgtacgatcgcactttccgtaccgtttgaagatctgctgaccaattttgagcgtgtatctgaccattgttccaatgttgccgtatgtatgatccagactagggatgatgtctatgatacccatgagtatctggacaccctcaaggagaacaacacaccggaattccgtgctatgtatgacgagtacaaggcagaatatggtctataaggaatagaatatggcaaaaacttacaaaaagtgacaatgaattttgcatatgtcagttattttgtataaattgtatacaattttaaattttttattgacatcgccaaagacaatgactatgatgtaaataaattcagatggcaaaggcgccacagattagttttaagactgatctgtggcgccttctttttttacaaaaatccaggcagcgctggaaagggaaggagacaagaaatatgtgttcaattatggcattggcaaaaaagcatatttccatggaggaatttcaaatgcattttgccaagacgacttcaagaggaccggatatgagccgggtagagatcgtcggagattcggtcttaggatttcagagattggcgatcatgggacttaacgaaagtggtatgcagccattttccctgcatggtaattatgtcgtatgtaacggcgagttatatggttttcgtcaggaaaaggaaatcctggaaaatgagggatacactttcttgagtgattcggattgtgagatcatccttcctatgtatgaaaaatacggcgtggaaatgtttgaacgactggatgcggaatttgcaatgatcatctacgatgcaaagaaagatgatctgatcgcggcaagagatcccattggtatccgccctttgttttatgcatatgatagcgaaggctcgatcatgtttgccagtgaagcaaaaaacctgatcggcttatccgataaggtcatgccatttccaccgggacattattatgaggatggcaagttcatctgttacaaagatctttccaagcgacagacctacagcagtgatgatctggaaacggcatgtaagaagatcaaagaacttttggtcaagggcgtagaaaagagactggatgcagatgcaccggtcggattccttttgagcggtggtttggattcatctttggtctgtgccatttcacagaagatcttgggaaagccgatcaagacttttgcgatcgggatgaacgaggatgcaatcgatctgaaatatgcaaaggaagttgcagattatctgcatagtgaccatcacgagatcatcattaacaaagacattgttctttcttccttagaagaagtggtaaggatcctgggaacttttgatatcacgaccatacgagcaagcatgggcatgtatctgatctgcaaagccatccacgaagagacggatgtgcgggtgcttcttaccggtgagatctcagatgagatcttcggttacaaatatacggatttcgcaccggatgccgagagttttcaggaggaagcggaaaagagactgcgggagttatacatgtatgatgtgcttcgtgcagaccgttgcatttccgtaaattccatggaagccagagttccttttggagatcttgattttgtcagatatgtgatgagcattgatccaaaactcaagatgaacacctacaacaaaggaaaataccttctcagacatgcgtttgaggatgacgattacctcccttacgatatcctctttcgagagaaggcagcattttctgatgcggtaggacattccatggtggactacatcaaggaatatgcaaacggtctttatagcgatgaggagtatgaggagaaaagaaagaaatatacacacgcaagaccttttacaaaggaatcctttctttatagagaattgtttgaaaaatattatccggatcaggcggatatgatcgtcgatttctggatgccgaataaaaattgggaaaactgtgatgtcaatgatccatctgcccgtgttcttaagaactatggacagagtggttgttaaataagaaaagagagtaggaggacagcattatgacaaagaatgtaccagagttatttggaagtatggtctttaacgacgaagtgatgaaggagcgcttgccaaaggacatttataaggcattgcaaaaaaccatcgcagatggcttgcatttacaactggatgtggcaaatgtcgttgccgcagccatgaaagattgggcgattgaaaaaggcgcaacacactttacccattggttccagccaatgacaggcgtgaccgcagaaaagcatgacagtttcatttccccggaaccgggcggaaaagtcattatggaattttccggcaaggaactggtaaagggagagccggatgcatcttctttcccgtcaggcggacttcgtgccacatttgaggcgagaggctataccgcatgggatcctacatcctatgcgttcatcaaggacgatacactttgcattccgaccgcattttgctcatacagtggagaagcattggataagaagacaccacttcttagatccatgcaggctttggataagcaggcagtccgtgtgcttcgattatttggaaatacagacgtaaaacgcgtcattacaaccgtaggtccggagcaggaatattttctgatagaccaatccgtatacgacaagagaccggatttgatttataccggcagaacccttttcggtgcaaaaccgccaaagggacaggaactcgaagatcattattttggtacgatcaaaccgagagtttctgagtacatgaaagagttagacaaggagttgtggaaacttggtattcttgcaaagaccaagcataacgaggtcgcaccggctcagcatgagttggcaccggttttctcaaccacgaacatagcaacggatcataaccagcttacgatggaaatgatgaaaacagtggcaggacgtcatggaatggcgtgtctgttgcatgagaaaccttttgccggagtcaatggttccggtaagcacaacaactggtctatatcaacggataccggagccaacctgcttgaacccggtgcaactccttcccaaaacgcacagttcttactgtttttaaccgctgtcattaaagcagtagacgattatcaggaattgctccggttatctgttgcaagtgcaggaaacgatcatcgtctgggtgccaatgaagcaccaccagccatcatgtctgtattcttaggagatgaattgtcagatgttgtggattcgatcgaaaagggcgttgattatcacgataaagaaaagacactcatgtccattggagcaacggttctgccgcatattccaaaggatacgaccgatcgaaacagaacttccccatttgccttcacaggaaataagtttgagttccgttctttaggatcaacggcatctatttccggaccgaacgttattttaaataccatcgttgctgagtccttgtcggaatttgccgatgaattggaaaaggcagaagactttgacagtgcactggataaactccttcgcagagaactggtagcccataagagaatcatctttaacggcaacggttatagcgaggaatgggtagaagaggcagaaagaagagggctttcaaacttgaagtcaaccgtagatgcccttccggtatttattcaggataagacgatcgaactctttaccaagaataaggtatataccgagtcagagatccgttcccgttacgagatcttgttggagaactattataagaccatcaatatcgaggcaatgacactgatctccatgaccaagaaagacatcatgggagcagccatagaatatcagtacaccttggccgaggtctttaatgcaaaacaggcaacgggcgtagccgtcacggctaagacagaagaaaaaatgctggcaaaggcagcaagtctgaccgaagccttagcagagcgcttagacaagttggaggcagatgtagacaaggtagacgaatccgcagatgcacttgagattgctaaatactaccgcgaggtcatctttagtgatatgagcagtctgcgcgaggtgatcgacgacttggaagttgtgatcccatccgacatctggccatatccgacctacggagagatgctttacagtatcaaataaagaaaaaaggaaaaagtaaatgcacaaaggcgtgcacgttttcgcaggaaattctcgaaacgtgcacgcttttaaaatgtaattaaaggaggataacgttatgacacaagagattatggatgccatcagttcgcagacctttggagtctggttcttgatcggcgcagcgttagtattttggatgcaggcaggatttgccatggtagagactggttttaccagagcaaaaaatgccggaaatatcattatgaagaacctgatggacttttgtattggtacagtgatgttcatcctgatcggtttttcgcttttactgggtgaagatctggtaggtatcatcggaaagccgggatttgatatcttcaccaactatgcaaattttgactggtcaaactttgtatttaacttagtattctgtgctacgacggcaaccattgtttccggcgccatggcagagagaacaaagttcatttcctactgtgtatattccggtgtgatctcagcgatcatttatccgatcgaagcacactggacatggggcggcggctggttagcccagttgggatttcacgatttcgccggttctaactgtatccatatggtcggtggtatctgtgccctcattggtgcagccatcttaggacctcgaattggaaagtttaccaaggataaggaaggaaagattgttaaagtcaatgctttccctggacacagcattccactgggtgcccttggtgtatttatcctctggctcggctggtatggatttaacggcgcagcagcaacttctgtagaagaactcggctctattttcgtaactacgaccatcgctccggcggtcgcaaccgttgtttgtatgatctttacgtggatcaagtatggtaagccggatgtatctatgtgtctgaacgcttctttggcaggtctggttgccattaccgccgggtgtgatgtaacagatgcttttggctctatcgtgatcggtgctgtttccggtctgctcgtcgtctttggtgtatggctttgtgattatgtactgcatgtagatgatccggttggtgccgttgccgtacattgcttaaacggtatttgggggacgatcgccgttggacttttcgcaaccgataccgcacctgcttttgcaagaggtctgggtgatggcgttacctttggtgcaaaccagatcgccggaaaaggtttattctatggtggtggattcaagcagttgggattacagttgcttggtatgggaaccacagcactctatacagccgttctgatcaccattacattcctgatcattaaggcggtcatgggacttcgtgttacagaggaagaggagatcgtcggcttggatgcaatggaacatggtcttccaagtgcatatgctggattttctattaccgatacttctatggcaatggatgtcaacgagaacacagatcttggtgagggtgagtacgataaggcatctgatctgcaaaaagatactgcagttccggttgttgcagaagcagatgatctggatgcaaacggtgtgccgatcttcaacacaggtatgcataagatcgttgttatcgcaaaactttccaagtttgataccttaaagaaggcaatgaacgatctcggcgtgaccggtatgacggtaacccaggtcatgggctgtggcgtacaaaagggcgccggcgaatattatcgtggtgttgagatggatgcaaccttacttcctaagatcaaggttgagatcattgtcagcaagattccggtaacaacagtgatcgaggcagccaagaaggcactttacaccggacatatcggagatggtaagatcttcgtatataacgttcttaaagttgttaaggttcgtaccggtgaggaagattatgcagcccttcaggatgtagaatagggattagaaaaaataaaaaataaaaaaagatgtgataagacctgcgtcattttactttgacgcaggtttttgttatgatagaacaggtttgcagaaaagaaaggcagtatggcatgaaaataagagaaatcgcagagacaaaaagaaaagcaaaagaatggtttgcatcttatacggcagactatgatatggaagatcccaagatcgcgctcaaagcagtgcatacctatcatgtggcagaactatgtcagacgatcgctgagagtctggcactaaatgaggtcgagtgcatggcagcctggctgagcggacttttgcatgatgtcggcagatttgagcagatccgcagattcaacacgttttcggatgcggattccattgaccatgcgcttttaagtacagagatcttatttgggacaaaggaggatgcttcttgtggcaggatccgtcaggtcatcttagatccgtcgtgggacatttatctttataaggcgatcaaatatcacagtgcctaccgcctgccaccggatttatccgagatggaaaagacctattgccagatccttagggatgcagataagatcgatattttccgggtcaatctggaaacacctatggaggatatttataatacaacgacagagaccttgaagcaggcagaggtgacctcggaggtcttgcaggcatttaaagagcggcatgccgtgcttcgtgccttgaaaaagacgccggtcgacaatgtggtaggacacatcagtttatattatgaactggtctatccaaagagccgccagatcgccttgagccagggctacctgctgcgtttggcagaatttgcatcggaaaatgaaaggacaagaaaagtctttgaagatattcggacacagttacaagaggatatagagaatggaagtaaaaagtaaattaaaaattatattgcggcaaaactgcgccgtcttctggcatccatgaaactgggcgtggcagcctttgtcggagagttcgcatccggggtgacgaccatggtatttaattacctcttgcttgctctggtaggcaatgttgctgtggcggcttacggcgtgatcgcaaatctggccctggtcggggtggcaatctttaacggcatttccggtgacggaaggcatatgcatgatcgcgactttgggcgttttatcacatatgaaaaaacaggctattttataaaaagttaggaagacagatgaaaaagacacagagtcagtattcttttggacttgcatcaaacagaaaaatgtttcgtaagggtatgacggagggaatcccgatcgccatgggctatttggctgtttccttttccttggggatcatggcaaaaagggcaggactgagtccttttgccgcttttttggcaagtttttttaataacgcatcggcgggggagtatgcagcattttcccttatcatggtggaggcatcttatgtagaagtcgccattatgacgtttatcgccaatgccagatatcttttgatgagcatagccctaagccagaagatcaaaccggaggcatcgatcggacatcgctttttggtggcatttgatatcaccgacgaaatctttgccttatcggtttcgcagccgggctatttgaatccaaattatacctatggcatcattacgctggcacttccggcatgggcatttggcaccatgctgggctgtctggcaggcagcatcctgccggcgaggatcgtcagtgccttaagtgttgccctctatggtatgtttttagccatcatcattccgcccgcaaagaaggataaggtggtcttgggactgatcgtcatcagttttgcatcctcttatctggcggggattttgccggggatcgcatcgatctcaagtggaacgaggaccattcttttgacgctggtgatctctgcggtcgctgcgatcgtatttccacacaaggaggaggcagagcatgcgtcataatatctatatttatatactcatcacagcactggtttcctatggcatccgcatgcttcccatggtgctcttgcgcaaggagatcaaaagtccctttatcagatcctttctatattatgtgccttatgtgaccctggcggtcatgacctttccggcaatggtggaagccacacagagtccggtcgcaggtcttctggcactgatctgtgggatcttggtggcatggtttcatgggggcttgtttgaggtggcagtggtctgttgtgccatcacttttgtggcagaattatttttaaaatagtatctttacaaagaaaacatgatgtagtaaagtattactgttaaacgaacaatggcgttcgaagtagggcttgggtctacaggacttttgccctcttcgggcgcttttttacattcaaaaccgtgcgttttactaatgggatggaggttactatggcagacgatacgatggaagaagtaatggaatttgtggaagaaaatgatgtcaaattcattcgactggcgttttgcgatatctttggaaatcagaagaatatttctattatgccggaagaattgcggacagcttttacaacaggcatcaattttgactcctttttgatcttaggatatgatgatcccgtttatcaggatctttatttgaaaccggtacccgataccttaaatgtcctgccgtggcggccgcagcaggggcgggtgatccgtttttattgtgatgtggtcttgccggatggcagtccatatccctatgacagcagaaagttcttaaaagataccctgcaggaatgtgccaatatgggattttcctgtcgtatgggactgcggagtgagttttatctctttaagacagatgatgagggcagaccgaccgatattccttgggatgaaggtggatatctggatattgcgccaaaggatcgtggagaaaacatccggcgagagatctgcctgaccttggaagaaatgggcatccagccggaatcttcccaccatgaatccggtccgggccaaaatgagatcgatttccggtcttcggatgcgcttggaaccgcagacaattatattacctacaaaaatgtggtcagtgccatttctaaccgaaacggggtctttgcttcctttgatccaaagcctctcaagggaaagagcggcaatggtctgcatatgaagatctccacatggaaaaacggcgtcaatatggatgagatcgatccggagtttaccgaacactttatggcaggcgttttccaccgtatgcgtgatattaccttatttttaaatacccagaagcagtcgtatgagcgttttggagagaacgaagcaccaaagtatattacctggtcagcccagaaccggtcacgtcttttgcgtgtgccgatcgtgcagggcaagcgtacctgttttgtactgcgttcgccggattccggaatcaatccttatctggcatttgccatcgtgatccaggcagggcttgccggggtgcgtggcaaagagattctgccatcgccggtggataagagtagccgtctggtaaaggatgaggaaaaagcatcctacgataagctgcctttgtctttgacagaggcggtagaatgtgccaagaagagtgcatttttacagaatagtccatgcaaggacatcgcaaatcgtttcatagaagtgatcgagcaggaggcaatgtaagcaattcatttttatgaagggaggatgcgcggatggacaaagcattgatcgtatgtgatgcgcccaagggcatcgagttctttcgcgattttctgatgcaaaatgattataaagagatcaccgtggtggatagcggcgaggaagccagacgcatgctggtcgacaaagattttgatctgtgtctgatcaatgcacccctgcgtaaggaatccggcgagcagttgtcgatcgacattgcggagaaaaatatctgtcaggtcattttgtttgtcaaagcggaatacagcgaggagatcatggatcgggtggaggattacggtgtgatcaccgtcagcaagccgatcagcaggcagatgttctggagcgccctaaaacttgccagggtcgcacaaagacgtatcacaatggcacaaaaagaaaatgcaaaattacagaaaaaactggatagtttaaagaccgtatcgcgcgcaaaatgtcttttgatctcctattgtgggatgtcagaggaggatgcgcataaatatattgaaagacaggcaatggataagagaatgagccgtttggagatcgcacaggatatcgtgcatacctatggctaaaaaagaggaaggagaattttatgacaaagcatgtatttgtaaccggcggagtagtatcaggactaggaaagggcattacggcagcatcgctgggacgacttttgaaaatgcgtggctacaaggtggcatcacaaaaactggatccttatatgaacgtagatccgggaaccatgagcccataccagcatggcgaggttttcgtgacagatgacggcgcggagacagatctggatctgggacattatgagagatttatcgatgaaaatctgaacaagtattccaacctgaccagtggtaaggtctactggaatgtcttaaaccgtgagagaaagggtgaatacttaggacagaccgtacaggtgatcccacatattaccgaggagatcaagcgctttatctatatgggggcagagagttccgatgcagatgttttgatcacagagatcggcggaacgacgggagatattgaaagccagccgtttttggaggctatccgtcaggtatccctggagcgtggaagggaaaactgctgttttatccatgtgactttagtaccatggctttccggttccaacgaacataagtcaaagccgacccaacattccgtaaaggaattgcagtccttgggaatcgcaccggacatcattgtatgccgtgtagaccgtccgttggagcagagcatcaaggacaagatctccctcttctgtaatgtgccaaaggattgcgtgatcgaaaatgataccatggactgcctttataaggcacctcttatgctgcatgagcatggtctggataccgtggtatgccgccgcttacagatcgaggataagacaccggatctggcaggttgggaaaagatggtcgataccatcgatcatctgaccaagacgaccaagatcgctatcgtaggtaaatatgtagccctgcatgacgcttatctgtctgtgcatgaggcacttttgcatggcggttatgccaatgatgccaaggtggagatcgagtggatcgatagtgagaagatcaccaaggataatgtagaagaaatcttatccggtctggacggtattttggtaccgggcggatttggagatcgtggtgtggaaggcaagatcttagcctgccagtatgccagagagcatgatgtgccatatcttggcatctgtctgggtatgcaggtggcagccattgagtttgccagagatgtgtgcggcttagaggatgctaactccggtgagttcaatccgggtggcgagcatctggtcattgaccttatggaagaacagatggcagttcttagaaagggcggtaccatgcgtttgggctcttatccatgtaagatcaaggctggtacgaccttggaacgtgcttatgccaaggaaaatattgacgagcgccacagacatcgtttcgagttcaacaatgcttatcgtgatctgatgacagaaaagggtctgacgatcagtggtacttcaccggacgatgcgatcgtggaggcagtagaagtatccggcaacaaattccatgtgggtgtacagttccacccggaatttaagagccgtccgaacaagccacatccactctttgcagagtttatcaaggcaagtcttttatagaaacaggtaaaaaaataccgatcccgcgcatgccatcatgcaggggatcggtttttttataccgcaaaagattattattttacctttgtctttggttcgcaggtcagatacatgcccagtttcttgaagatctgttcgtccacttcatccaacataacagaagaatgtacatttaaggtctttaagtttggcaactggtcaaaagcagccttggcattggcatcggtattggaactgatggataaggctaccagcacttcgtcactgtgcaggctggcatcattgctgccgagataattctttttcagacggctgatcggctgtaaggcttccggcgagatcaaaagtttctcatggtcgatccctgccaattcctttaagacatttaagagggcagcagcaggtgcgctgagcagatcagaggtctttccatcgatgatactgccatcatccaactcgatggcaacggcaggctggtgtgtctgattttctacttccatggctgcgacagcaacctttctgtcagcaggagagatctctgcctgcttcatcagaagttcgatcttgtagagtgcgtctttagaaccaagtccctttttgatattgcagatctcagtataataacggcggatgatctcagcctttccggcttcgcggcagacctcatcatcactgatgcagttgccgaccatattcacgcccatgtctgtcggagactggtaagcgcaagtgccgtagatgcgttcaaacatggcctttaataccggatagatctccacatcacggttgtagttgatcgtggtctttccataggattccagatggaaaggatcgatcatgttgacatcgtttaagtcagccgtagcggcttcgtaagcgatattgaccgggtgcttgagtgggagattccataccgggaaagtctcaaacttggcatatccggcagaaacaccgcgtttgtgttcgtgatataactgggaaagacaggttgccattttaccgcttcccggacccggtgccgttacgacaacgagtggacggctggttttgatatagtcgttctttccaaaaccctcatcgctgacgatatgctcgatgttgcttggatagccgtcgatcttgtggaggatataagaaggaactcccagagagtctaagtggtggcggaattcatcagcggctgcttcaccggtgtactgggtgatggcaacactgccgacataaagcccaaaactgcgaaagacatccatcagacgaagtacatcctcgtcgtaggtgatgcccagatcgcccctgatcttattggaggcgatggctccggcggagatagcgatcacgatctctgcctgatcctttaattgtaggagcatacgcagtttggagtcaggcatgaagcccggcagaacgcgggatgcatggtagtcgtcatacaatttgccgccaaattccagatacagtttgtctccgaaatggttgatgcgttctttgatgtgctctgactgcatatgcaggtatttgtcattgtcaaatccgattttcataatgtgttccttcccatataatatttgcttatgtatttgagggacaaaattgtccgaacctgtgattacatacacgctcataagtatagcatggtggcgactttgtgacaaggtactcataaggcaagattataaaaattaaagcagagttatatatttataagaatgactgataaaaaacataaggataaataatgggacatatttttatccccttgtcactttatcttgaaaaagggcggtttttcaagtataatcatctggttgaacaagggcagaacgcatccttacctgcccacgataacgcgtgcaagacacgtagtaataggaggaaaacatgttagaaaaaatgttcaaactcaaagagaacaacactgatgtgaagacagaagtcatcggtggtcttaccacattcatgacaatggcttacatcttggcagtcaatccttcaatcctttctgcatccggcatggacgcaaacgcgattgttatggcaactgcactcgcagcatttatcggaaccctttgcatggcacttttagcaaattatccatttgcacttgctccgggacttggactgaatgcttactttgcatacaccgtatgcggaaccatgggatatgattggaagatcgctcttatggcagtatttgcagaaggtatcatctttatcgtactttctcttaccaatgtgcgtgaggctatctttaatgccatcccaatgcagttgaaaaagggcgtatctgttggtattggactttttgttgcattcatcggtttacagaacggacacattgttgtaaacagtgactctacgctggttaccgttgtaaacttcacagagaatttccacaccgtaggtatcgcagcattgctctgtgtgatcggtctgatcatcattgctgttttacatatcaagaatgttaagggatctttccttattggtatcttcgctacatggatccttggtatcatctgtcagttgacagggatctataccgttgatgttgatgcaggattctattctttgatccctacccagtgggtaagtttcgacttcagttctttgggagagacctttggtcagtgcttccgggcagatatgggcagagtcaatgctttagacttcgttgttatcatctttgcattcctgttcgtagatatgtttgatacgatcggaaccctgatcggtgttgccaacaaggcagatatgttggatgagaacggaaagttagagagaatcaagccagcacttttggcagacgctatcgcaacttctgcaggtgctatccttggtacatctacaacaactactttcgtagagagttcttcaggtgtatctgaaggcgcaagaacaggtcttgcatctgtagttacaggtttcttattcttactggcaatcatctttgctccggtatttacaaccattcctggatttgcaactgcaccggctttgatctttgtaggatttttgatggtatctgctgttgttgatatcgactttaatgatccggcagaatccattccggcatacctttgcatgatcgcaatgccacttctttacagcatttcagaaggtatcgcagtaggtgttatctcttacgttgttatcaacatcgttgttggtaaggctaagaagatccatccacttatgtatatcctggcagtactctttgtactcaagtatatcttcttataagattggtataggtaaatcaataggctcatccttacaaatgtaggggtgagccttttttcattctttcatatgcaaaaatataggttgactaatccttgcatatgacccacaatagataaaagaagaaaaggggtatttatggcaaaagattatattcggtgggacaaattagataacacagcaaatctctttccggtcatagcgggagagagcatgacaaatacataccgtatttcctgtgtgctgaaagaagaggtcgatgaagggctcttgcaggaggcactggatatggtacttccaaagatgccgggctttaacctgcgtctgcgcagtggcattttttggtattattttgaagaaaatggaaagaaggcaccgcgggtacatgaggagcatacctatccctgccgcctgatccatcagtccaagaacaacagttatatgttccgtgtgacttattataagaatcgtatcaacttagaggtctttcatgtactgacggatggcatgggaggcatcaattttttacgggaactgacctatcagtatctgcgtctggcacatcccaagttgcgcgagacccagggagatcagctcagtgcagatacgtctttgaaccgtgaggattctttcctgaaaaactataagaaaaagtctaagagcgtttaccagtccaagagggcatttctgatcaagggagagaaactggcatacgatggttttggtgtgatccatggctatctgccgatcccgcaactgaaaaaagtatgtcatgcttatggtgtcagcatcaacgagtatctggtggcaacttttatctgggcggcatatcaggaaaattatcgccatattacagaggacagaccaattcgtgtggcggttccggtcaatctgcgtccgtattttgattccattacgaccaagaatttctttgtcatggtgtctgcagaatttgcaccgcaaaaaaacgaatatacctttgcggagatccttaccattacgaaagacagtctgcgtgcacagatcaacaaggagcatctggaaaagatcttttcctacaatgtatccaatgagctgatggtcgtagcgcgtgccgtgccgctctttttgaaaaatctggctatgcgcctggtctatacccagtcggcgcttgccaacacgacgacggtgaccaatatcggcaatatcaaggtagaaaaggtatatgaaccctatatccagaccgttcattcttttttatctttttcaaaggggcagagtctcaaggcgactatcacatcctatcaggacaccctggtctatacctatacctcggcatggcaggatacggcgatccagcgcagagttttccgtcagatcgcgcaggatgggatagatgtaaagattgagacaaatggagtatattatgagtaagtgtaaatattgtggagtagagattttagatgatgccgtcaagtgcccgctttgcagtggggtgttggatgggaaaaaggaagaaggacatacctacccggatgtagtatcgggggtgcgcaagacgaccgttttatatcggatctttagttttgcctttattgtgatcgcaagtgtctgcatcgccttaaatgtctggctgacaccgacactgcgttggggagaaatcgtggcttgttccctggcgtacctcttgtggctgggctacattatcttaaaggataatgcaggctatcgtatccgcattctttccggtgttgcgggtgccgtgcttttgatcattctgatcgatacctttttgggattttccggctggtcggtcagttacgtgctgccggcggcgatcattttgctggatctggcattggcgatccttatgctgatcaaccgtaggaattggcagagttatctgatcctacaggtggcgatggtattggtcggtatcgtaccgctggttctgatccgtatcggtatcgtgacccagccgctggtttcggatattgcctttttggttacggttttcatgtttttgggatcaatgatcctgggcggacgtactgccagaatagagatgaaacgcaggtttcatatatagtaaaaaatcaccccatagaagtgctgtgagataaggcactctatggggtatttatttaggaatgtgcttaaggcacattcttttttataaagaaggatacagatgcggcagcggcagatagaccggcatgccattttcgtaggtcaggcttggctgaccgacaatgatagggcggagatattctgccattttttctgtcacattgttgccggaggcgttaatgaaatcacgcggtacggatctgacttcgttggcgatgagagaaatatccgcaatatcgtaggataccctataaggctggttggattcgcggcggataatgctcatataaccgctggctccttttaaggcatgggctacggcggtgcgtcctaattccttggactcctcgatgtctgtcagggaagaaagatgagcggcacatctttgcggcagatttaactcgatcgagcgcactttgatgcccaagcggtgtgcgatcaaagtctctaaggtcttaccggcaccgcttaactggctgtgtccgaaagagtcaagcgtcttggtggaggcgctgatatattttccgtctttgtcgcggatgccttcggatatggcgatcaggacatttggtttcttttgcatgatctctttgacatctcctaaaaatctctcggtatcaaaggctgtttccggcagatagatcaggtccggccccaaaccataatcggttctggctagggtagcggcacctgtgagccagccggcatcacgccccatgatctcgacgatcgttacacttggcagaggatagatcgaagtgtcgtaagcaatctcctgcaaggttgttgcgatatatttagcggcagagccaaaacccggcgtatgatcggtcagacacagatcgttatcaatggtctttggcacgcccataatggtgacggatttttcatgaagttttgcgtaagtggaaagctgcagtacggtgtccatggaatcattgccaccaatataaaagaaaccggtgatatcatttgcctcaaaaaaagcaaagatcttttcgtagagttcgatatcgtctgccatctttggcagtttataacggcaggaaccaaggtacatggcaggcgtcgtagcaagtgcctgtaaaaaagtctcgtcttctaatttatcgtcaaagcagatgatatcattgtttaagatgccaagaatgccatgcagggatccgtaaatatgatcgtaagagccactggtatatgctttttcgatcacgccggaaaggctggcgttgatagctacggtcggaccgccggattgtgcgacaatgcagtttctcataagtaataatcctccgttttttgattatttcatatcaattatttgattaccgcttgtaatcataacgaaaatgaaaaaggaaaacaagatgagacattaatggtacataacatatggtaggatgatcccatcaaatgaagggagacgaaaaagatggaatcaaagaaaaagggattagacagggaaatgatcgtggtgtgtggcttggtggcgcttttggtatcgatcagcattattttttcggttgctttatggatggatctggatctgttaaaatgcaacagtacgattttagtggcagtcttttctgtattgactggtggaatttggggcatactcttatgcagaaattgttgacgtaagtcttatagttttctataatttcatatgtagaatactcatttgagaagacttgttgaggtgaacataatgaatagaaaacataagaatttcataggtatgctagtgggcgtgcttgcccttttatcgaccttgtcttttccgtgttttgcggaggggacaacgacgatccatatgagtgcggacagtctttctgtcggtgataccttatcggttacggttacagcgtcagagtccggcagcatcagtctgcgctacaatgcagatgttttgcagttcgccggaagttctgcttcttatacgacggatggcaacacgatcacgtttgaggggacgagtgcaactttgcaatttacggcagcctctcagggacagtcctctttgatcgtatcatccccgaccatcaccggaagttctgcttccgtacaggttgccggaggcactggggatatgaatacacagcagacccaggatactgcgacacaggcggcagacggacagtttgtcattgatggcgttgcctatgtggtttccgagcgttacccggagagcgcgattccggcaggcttcagccgtaccagagtgactattgatggctatgcctatcgggaattatccaatggatcgatcacccttctttatctaaagagagcagataacacggcaggggatggtgtcttttatcagtatgacgaagccatgaatacggtgacaccttttaccatgcttggtacagcagaacagtatgtggttctggcaacgccggatagtcttttgcgtgattcttttacagagacgacactgaccgttggagatcagaccgtatctgtttacaaagagggggatgacagcgatttctattttgtatatggtaccaatcaggacggcgtgaccggatggttccagtatgataatacggatggcagcctccagagagtgaatgaagacctgttatcacaggatacgacggcagaggagccggtgacgactgctgccggcagtgatgaatattttggaaaatggcagaagcagcgctatctggtagcgatccttttgttcgttattgttgtacttgcggttgtgatcatcaatcttttgttatcccgcaggcgcagggaggaagaagaggattggatggatgaggatgagccgaacgatccggagctggcaggcgcagaagatgaagcgatagaagaagatcttatggatgatcctgcagaggatgaggatgcggatcagggcgcggaaaagacatcgatctttgacaaactgcgcagaaatctgcgtgaggaagaagaggacgagttcgacgatctggaggatgatctttttgaagatgatctgacagatatggaggcagaagaaactcagcctgagatcgagacgacagaggaagcgccggaggtcaaacgcgaaacggctggcaaggcggcttcggaagatgctttacaggcgcagccaaacaagaaaagacagacggcaccgcaggagccaatctacagtgacatcaagggaaccgaggctttccaaagcaaggaaaatacccgctataagggggctgaccttgatgcacagttggatattcttgatttaaatgacttataatatggaggctttataatatgatggagttgacggaacaggcgcaggcagccttggcggatgccaaacgcttagccaaacgtctgagagataattatatagggactgagcatctgctggtcgcattggtcagacaggaagacagtctggctgccaaggttttacagggtcttggcgtgtcagaaaagaatctgatcgacctgatcgaagaactgatctcgccggaaggcggtatcgctgttgcagaatgggacggcaatacaccaaagttagatcagatgctggcacaggcagaacaggaagccattgcatgtggtatggatgagatcggtacagagcatcttttgcttgccatggtgcgtatgcaggatacagcgggcgcacgcatcttggcatccatgtccgtagatacacagaaattattcgcagagttgatctctgctatgggaagagaaggcattacatatagagaaaataatgccaataagagaagaaaacgcggtgccggcgagacatctaccttggatcaatatgccagagatctgacagatatggcacggcagggcaagttggatccggttgtcggcagagagggtgagattcagcgtgtgatccagattttgagccgcaggggcaagaacaacccatgcctgatcggggaaccgggtgttggaaagactgcgatcgtggaaggcttggcacagaggatccagttaggcatggtgccggattctgtggcagataaacgcgtgatgacactggatctgtccggtatggtggcaggttctaagtatcgtggcgagtttgaagaacgtatcaaacgcgtgatcgccgaagtgatgcaggcaggaaatatcatattattcatagatgagatgcatacgatcatcggtgcaggtggtgcagaaggtgcgatcgacgcttccaatatcttaaagccggcaatggcaagaggcgagatccagatcatcggtgcgactacgatcgcagaataccgcaaatatgtagaaaaagatgccgccctagaacgccgattccagccggtcacggtggaagaaccgactgaagaagagacagaggctatcttgcaaggcatcaaggaacgctatgaaaagcaccatggcattacgatttcggacgaagcggtccatgctgcggtgacaatgtcgcagcgttatatcgcagatcgtttcctgccggataaggcgattgatctggtggatgaagcggctgccagattacgtctgatggaagtgaaagcaccggatcagatgctgaccttggaagaagagtgcaaggaggcggctcgcggtgtagaagaatgcctgatggcaggggatgtgcaaggagcatctgattgccgcaaacagcaggcggctctggaaaagaaaataaagtctttgcgaaagagatacgaacacagaaaagacaaacagcagttagttctgacagaggatgatgttgcacaggtggtttctatctggaccaagatcccggtatccagattaaatgaaaaagaagctgttcgcctgcgcaatttggaaaagaccctgcataagagagtggtaggacaggacgaagcggtcagtgctgtagcgcgtgcggtcagacgaggacgtgtaggtctcaaggagccaaaccgcccgatcggttccttcctgttcttaggaccgacaggtgttgggaagacagagatctccaaggctttggcagaggctgtctttggagacgaaaaagcaatgatccgcgttgatatgacggagtatatggaaaagcacagcgtatccaagatgatcggttcaccgccaggatatgtaggacacgaagaaggcggacagttgagtgaaaaagtgcgccgtaatccgtattcggtcgttctttttgatgagattgaaaaagcacatcaggatgtatttaacattttacttcaagtcttggatgacggacatattacggattctcagggacgcaaggttagtttcaaaaatacgatcatcattatgacctccaatgccggagcgcaggcaatcgttgagccgaagaaactgggctttgcatcggtcgaagatgagaagaatagttatgaatttatgaaaaacggcgttatggaagaggtaaaacgcatctttaagccggagttcttaaatcgaattgacgagacgatcgtattccgttccctgaataaggaggatatgaaggagatcgtgacgatcatgacccgttctttgatcgagcgctgcaagacgcagttggatatcgatctgaccatccgggatgcggtcaagaagcatctggtagaggtttcctatgatccgaaatacggagcaagaccattgcgccggcgcatccagacagatctggaagatcctttggcagaacttattctttccggggatgtaaagaagggcagtaaggtcgttgtcacgatgagaaaaggcaagatcgtctttacttcataattctaaaatttttatgaatatccttggatttactagatattttatatcttgtattatataatgttcatacattgtaagacagagaaaaggcattgccttaaagaagcaggaggagaagaaaatggctgtagttagcgaattaattcgttgtgagtcagatggtactattagttttggagattacagtttggagaccaagtccaaactggacaatgtgagtcatcagggagacttatacaaggtaaagactttcaaggagatcaccaaactggagcgaaatggtatgtttgtatatgaatccgttccggggacttccgtagagcattttcaggctaccgaagatggcgtgacatttacggtagagggatcggaagacgcgcagatcactttggaacttgaaccggaaaccgaatatgatgtcaaggttgccggggctgatgccggtacaatgaagacgaatttaggcggtaagttgaatttgagcgtggaattggatgccgaaagtgcgatctctgtagatgtaaaaaagtgctaaaagcatacaagatataataaaaaggagatccccgtcatagattgacgaggatctttcttatgtaatagaaaattcactccgattacatgaatacttaatatatagaagaaaccgtgaggaaatcgaatggcaaagggaaagaataacgtatttttctgtcaggaatgtggttatgaatcgtccaaatgggtcggacaatgcccggcgtgcaaggcatggaacaccatggtagaagaaatcgttgataaaaaatccagtgtgacacatagacagatcacagaagtacaggtggcaaaattaaatgatgtccagtcgtcatcggaaaagaggatggatactcatatcgaagagttgaaccgtgtactgggcggtggcattgtgccgggctctttagtattggtaggcggagatccgggcattggtaagtcgacactcttattgcagacctgtaagagtctgtcagaccagaaaatcgcggtcttgtatatttcgggagaggaatcactgcaacagattaagatgcgtgcagaccggatcggtatcttttctgatgaaatgacacttttgtgcgagaccaatctggatctgatacagggcgtgatcgaagagcgcaagccacaggtggttgtcatcgactccatccagaccatgttccgtgaaaatgtcaattcggcaccggggagtgtttcgcaggtacgagaagccaccagcgtgctgatgcgcctagcgaaagaacaggggatcgctatctttgtcgtgggacatgtgacaaaagaggggacggtggcaggcccgcgtgtactggagcatatggtagatacggttctttattttgaaggggatcgctatgccagttatcgtatcctgcgtgctgttaaaaaccgatttggttctacgaacgagatcggtgtctttgaaatgtgccagtcaggattgcgggaagttcccaatccgtcagaatatatgttggatggcaaacccaagaatgccagtggttcgatcgttgtatgtaccatggaaggtacaagacctttgctggtggagatacaggcgctggtatgccacagtgcgtttggtatgccaagacgaacggcggcgggcgtggattacaaccgcgtcaaccttttgatggcagtattggaaaaaaacgtgggagtcagactggcagaccaggatgcttatatcaatattgcaggaggcatgaaggtcagtgaaccggcaacggatcttggactggtcctggcgatcatatcaagttttcgcaatcgtccgatcgcagaagatatgatctgttttggcgaagtaggcttgagtggcgaagtgagatctgtaaatatggtagaacaaagaatagcagaagcgcacaaactgggatttaagcaatgtatcctgcctaaagtgtgtatgaaaaatatacaaaagccggatggaatgttactaaaaggggttgagaatgtgcgcgaggcattggaaatcctgtaaaaaatgagtttgtgcaaattgtcagataaaatagcacaattactgcaatcgtgccactttaacaatattcgacatttctattgacttctataggagtgaag

SEQ ID NO: 12618 - DNA, 1054 bp, Unknown
  gut microbiota DNA sequence
cggttacagacacccgacattcttcttcgtcaaaataacacaaaaaaaggcatcccctgtcggagatgacataaccttgtgattttgcgtcatattcttttaaggaatcggtatcataacggtcagaacaaactgctcgtccgtctgtatccgcatcacaccggcgtatttctttgctaccatctgtatagatttcagaccgtagccatgataaccgtcttttttctttgttgtctgtggaagatctccatcaaagaccagattgccccgaaaactattatccacacggatcaaaagcataccattcttttcctgtaccttgagactgataatgcgctcctctgggtcttctatgatttcaaccgcccgaatggcattttccaaggcattgccaaacaaagaacagatgtcactgaccgacataaaatccaacttgctcccatcaacgatacaagacaatcggatgccatatttctcacaatagaggctccgctccgtcaataggatatccagagtttcattgcccgtctgcacggaagaatcataaatgttgagcagttcgcgcattttatccaattcctgcgaatccatgcctttgccccgtttttccagcagatcgatctggtgacgcatatcgtgacatttgacattgatcagttccacggtctcttttttctgctcatactgcttgcgttcctccacgcgcaactgctgcaaaagcgccttttcctgttccgctgcattgagttccagaatactggacttcatgatcaaaagaagcaggcagcacatgatggataaaagccggcttgcgatcatcagcgaaagactttcccctgcatggctgtcgcggtaactgctcaaaaatacaacaacaatcagggatatcaaagaaatgcctgccattttctgtctggttcttctggtataagtccgcatatcctttttcggatgaaagggaatatataagatcagatacccggcaaagatcaggggcagggttccaaaaaaggcagttgccatagtcagcatcgaccgcgtactttccctctct

SEQ ID NO: 12619 - DNA, 8127 bp, Unknown
  gut microbiota DNA sequence
caggcttcttccttccccttttttcagtgttactactgcttctgccatacttttctcctatctctttttcctgttctttcttctggcgcatccgaacgaccacttcatatacttccggtcgtctttctttcagatgatcgtccagcaaatgtctgcgctccttaaaacgttccgccagttccggatgctctagggcaatgcggtcatgcacttcctgtctgtgagtttccagacgggctgctaaagtttcctcatctttaccggaaatattaacgatctcctttagatgttcctccagatgttccaaccactcatcctcatccaaggcttccatatgactccacctgccatgcaaaagttcctcgacatcgcctgtctgcttcaactgttcaatctgtagagcaatctgtttttcgatctgttcttcgctctccttgccaaacgcccagacaaattcctgcacacggttgtctgcccgcttgcgcgaagcactgcgctcctcattatccacgccgccttccaagggataaggacgttgatagcccatatcctttagggcaatatggatggtgcgccggacggctccttcctcgatcatgtagcccagtcccaatttgcgcaactggtcattgacaccggcaatgtgctctgtcatgtaaaaacggatattttcttcctttaatttatggtacaaaattcccagtcggtctgccgcggtaatatcaaggctgccgacaccgctggcatccaagatcactgcccttgtctccggcgtgatatggtctgtaatgtcctgctccaagaccgcgatattggcaaaaaagagattactgctaaagcggtagatcaagacaccggaaacagcatggatctggtcgctctccgtcagatcccggaaatgtttgtgccccggctgaatacccagaaagcaccttgccggtttggaggtacggatgatcatttcagaaaaagaaaggatcataccgatcaaaacgccgttgatcgtacccagcagcaaaacgccgacaaaagcaccgacaaaaataaagaactccgtccgactgacctcccacagtcttgccgccagatcaaactccgtcgcgccaagcagggcagagatcacgattgccgtcaagataggcaccggcaaataaccgataaaaccggttccgcacagcagaagaacgatcatggatagccctgcgacaatccctgtcaactgggtcttagcctgatattgttctcccatggcagttctggaaaccgatccgttcatcggacaacagccggtcagagccgccacaaaattacccatagaaaaggcaaagatctcccggttgtcatcaatccggtaaccgttctttccggcaaaagaattttctgccaaaagggtctctgccatgataacgacagcaaccgataaactgatggtcatggcatccacaaaaggcactgcggaaagatccggcaggctccattctggcatacccggctctaccgctgataaagtggcgatcccccaggtctgcaaaggcagatacttagacagcaaaacgccaagcgccatcaagaccactgccataggaaactttggcatgatcttcttggataacaaaaggatacacagtgccagaagtcccaagagcagagacggcacattcaatcccggcaggctttcccataaatgcaagagcaattccggcaactcacctgtccctgcacttcctcccaagagtttcggtgcctgcatcagaatgatcgtggtacagatacccgtgataaaaccacccatgaccggtgctgagatgtaattgaccaatttgccggctccaagcagagagaatactaagagccataccgctacccagaaggtaagtaccggaacgacagacatcgcctctgccgatccactttctatccccataccaagcaacgccgatccgaccaatgccgccggagccgcatccacgccaaaaatgaactggggcgatgtggaaaagagggcaaacagaagcatagggaataccgatccatacaagccgtaaactgcgggcaagcccgcaatctgcgcatatcccatggatatcgggatagaaactgccataatgatcagccccgcaaacatatccttgggcaagtttttcttgtcataatctctcagtgtctgtgccaactgtatcttcatccgccatatcacctctcactttatgtcctatcttctccccgtccaaagatcacggttctgtgttgcttccgatttcctcctcgatctcatggatccgcggcaggttccaccgataataggatgccagaagccggatcgcaatcactaagatcgcacagagaatagtcgcccatgctacgcccaccagatcatccatgaccacataggcgatcgcgcctacggcagatgccatggcatagacatgctttttaaaaatataaggaatggaaccgctcagcacatctcgcagggcacctccaccgacaccggtgatcacaccgacaacgatcaggataaaagcatgtgcatcttccagatgactctgcgccacattgataccaatgaccgtaaaaataccaagccctatcgcatcggaaatattgagcatatttgccgtgatagggctctggctctgatccagatgcttctttcgtgccgcccagataaagacaatgcaggcaacaaccgtcgccacaccgatatccagtggatcttgcaaagcgattggtggcagaatgccaagcaaaacatccctagtcatgcccccgcctacagtcgttacaatgctaaggacacagacgccaaaaatatccatccgcttctcgatcgcggtcattgccccggacacggcaaatgccacatccccgatcaggttcatgatctcaatcaaaagatctatattcatatcgtcattctccctgttcttttatcctaatataaatccgccgattagatttaccgcataggcaacgagccaggcaatcacgcattgccagataacaacgccccacgcccacttgcgtcctaattcccgacgaatagatgcaattgcagcaacacacggtgtgtataataaactaaatacaagcaggcacatagctgcaagtggtgtcataaactgctgcatcgcaccgccaaaaagcacttccagtgtagataccacgctttcttttgccataaatccgctgatcagggaaacacagatcctccaatctcccagaccaagtggtttaaagattggcactaacacgcttgcgatcatggcaagtatactgtcctttgaatcttgtacaaggctaaagtgcgggctaaaactgcgaaggaaccatatacagatggttgccatgaagattacagtaaaagccttctggataaaatccttggctttttcccataagagctgcaacacattttttgctcccggaagacgataattcggcagttccatgacaaatggcactgcctctcctttaaacagcgtcttgcggtaaacaagtgccacaagaatgcccacagcaattccaagtatatataatcccatcatgatcaaggctccatgtcccgggaaaaaggcactgatcaggaaagaataaatcggcagttttgcagagcaactcataaatggtgtcaacaaaatggtcatcttacgatccctctcactcggaagtgttcttgttgacataagtgccggaaccgtacatccaaatccgagcagcattgggacgatacttctgcctgacagaccgattttccgaagcagtttatccatgacaaaggcaactctggcaatgtagccactgtcctccatcaaagaaaggaagaagaagagggttacaatgatcggcaggaaactcaagacacttcccacgccggtaaaaatgccatcgatgaccagccctcgcaatacttcattaacatccgccgcgatcatcagttgttctgtcgcatcggataattgtgatatgccaagttccagcaaattttgcagccatgcaccgatcacattaaaagtcagataaaataccagaagcataatgccaaagaagcaaggaattgccgtgtattttccggtcagtatgcggtcaatcttctggcttcggatacgctctttgctttcttttggcttaactaccgtctgctcgcataccttttcgataaaggtaaatcgcatatcggcaatagcagcgctccggtcgataccacgctctttttccatctgaaggatcaagtgctcaatcgcttctttttcattgtcatccaatttcaggcgttccatgatcagagcatcgccctcgataatctttgctgctgcaaaacgcaccgggatctctgccgctttcgcatgatcatcgatcaaatgacagatggcatgaatgcagcgatgtacagacccaccaaaatcattttcatcacaaaaatcctgtcttcccggcttctcctgatatttcgcgatgtgcatggcatggcgcaccagttcatccaccccctcattttttgctgccgagattggaaccactggaactccaagcatttcttccatgtgatttacatcaatagaaccgccatttcccgtcatctcgtccatcatgttaagcgccacaacagtcggtatgtccatctccagcaactgcatcgtaagataaagatttctctcgatatttgtcgcgtccacaatattgatgattgcctttggatgttcctctaatacaaagttacgcgaaacgatttcctcactgctataaggagacatagaataaattcccggcagatctgttactttcgtatgcgcctgtcctcgaatcggaccatctttacgatctacggttacccccggaaaatttccgatatgctggttggaacctgtcaactgattgaacagtgtcgtcttgccacaattctggtttcccaccaaagcaaaggtcaggtcttcgctatccggtaatggatccccatcgcccttgctatgatacttgccttcctcaccaagacccggatgaacagatttattgatatcacttgttccttcgtggctgcgtgctcttgcagcaatcagttccacatcaatctgcgctgcgtcatccaaacgcaaggtcaattcgtagccatgcacctgaaattccataggatctcccatcggtgcatatttgatcaaagtaatctctgctcccgggatgactcccatatccaaaaaatgttgccgcagagcaccctctccgcccacacgcgtaatgattgcactctgtcctatctctagttcttttaatgtcatcatttcatcctcttcgtctaaaaaggcaccctcatttcgaggatgcccttttcttgcaacgaaacctcgtcgccttatactatcacatttttctgtaaaattaaatgttcaaaagatcactaaattcttttaatgcgccgtctgtctcatgagccagaacacgttttgccagaactttgccaagttgtactccttcctggtcgaaactgttgacattccaaaggaatccctggaacatgatcttgttttcaaagtgtgcaagcaaagcgccaagtgcctgtgggttcaactgatctccaatgatgatgctggatggacgaccgccctcaaaattcttgttacggttgtcatctgctttaccacatgcaaatgcaacaatctgtgctgcgacattggcacaaagtttctgctggcttgtgctgtcctgaatcacaacatctgtaccgatctggctattcttaaagccgatgaactgcaatggcacgatatcggttccctgatggagcaactgatagaaagaatgctggccattggttcccggttcaccaaagagtaccggtccggtcacataatctaccggctctccaaaacgattgactgacttaccgttggactccatatctgcctgctgcaagtgtgcaggaaaacggctgagcgcctgtgaatacggaaggactgcggttgcaggatagcccaagatatttctctcataaaccccgatcaaggcatctaacatagcagggttttctctgacattagcattggctgaaagtttgtcctctgctgctgcaccgtctaagaatgctgcaaaaacttccggtccgaatgccagtgaaagtacggctccgcctacggcagaggtagaagaataacgtccaccgatgtaatcgtccataaagaaggctgccagataatcatcactcttggcaagcggtgatgtctcactggtaacggcgatcatatgacgggatgcgtcgagtcctgcctttgccaatgcatccttgacgaatgactcatttgtcagtgtctctaaagtcgtgcctgattttgacacgagaacaaaaatcgaatgtgctacatcaacagatgccagtacggctgctgcatcatccgggtctacattgctgatgaacttggcttccatcttgaaggttttgttcttctttgcccagttctccagtgccagatacatagcacgcgggcccaagtcactaccaccgataccgatctggactactgtcgtaaatttctcgcctgcggcattggtgatctcgccactgtgtaccttgttggcaaaatcagcgatacgctgctgctgctctacataaaaggctctcttgtccacgccgtctgcggtaacagtatctcccaactgacctctggtcaaatgatgcagaaccagacggttctccccggtattgatcacggcaccattgtataattctgcaaatttgtcagaaagttctgcctctgctgccagtttttccagtgcgtcgatcacctgatcgtcaacctgttttgctgcgtagttatatgtaagaccttctgccatcggaacgctgtatttctttacacgatctgctccgttctgtccggacatagcctctactaaatttactttttgaacctttgccaactcaccaaaagaagcaagggtatctaagtttttccactgtgtcataaaatttcctcctcactcatgcatctactctaacaatcgaaaaaattatactattaaatgtctctcagttcaaggcacagacccaacgataaaatggaatttttttcgtatattttcgatagtttcctttgattccccaagtttctgtgctatgattgtggtatctatggaaggaggtttcttatgtacgaatttacagaagattgcatgatacatatagaagaaattgataacgaacaccgcagattgttccaaatgatcaacgaggcgatcgatctcgcagcgcacaccgaggatgtcacaaccatcgccgacagccttctgcctcgtttaaaggaatacgctgccacacattttgcccatgaggaagcctacatggagagcatcaacgacccggaactgcccttacagcgcaaggaacatacggcttttacagaaaagatgaatacctttgtactggatacatcctcaccggaagccgcccgcacatccttaaatgatctgctgacctatctggtacgctggctctatcatcatatcttaagcagtgatatcatgatcggcaaaatgtgtcaaaaaccggagccgaccgaagatccttttgcctttacagacaagtacaagaccggtatcgaactggtagacaacgaacacaagcagttgtttgccatcatccgtgaagtcaacgatctgatccacgaagaattgcttcatgacaagtacgatgagatcatgcgcctgcttgccgaattaaggcaatacaccgagtttcatttcagtgatgaggaagccctgatggagcagatctcctatccggggtttgaggcacaaaagcgcgcccattctgcttttgtagagcgtctggtagagatcgatctgtccgaactggatgccatggacgacaaccagcaggaatatctgatcaatctgatcgattttcttctggcatggttatccaatcacatccttggttccgacaaaaagatcggtgactatataagaacacagcacttatctgcaacggacatttaattgcagataggatctttcaaatataaaacagaccgtctggcgtcttttaggacaccgggcggtttgttttcttgcctaaagcggtaatcttcgctgcctgcgctgttttttgcacctccctaccctatatatgcttatcac

SEQ ID NO: 12620 - DNA, 820 bp, Unknown
  gut microbiota DNA sequence
aatccagcatttcggatcttaggattccatccttgatcctgtcactgaccagaaaataatcaattctccatccggagttgttgatcttgctggtcttgaccctctgcgcccaccaggaatagaccttttccacattgccatgcagataacggaaagaatcaacaaaacctttggcaagcagatgggaaaagccttctcgctcctcatctgtaaagcccgcagacatatgattgccgtccgggttcgccaagtcgatctcctcatgtgccacgttaaaatcaccacaggcaatgaccggtttcttttgatccagcccactcagataatctgcataacaggcatcccatttttgcctgtctgcaaggcgtttcaagccgtctcccgcattcggtgtataaacatttacaaagtaaaaatcctcaaattccagacaaaggattcttccctccgcatccatggtatccggtgcgccgatcgccggtgcactcatctgtgcctgcagggactttttgtataaaaccatggtacccgcgtagccctttctggctggcggtacggaactgacccactccacctgatagtccgggaaatagaaagccaatgcttccttatgcttgtccgtcatcccggtcgcaggcagttttgtctcctgtatggcaataatgtctgcattttccccttttatggtgtctaatacggctctggaaagttctgctcttgccgatgttgatgtcagtgccgcgtttaaagaatcaatattccatgaaataaactttatcatgccatcttcctctcgtcctcaatcttttatgactactct

SEQ ID NO: 12621 - DNA, 4984 bp, Unknown
  gut microbiota DNA sequence
gaggatatctacaatggacttaaaagaattacaaaaagacccaaaaatgatggagattatgaaagagattggcagcatcatgcaaatgcgttccaagcaggagcaggcggaaaaagtcaaaaatttccgcatcctaaacgagaatgccgtcaaaggacagatcctttttaccggttcttctctgatggaacaatttcccatcacagagattgcccggaatcatggcattgacaagatcatctataaccgcggtatcggcggctataccacagatgatttcatcgctgaaattgacaccgtactttttgacctcgccccatcaaaactttttatcaacatcgggacaaacgacatgcgtcctcgcgaagacggtcaggactgggctgttcatcttcttagcaattatgaacacatcttgcagcagataaaagaaaggcttcccgaatgtcaggtctacatgatggcttactatccgaccaatccaacggttgctgataacgaggtcgtccgacacctcttagccacacgcacccgggaaaaccttgacatgatcaatgaaaaaatggctacccttgccgccaaatacgactatcattttatcaatgccaacgatgggctttgtgatgccgagggctatctgaaaaaggattttacaaaagaaggactccatatgtttgccaacgcatatgaagtcgtattcaacaatatcaaaccatatatttaatcgtaatgctcatctaacaactgacaatccataatgagtacataaaagacattgccgtaatagttgctttccacgatacgcccatgatccaataccgggtgtgtactgccatctttcttgacaaaatggaattgcacaaaatcattcgttccggcggcttgggaccgaatctgctgccagatgcttttctcaacagcctcctgctcgtcggagcgaaccagattgcggaaactatgctttgaatactgcatgaattcatccagattcttacagcctgcataagtaaccagttcctgattggcaaatagaatctggtcattttccggatctgccttgtagatcaaaaatgctccaggcaagtgctgggtaatgtcactaagggcaaatcccagacggtttctccggtttggatcaaaatctttctgataccgcatactcttggcttttccacgaagttttccctcataaagcgccatatccgcaagtcccagcagccggtcagcctcctctgtatccgccggatactccgcatagcctacagaaatatgaaagtagtattccataccctcatacataaaagatcggtcgctggcggtaaaggcttctatctgctctttgacatcatcacaggtcgccccggtcaaaatcagcgtaaactcgtcaccaccatttctgccgtaaatggcattggcaggaaaagcagtccgcatgctctgcgccagattctgtaatgcctgatctcctaccacatgaccataaatatcgttaatcatcttgaaatcatcgatatctaactgtataccaacgcatgactggtttggatttttcctgcgatattcccaaaaacacttttcaaaaccattgcggttataaagacctgtcaaggcatgtgtcgtagataattcttccaattgctgtctatcttcttccatgattaatacggatccagtcaagccagacaaaaggataatgatcagtataccgacaataagaatctgtcctacattgtctcctcgattccagccttcttttggcatcacttctaatttaaaagagcatccgcaaagttcaaattcataggaagccggatctgtcatgtcctctgcggaggcagaaatctcctgatattgggatgtaagcggtgattctgtcttagacaggcggtaatcatatccaaagttggtaagtgcctgtacggaattagcaaaaatatccggcacgcggatgatggctatggtaaagccccagaaatactcctgccctgcatcatttttcaggtaaaccggattacggatcgcaatgcccatgccaccctgtttgagtgaaaaaggtccttgtatgatggtcaggtcatgatcccggctatagcgagaaatctctcctctttgctcatcatggatcagatcgatcttgccggcctcattgcccgctgcaggataaatatctgttacgacaccatccggcgcgatctggatactttgaatcgtatcatcgatcaagtctgcagcaatctcatcaaagttggcaatccgtccattgtcactgacaataatcgcctgtatggattctgtgatgccgattccatggttgaggtcgctggccatgcgctctgcataattcatagcattcagttcggtgaccgtccgtacctgtttatgatttttctctatactaaagtgtattactcctgccagaacaacgagccccaaagccgtcacgcaaaccggcaatatccatttcctttttccaatcttccttctcatagcatttttgctcctttaacgcaatgtactgaaaagccttatatttttatgttatttcgtatagaccagatctttgacgacttctcctgccacaataagaccggcaaccgatggcacaaatgccacactgcccggaatatcacgacgctctgtacatttatgggctgctcccggcggacagatacaatgcgtctggcaactgatcgccatgtcctcgagcggtctcgttggtttttcctccgaataaacgacttttaatttcttgacgccccgcttcttcaactcacgacgcatgacctttgccagcggacacatcttggtcttatagatgtctgccacctgaaaagcactggcctccagtttattgccagcccccatgctgctgatgatcggcactcccatagactgacatttcatgaccagttcaatctttgccgtcaccgtgtctacggcatccactacataatcatattctgcaaaaggaaagtcatctgcattttccggcaaaaagaagcacttgtaagtctccacttgtacatctgggttgatgtccagcatacgctctttcatcacgtcgaccttgtatttgccgactgtagaacgcgttgcgatgatctgacggttgagattggtcagacagaccttatcatcgtcgatcagatcaaaactccctacaccgcttcgtaccaaggcttcgcacacatatccacctacgccgcccacgccaaagacagccactctggcatttttcaggcgttccataccttccttgcctaacaataactccgttcttgaaaactgtgtcaacatatgatcttcctcatttcctaccatttttcttggaggttattgtagcatggaagccgcagatgcacaagccacaagggacgttccttttgccatatggactgtcccctttggcttgggtgcctgcttatcccatctgcaccagccccactctaatgttgctccaagcaaaaagagacgcccctactgcataggagcgtccctgtatctgtcttagttcaagtccagatatttttcaatttcctgttcaaagaatggtgtccaccagtccagatagccggcacggtttggatgaatgccatttgccatataataatgatattccggtatgtctgcatccagatcatcccacatatcaatgatgccaatgccccatttttcctgcagtttcttggtcaattccaccatttcaccatactgctcactgtcatactttgtgccggtatagaacatgaccggacaaccgtaatgctggtctgcgtatgcgatgatatattccatggctccggcaaccgttgtcgtatcaaaatcatccatgttcttagagtctgagatctcgcccattggctgtcctgtcgttgcatcgttggtagacaattgacagataaagagatccgccttctgatccggaatatttgccttcatgcgggcaatataagaagtctctccattgtctacaagcgtggttccactaaccgcttctttgacatatgcaataccatctctggcagccaaatattccacaaaggaagcctcattactgttgcttccaaaagtaaccgaagaacctaagaagatgatctttttcccctttaacggagaatctgcaagtgcttccacatttgccggatcatactgcggcaattcattgatcttatctgatgccacttctccatatttttcaatcaattccgtctgcagtgccggaccataccagttcatgtaaccggcatcactaagcgttccgtctttctgcttgtatgtactgatgttcttatccttataattcagtttttcccatagatccatgacatatgcatgatccatgccatatttgactggccagacagcctgacgcatatcatagatggcatcctttttcccctcctgaatacccgtaacaaaaactgccggcgctttccaggtctcccagcaataagatacgatatactgatatgcacctgtcagcgtttccagatcataagtatctcgatcctcactctctgataattctcctacttctgcttttttgtctgtctctgtcggtggaatttctactaagatcatatcccatgtcgcatccttatccatggcatccaactgtgccttgtaggattgttccccgtctccggtcaaggtcgcatcctttgttgcaaacacatccacggtcattccatttttcttctccaggtagtcggtgtaggatgtcttgccatttccaactgtaagtgtagagccaaccactgcaatgtgacttccactgagcagtgtctcctcctcgctgacctcatctgctgtcactgttttcgtattctctttttttgtgtcagcatctgctttcttgctgctgccacacgctgtccctatgcatccgagactaagcgtcagtgccagaaacattgccattttctttttcatgtaaaatacctcccaatcttcatgatgcattcagtataattcttttatatat

SEQ ID NO: 12622 - DNA, 8463 bp, Unknown
  gut microbiota DNA sequence
ccagaatatggctgcttcgaatgataccatttactattgtatctgttttctcaatgtatctgatgccaatgaacatgggaaaagcagctcaggcagtatatatgtttattacatataatctggcatcaactgtctgctatacgatggtgtatgtggcttatatgacgcttaacggtctgatcacaacagatcagaagacgagaggtatgaatgcaggattgcagatgatgggagccgtactcctatctgttcttggtaatgcgacgattattacccttttacataagtttagcggggacgttcagcattctgcctacggtgatcgtcgcggatggctcatggttgttctgatctatatgattatttatgttattagcgaactgatcctgatctacggcaccagagaacgtgtgaaggaaaataccggggtaatggaaacacaggaagagatgacagaggatgagaaaaagaaggcgcatgaaaaatccttaaatgttccattccttctgacgatgaaagccctttttaccaacaagtactggattatcaatctggtgtgtggactcgtaatcagctttttgatgggtctggaatctacggttgcatctttgatttgtacctatgtgttaaaggatgtggccttctatcaggtgtctgcttctgttaatgctgttgccatgttgctttccatgctgcttggctttgttctgcttcgtaaaatgggcaagagaaacgcagttttactggggctcgttatccgcgttggtggaggactggttatggcagttaatatcagcaagatgacaattctgcttggcggcgtcatggcaggtattggttatggtattgccggttgtgcatttgcatctgtcattcaggatacgttgacatatggcgagtggaaaaatggttttagtatgattggtatgggaaatgcagccaattcgttctgcaacaaagtgggaaatagtctgggtacgattgtcatgggcgctattatgtcagctactggatatgtggctggacttgccgtgcagcctgccagtgctatcatgggatttaaggcgatttatatttatattccgattatcttggaattcgtagctattattgcagttacccgatatgatttggacaaattctatgatgatattcaaaaggatctggaagaaggaaagtatgcaccgggtgtgacatcatattttgaaaagaaagcacagggagaagatgaataatcatgctggaaaaagataaaatccaattttttgacacatcaacattgaaaaacacagaaggcatagaaaagagggcagaggtatcctacatcagaaaggaattagaatgtagatttccagacgaagtttttaaccggattcaggtgtcttttaatgataccggcagatatcaggcaaaggtaagcctgattgagaagttttttggtggaggtaagccaattgagaatctgccgccttattacgaggtggaactctttcataagacgggtgattatgaagaacagcttatcgtctggagccctttggcctggaatgaccgctttgctggtaccgccggtggtggaaccggtataggtggcagggggtacctgaccagacccaataatacccagagaggctggaccgtaccatttgctgtcatgaatggattttcagctgccaccatgtatgcaggaaatatcgaaggctggaatgaccacacgattgattctaagacaggtgaattgcaacaggatttatatgaaaactggcgtttgcgcagtacacataacatgacaatgtttggaaaagccgtgacagagattttacacgaccgtcctatacgctattcttatatgaatggtggttctggcggtggcagacagtgtctgatggaggtgcagaattatccggaggattatgatggcgtgtgggcatcctgtccggcaattaactggcataagtttctgatgggtggttattggccggaagttgtgatgcaggaacagaaccattttctgaatgcaaaaaagaatcagttctttttggaggcggtctggaatgaaaatggtggacgggacaagtattttcatctggatacatgcaaggaatttgatccatacaggtatgtgggaacgaagacaaaaggtggtatcattacggacaaggatgccgcggttatgaaagacattctggatggaccgcgaagggcaaatggagaacagatgtggtatggattccgcccgggtgtacagaactggcaatgtgtaattccaataggcacctattactatccactttttggacatcggattaagccgtttgcattaggaccgatttatatacgatggattacaaatcatccgaaagacaattttaaacaaatgacaagacaacaatatgaaactttatatgatacaggattggaaaagttttctgacaatctgggcgataatccggctattgatgcatttgttgaacgtggaggaaaactgatgatagatcatggtatagatgatcctctgattccggtagatggcacattagattatctgcagaaagttaaggagcattttggtggttggaaagctttggacaagttcctgcgtgtttacatcacgccgggggataatcatgggaactgtcaggggaatggtcctggtctgacagagtcggatggtatgcgtgctttgatggcatgggtagaagatgggtgtgtacccgaagaaatgcgaaaggttcgcgtagacaggaaaacaggtgagactttggaagaagggatggaagctccttttcgtttggaggatgaataaatgggagaatttataccgggtggtgtgtggctcgataccaatggcaaacgtatccaggcacatggaggttctgtgatttgcctgaaacatgtttattattggtacggggagaacaaggaaaaaacggacggaaaaaatggtatctggcattggggggtaaggtgttataaatcctctgacttatataattgggaggactgtggcatcattattccgccagatacggaaaatccggagtctcccctatatcctgaaaattgcatggacagaccgcatatcatttacaatcaaaaaagaaaaaaatttatctgttggctcaaaatcatggaaaaggatggaagtcagagtgaaacaatcttggaagcagacgatatattaggtccttatcagattattcatacgggattacgtcctttgggaatgagtgcgggcgactttgatctggctgtggcagaggatggaaaggcatactattattttgaaagggttcatagtgaactgatctgcgcagatttaacagaggattatacgaatgtgacggggtattacagtacccattttccgagactatatccgccttttgtaagagaggcaccagcgcactttatgcgaaatggaaagcattacctgattacttcgggaacgacgggctattatccgaatccatccgaggtggcagtggcagatacctggcatggtccatatagagaactgggacttattcacagacaggatgagagtaagacttcttttcattcccaaatttcatccgtattcaaggtggaaggaaaaaaggatttgtatattgcgtgtgctgatcgctggctgccggaacatatggatcggaaatatgaaaactacagtcggatttttgaacttttgttttcggggcgtagggatgaaatcagtccagatatgatgggagaggcagtgatagagaatacagcaatcgcagattatgtctggcttcccatttttttcgatggagacagaccgtacataaaatggatggatacgtggtcattggatgattttgcatagtgtgggaggtacaactatgaacagactacaagagacaagggcaaataggatttttgtaggcatattgtgtttatatagcgccggaggattatttaccgcaattgtacgtgccataaaaggtgaaacaatttttggaatattcagtatatgcagcgtcgttgctttattgttggttattgtgacagcaaatctggaaaaaggaaaaaagctttttctaccggtatcggttgttgcatatgctttgatctattttgtgggattaaatatcagtggcgtacgtgaactgcctacagctgttgtagttgtgatggtatctatgctatatcagaatcgtaaatttgtgggagctatgaacatagtatatcttattgattccattttttatgtgcagtttgtggcaaaaggaggagcaaaagaggcatccatctccatggtttttacaccattgcttatgtgccttatttttgcacagttgacaatctggtgcctggtaaagcagaacacagaaaacatgtgtgagattgctgaggccgcacgccatgatcaggacagggcaagaaaactcaaaaatgaggcaaagggagttgtccaggaagtgaataccctgaaagaaaatctgcagaatgtaaaggaagcaacttctatttctgacgagaatatgaagagtattggcgaagggaatgaagtaacggtaggtgctgcgacaagactaacagagatggctggagaaatacaggaagtgattgtacatacaaacgatacggtctctacggcggatacctatattgaccagttagcaaaagcttttgataaaaacgcaggtgtactgacgcggattgtggatcaggagaagcagtctatgcagactggtgaaaatatgaaaaaagcatctgcacagttaaaagacaaaacggaggaggttcgtacgattactgatacgatattcaatatttcctcgcggacaaatcttttagccctaaatgcatccattgaggcagcacgggcaggtgaggttggcaaagggtttgcagtggtggcagaagagattcgtaagctggcagaacagacaaaaaaagctacagaaaacatttctaatcttttgaatgaattgtgtgatggaacggatatcgttcatacacagataacggataataataatgtgacaaatcagcagagtgcatctattcttgtcatggtagaggattttgatgaattgcaaaaggaatttaatcagttccgcagcagtatggacaagatacgtgagcagatggattatatggataagatgaattatagcatttccagtcaatcgacggatttgtcagcatgcagtgaggaagtatctgcttctgtatctgaagcagaaaacaataatgtgcatattgatgaatgcatacagacggtacaggaacaattagataagataacagaacttgttatccatatggcaggataacaagtgtagaaaaataacaaacaagcgcccggctttagaccggacgcttgtttttgttatgtagcatgaagtgttttatctatgaagatagctattggcatactgatacgtggtattccagaattgatccattacagcactatcaaactcgcaggtatgattggaacgaggcatatacaggtaggcataatctatgccgttggatgctaatgcatcgttcatatgtgcaccatgtatattgccgacgatgatatcttcatctgcatataccatgatggtaggtactgcctgtggcgaaatataagagattggtgaaatctctgccagtgcagattttctttctgcatcagacatgttttgataatttggaattagtttctgcgcaaatgcgttaaaagtcaatgatgaagacatcacgcccggagcaaaggcctctggacataagtcggctggaccgacctgctcaaataccagattaacaggtacacaggcactattggtacggctataagcgtatagaagagccaagtgcccaccggcagaataaccggaagtagctacggaatcaatggtataaccgagttcggctgcctgtgcaacaatggtgttgatgcagttctgcatatcatccatgatgtcattcatactggttgctgcattgcgttctgcttcaaagagacggtaatcaatatctgcagtgatataaccctgacgtgtcattttgccacaggcatagtccatggattctttattaccactaatccagcttcctccatgggtgtagaggataagtgaaactggccgattctttggcgcattttttggaatgaataaattataggtgtttctggtatcacggctagtgtcatagacctgattgcgtaatacgattgcctcatcttccgttggcgcaggttcattttgtcttgatgcagctgcaaaagcattgtacaatgtcaggtcatcaccggacagatcagaagggttaccatcagacatgagcttgaatccatccagtttataccattttccaccaccgttgacggagtcataaatccagtagtaggtagaaagcccatctaagttcaattgattgttggaagcgttgagtcctagaatgagacgggaaaaatcagtggttggattagtagtgtagtcaggacaaacaattggcacattggttgtgacaccattcatgtacataagttcggcttcagcctctaagttccatttttcaaaccatggtctcaaactggaacgagctgctcttacggcagaaccggaagtgatggtcagtgcatcggaactgatgataacagaaccacatttgatggctagtaccgggatatagatactacctttgatgtcagactccggtccaactgtctgctggtaaacaccatattcgtgacggtagaagtgtccacctgcttctacgatgattcgtcctttaataatgacatctccccagccttgcaaggatccaccatcatggatggtgacggttacattttctggaattgtcaggcgttttccccaatttacaacgcaggttccatagatgtctgtatcttcggaccaggtcgtgttacgtctgatagttgttgtagtagtgacttcctgtgcatttacgcaggttccaaaagtcatgaataccatgacggcagcaaataggatgctgcatagttgttttcttctccttttcatgaaaacccctttctaaaatagtaattgtatggttactctgtgattatagcgtcagaaatatgagagcaaaccatagaaaattgctgttctgtcatagaatgttgcgcttttatgagccagatgggattgcgcaacattctatgaaatcagggcaagaaagggagaaaccgttccaaaaagagcagttaaaataagaagaatcagggatgtgggagtagttcggaggcggtgagatagaacgttatgaagaaaaaattaaaaggtgtggacattttgtatatggttttgctaggactatgtgtgattatggtaggaatcgccattggcaaaacccgattatatgatatgtggaatgaggagctgatttgcaatattctgcacctgcagcaagaggaacaaatagcagaagacagacacatgatggaaaaaatacaaacgaagattctttattatacattgccacagttgccggatgaccgtatgtcattgtatggttatgtgcgcaatgctaacgtcaccatttataaagattatcacatcatatatcaatctccgaaaattgaagaagaggatggatggtatttctcggacacaggagattacatgatatctgttcctctcaagcaaacagatggagggaaaaaaattcaggtgcttgtgacagccggtaaggatgaaattaaaaatatacagttctattatggtacaggtgacggttttatgcgcatgattctgaaagatgagatgacgcgtatgaccatactgaccataacgattatattaggtgctatttctatcatgttatctaagacattggatccgggaatagaggcagttagtggtaatttatattttggaaagttttgcattttgtttagcctggtgaaggttaatgatttcagaatgaccaccattatgtatgataatgctatgggttttctgtacttgtcagttctacaagggattttgtgcgtgacgccttttattggctttatgcaatgcaataccaatatgaagaaaaagcatgcaactatgttaacaagagcaatgaatctgctttttgttggcattttgtgtctgcatatgatcggtgtactttcattggatgcctgtatgtatgcttcttatatggtttttgcaggtctgtgtctggtttttgccatttgtctgtgtcttcactacaaacatttgaatctggggcagaaactaaagagtctgcttaccatactaggggttttattatttccccatctggatctgtttgctttgttggttcttgatattatgttgtttatgattaccgtctggatgggtaatcatacattgaagcaggctgaagagggagaactttacaagcagcttgcgtatatagatgagatgacagggctacataaccggtcagcctatgaagagtatctgatggaaaattctaagacagatgcagcgtcctatg

SEQ ID NO: 12623 - DNA, 2324 bp, Unknown
  gut microbiota DNA sequence
tgttcgcactagtctatctcctcaaataccgatttatacccctaactcccgccacaatcgtactactctcgtaaccatctgcaaatatcaacgacttgcaccccctgatagtcataagtttcatgatgtgttcttgcaatgatcatcttagggtatgcatctcttattgcaagcaatggcgaatattctctttcaaatgttttttcatctgaaatattatcacttacctgaatatatatttgcatctcacgtttctttgccacaaaatccacttcttttttatagagttttcccacatatacctcatatcctcttctgcgcaactccagatatacaatattttcataaactcttccaaagtccatgttgcgtgtaccattgactgcataacgaaatgatgcatcacaaagataatacttactattgttcgccagatattttttcccctttaaatcataccgttttacctcatagaacaaaaaggcattttccaaataaccaatgtattttgataccgtttttctgcttatctcgctttgatcattctttaaggttttgctgatattatttggagaaagtaagttaccgatattatccatcataaattcagatatattggtgaactctgatttatttcttattttatatttttcaaccaagtctctgataagaatagtcgaatacacatctctaacatagtcatactgtctatcctccgtcttatatacataagatccaggcataccaccagttcggacatactgatcaaaagcatcatcatatccatctgtaatttcataataagttaaatattccacaaaagaaaatggatatacctttatttccgtcgttcttccagtaaaaagcgttgccaaatctgaactcagcaaaaaagcatttgaaccggtaatataaatatcatagattccttttgcgtgaatactattgattgcaagttcaaactgaggacacaactgaacctcatcaatcagtaaaacattggtcattccctctttgtactgatccaagatgtaattatgcaatgcatgatactctaacaaatgatcaaactctaattcctgaaggtttatcattacaatatttagtggctcctctaatgactgcaagtaggcaacaaactcttgcagcaagactgatttaccgcttcgtctgatacccgtgataacttttatgtctggtgttccatacaattcgatcaactcttctaaatacttttttcttacgataagttgcatggcgccatctcctattcccactttctaaaaattattcatttttcggtaatatgctttacaaacacatattaacacgatctgtgtcttctgtcattagcctattcccactttttaaaaaatattcattttcaggtagcgagtatccacaaaatcgatcttctgatctatcaaaaaaacggaagtctgcattttgcaaaatcttccgtttatattctatatctaacttatctggtgaaagtatatttacgattgactttatattccatcaaactctgatttacttcttatcctacaaatattactttcattttttgcttgttttcggtttgtaatccttcatctctggaatcgccccacctgacaccgcccacaaatacaggcttgcaacgctgcaatagggactaaaacgccgacgatatttctcaaataatttgcggtcaatcttacgatgatggtagaccatccgcaatccacgctggatcgcaagatcatcataactaaaaatatctggacgctgcatacaaaagagcaagatcatctccgcggtccagacaccaataccttttaaactgctcaattcccggatagccttctcatccgacatttgccagactgcatccagattgcaagtcccattatgaactttttctgcaaaatccgtgatatactccgcttttcggaaggtcatgccataagactgcaatttggaaatatccgccgccagaatcgtttccgcatttacttctcccagaccatgctgcatccgctgccagatggttgcctgtgcttttgtggatatctgttgcccgataatatgatgaatgaccgaagaaaacaggtctgtatccgtttctctttcgatcataccaatcttctcaatcacttccgcaagtttttcatccttacttttgagatatgaaatttcattttctccatatgcaaaatacatatcccacctccgtgctttttgttgtactttctttccacaccgacatcctaccaacttacaaacagcatactgctttccccagtcacccttattgcgtttcttttattctctgctttaag

SEQ ID NO: 12624 - DNA, 2376 bp, Unknown
  gut microbiota DNA sequence
tatgtaattatattcatatgttcatacattgtcaatatatccaatgaattttctgtacctttttttccccgccacatagaataataaaaaaagaaagaatatcaactatggcaactttttataaccaggcgaccttgtcctacaacggcaacacgaccacatccaatatcacgaccggtgaactggtcgaagtgctctctgccacaaagaccgccgtacagaccgagtatcagcaggatgataccctgacctatgtcgtcaacattttaaactcaggcaataccaccatgaccggagtgacgatctccgataatctgggtgcctataccttaaacaccttaacactggtgcctatggactatgtggtaggcactgtccgctattatgttggcggtgtcttacagccgacaccaacggtgaccgccggtcctcctctgaccatttccggtctgtctgttccggcaaaaggcaatgtcaccgtcatctaccaggccaagaccaacgattatgctccactggcacaggaaagtagcatcaccaacacggcgaccatcaatgccaacaatatcgccaatccgatcacggcaagtgctacagtcaatgcttacagtgagccggtgctccgcatcagtaaatccttaacaccgacgactgtctccgaaaacggacaactgacttatacctttatcattcagaactacggcaacaccgcagcggatgaagccgctgccctgatcgtctccgaccgttttgacccgatcttaaatccgatcacagtcgccttcaatggcactgcctggacggaaggtaccgagtacacctacgatgccaccaccggacagtttgtatcaaccgccggcatcatcaccgtacctgccgcttcctatacacaggatgctgcgaccggtgccatctccattgttccgggttccgcaaccctgaccatcacaggaacagtttaagttttccaaacttctcaatgaaataaaagaaaagcccccgcgcgtatcctgcgcacgagggctttctatgtgatcttactttataaaacttttaaaagtcccagcacgagcaggtgcaggggatagaatacataaaagaaccacttatgtatgggcttcttactgcccgcctttccattataagtataatgtaggagcaggggcaccaaaaagacccccagttgataaataccccagataccaaatcccccaaagacaaaactacagacagagagcagggtataagtcgaccacttcttcttttcatccttccgatagcaaaagaaacacatggcataaaggatatcaaagatgggccagtctccccaaaaggacaagatacaaagaaaggcaatgatggcttttttctgtgcctccatcatcgttcccttatcccaaacccagattgcaagcagggctagaaagagggtgtagataacgcccggcgaaaattcaaatgtataatttccatttaatttataaataggtaaatgtccatactcaaaaaaagtaaaggggatccaggaaatgaccgcaaaaatggcaagtctcttggcatacttctttacgcttcgtgtatgcacatagccctcggcaataaaatatgccatggtcggacctgtcagccgaccgatcatatgcatgatctgcccctgccaggaggcaagcggtacaaaagcccaggcaatgtgatcgatgagcatggctaggatcacaatatatttgatctgatttcggtttaaagaaagcatggcttgttctccttccggtgccagaacctgacaccagaatatcataacaagccacttcctttctgtaaagatttattcaccaaagaagatcttcatatcctcctccacgctgccaatgcctgcaatcccgaagttgtctaccagaacctttgtcacattcggtgataagaatgccggcagggtcggtcccaggtggatattttttacaccaagggctaagagcgccaacaagacaataactgctttctgctcataccaggaaatgttatagacgattggcagttcattgatgtcttccagtccaaagatctcctgcaatttcatagcgatgaccgccagcgaataggaatcgttacactgccctgcatccaggacacgcgggatatctcctatagaacccagatttaatttattgtatttatacttggcacagcctgctgtcaggatgaccgtatcctgtggcaatgcctttgcaaaatccgcatagtaagaccgggacttggctctgccgtcgcagcctgccatgacaacgaatttcttgatcgcgccactctttacggcttctacgatctggtctgccagggcaaatacctgggcatgtgcaaaaccgccgatgatctgcc

SEQ ID NO: 12625 - DNA, 15315 bp, Unknown
  gut microbiota DNA sequence
gtcttggctaatgcgatgatctgactaaagtctttttcctgaccaatttctccctcaatatgtttgcagcccggatagccggatgcccccgtggtaaagagacggtctttataggaatcctttggcggtacgatacagttggtcgtcatcaggatcggaccatggaaagacgcaaattcttccgtctgtttccaccatgcatttccgtaattgccgacaaaatgcttgtactttttgaacgccggataataatgtgccggtaacatttctgaatgggtatatacatctacgccgctgtccttggtctgctccagaagcatttccaggtcccgcagatcgtgtccggataccaggatgcccgggcgcttacccacgccgatgttgacctttgtgatctccggattgccataggcttgcgtgttggctccatccaaaagtgccatacccttcacgccatacttgcctgtctccaatgccagcgccaccagatcattcacggataaggtgtcatctaaggttgctgccagtgcccgctgtaaaaaggcatccagttctgcgtcatctgccagcagtacattggcatgcttggaataggcggacagacccttgagcccataggtgatcaactcgcgcagagaccggatatcctcatcctgcgttgccaaaacgccgacactttttgccttttccatataagccgacggctccgccgtccaaagggctgcctccggcaattcccttttgtcctctaaccgctgtaaaagttcttccttgcagaccaaggtatctgcgatccgcttttttatctgtgccccatcaaaattggcattggtgatggttgtaaaaagatttaaggtaatacgatggttgacctcataagaaacctctttgccctcactgcgcagcgctgttgtaagggcagcacatcccttggtcacatatatcaaaagatcctgcaatgcagccacttccggtgtcttaccgcagacaccgcgcacactgcatcccttgcatcctgctgtttcctgacattgatagcaaaacatcttattttccatttttcttctcctttatcttgcttatttgtcttgtttttcactgacaggctcattataatatggttatcgaaacaattatgttgtcataacaacaaaaggagataaaatgaattaccaatttttagcaaatacaagattattccgcggcatatccgtggatgaactggaaaagatgctgacctgtttttccgtacagaccagacaatatgaaaaaggcagtctgatcctgcgtgccggacagacggtctctgccatcggtctggtcctctccggcaatatcaccatcgaaaacaatgacctctggggcaatcgcaccgtaatggaccgcctgggggcaggcgcgatctttgccgagtcctatgccctgacaccggaggagatcctcatggtcgatatcgttgcaaatgaaccgacagaagtccttttcttacagacccgggctatcctaaatccctgtcagaagtcctgctacagccaccgcgccctcttaggcaatctgcttgccatttcctcacaaaagaacctgcatatgtcccgccacatcctccacacctcgcccaagaccatccgcggcaggctcttgtcctatctgtctttttttgcacaaaaagagggcaactacgagttcgacatcccctttgaccgccaacaactggcagattatctgggggtcgaccgcagcgccctctccaacgaactcagcaagatgcagcgcgagggcatcctgagttccaaaaaaaatcattttaaacttacacctgattgcctgtagggatctctcccttttcgtagcccagcgcattctctaaggtagtgtggctgatggcttccattgcctcctcggtaaagaatgcctgatgtgaggtaacgatcacattcgggaaagacaaaagccttgccgtaacggaatgttccatgatgtctgcctcacggttttcaaagacattgccggactcctcctcgtaaacatccagtcccacgccatgaaacttgtgggcacgaatcccggcaatcagatcatccgtatcgaccagttccccgcgggaagtattgaccagtaccacctgatccttcatcagagaaatggtcttggcattgatcatatgatagttgtcgatcgtgagcggacaatgcaaagagatcaggtcaccctcccggaaaacttcttctaattctttatactcgataaaatccaaagatgggttcgggtatttgtcataggcgatcacccgcataccaaatccccggcaaatgcgcgccatagcggcaccaatctttcccgtaccgataatacctgcggtcttgccgtaaaagttgatccccatgagtccttccagactgaaattgttctcccgcaccttgatatattctttatgaatacgtcggttgacactcatagccagtgtcattgcatgctctgccacggcttccggggaatagcccggtacgcgaaggacggtgagtcccagttcctttgccttttccagatccacattattgaaaccggcacagcgtaataggatcagacctacgccttcctcgtgcaaaacttccagaaccggtgcagataaatcggaactgacaaaagcacagacggcatcatagccctttgctaaagccgctgttctcacattgatatcggcatccagatactcgatctctatggatgcataatctgccagttccttatcaaaagaatcgatatcatatttctttgcatcataaaataatatcttcatttaattttatcctttccttcatagatccggtctatgtaactcttacagccaggcttctaccacggcattcactaccgtcgcctgctcttcctcgcgtgagataccggctttgccatcgccgtcctgctctccgtaattgccatagtaggcgtgattgccaccggcaaactgaatatcaaccgtcgtatcctttggcagattgtccgcatactttgccagtttatcccggttgatgacaccatcttcgctgccgaccaaagacacgaccgcaagatcgctgtcggaaagatccttggtcgaataggccgccagaagaaggagaccgtccagttcgtccgcgtgatctgctgcataggatgccgccatggctccgcccagcgaatgaccgccgatataccaatgcttatacttataggctgtcatgacatccgttgccttattcatgccaaaaatcgccagattaccaggcatagtgaccagatagcaatccaagccatttgccgccaactgcttcatgagcggtgcgtaggagatttcctccaccttggctcccggataaaagaccatggcactctccgtacccttgccatcaaaaaaatagccgtcctccgtcttggtcacggtaacttccacgtccgattccagtgcgtcctctacgccctcagcgtgataatactggttgagataagccatgatccccgtgatcagggaaataatgatgacaatggtgatctctatttttaattttttacactgacttgtgtttttcatattgctatcctatctttattttttgaaaaccagaaaaatctatacctgtctttacaggatggcggtcacgagattgttctcgatctgcacgcccggaacactgctgacatacttggaaagtctggcataaccgtaatccttgtatttgaaatccgggtattcagtcgcgatcatcctgccaagtgttcccagttccaccgtgctggctgctgccttctgtacaaatttctctacttctttttcgatatccttgccatggtcactgctgcgcaggatgcagatggcagtacctttttgcatggtctcgaacttggtcgcttcctcaataaaggtacgcatggaactgtagccgtaatttcgctcatcaaaatccgggaagagtctttgcagattgctcttggtggatcccagattggcatgctcgccattgttctcgctctgctggatcaattcgttaattgctgatttaatttctccgatcggtgtgatagaatcgcccttgctgtcgtgattactttctttgtggctctttgccttggaagtctccttgacctcctcatccacgatcttatccaagaacttgtattcattgcaggctgcaataaaggtctttgacgcgtcggatttgcccatgccgatcacaaacataccctcttcacgcaggcggttgaccagtcttgtaaaatcactgtccgaagtcacgatacaaaatccatccgtcttgtcctgatacaagatatccatggcatcgatcaccagcatgatatccgatgcgtttttgccggacgaatagcgcggctgctggattggcacaatggcatgcttcaatgcctttttgtgccagtctgcaagatttggactggtaaaatctccatacattctctgataggtgatcacaccatatttttttaattcactgataatggcatcaatatacttggaactcgcgttctccgcatcgatcaaaagtgccagacgtttttcttccattttatactccacctgcctgttactgtaaatctttcaggctctccatcaattccagatccgactgcaataccttaaaatttgtcgtgatcggttcctctcccggcttagtcacggtaatctcaaaaacagttccttcctccacgcgggaagaaaataccacctgcaagaactttacaaactttggatgattgtttgtaaatgtgttctttgcattcatgagtttcatcatagttcccggattgatcatctcttatacctctacttcccctgcaagcacacgcttgtagtcctcgtaatttttctttagtaatgtcggtgtatccagttcatacggacacttctttttgcaggcgccacactctaagcagccctcgatcttcttcatttctgcctgcatttcctcggtcagccagttggctgacggcgcacggcggagcataagagacatacgtgcacactggttgatcatgatacctgccgggcacggcatacagtagccacagccacgacagaaatcgccggtcagttcctgacattccttggcaataaaggcacggatctcatcggtcatttctggtgtctgatccataaaggcaagccattcatccaactcgctctctttttggattccccagatcggaaggacattatcaaactgtgtcatatatgccatggctgcggtggaattgttgataagtccgccagccagtcccttcatggcaataaagcccatgttgtgcttgcggcagttctccaccaatgccagttccctgtccgcagacagataggaaaatgggaactgcaaggtctcataaagaccggattcgatgatgtcctcggcaatgccgatcttgtgcgctgtgataccaatatgacggatcttaccctgggcttttgcctcaagcatggcttcgtacatgcctgtgccatcccccggtgcaaaaacccggtctgcacaatggaactgatagatatccagataatcggtctttaaattatgaagtgtggtctcaaggtctttccagaatccttccggtgtcttggctgccgtctttgaggcaatgtaaatattttctctgacatctgaaagacctaagcccattttttcctcgctgtcgctgtaggctcttgccgtgtcaaaaaagcgcatgccgccttcgtatgcctttttcaaaagtcccgctgcatcctcagcactgatacgctggatcggcagtgccccaaaagcgttctgcggcactgtgatccctgtacttcctaatgtaatgtttctcatttgcttttcctcccttattcttctgcttgtccgtaaatgccgttgatcttgacggtaaagactgcctcagccccattgaaactcttggtctcgccattatcgtctgtataagaacgtccataattttccgggaatgtgacattgacctcaacggtctctcctaccttatgaccttccaactgctcctcaaagtcatcgataaaagtattagatccgatcgtcagatcctgtccctctgcggttcctccctggaaaacataaccgtcaatactgccggaataatcgatattgaccgtatcgccttcctttacttccagactggtatctgtcagcaatgtctctttcgtcgtatctgaagaatcctgtgtggtggactcctggctggacgtatctgtcgcctgctgctgggcatcctctgcctcggcagccttttgcttacggctatcgatcacgccatagacgatcatgccgacaaaaaatgcaacgataagcgcaatgatgagggtatttctcaccagacgcatggttgcctgttttttacgttctgcggctcttctctcctgtgccattttcttattttctttcttcattgcgtatgattacctccttagatgataactcttatattataatgaatcttccacattctggcaacggataagtcgctgctttgtcagcgcgatccactcgtccagactgaggggctggtagtccgaatacatgcaaaaacaatttatcatgtgggaagaaagggactgcgttccaccatcacgatccgggatccgggtcttttccaccatctgctgatactgctcgatcaggcgctcgtcatgactgtcatgcacatgcccgtagagcatataggtccgcggctctccctttttattttttaaatactgcccgttataacaggcgatgggataatgggaaaggacgaccttgcgcccgtcatcatggagttccgcatagggatagatccagccaaaacgctccttgtggaaggttttgctccgcagatagcggttgtcatgattgccgacgatcaggaacagtttgccctgcaaacggtctaaaagggcattggtctgctcggcattttccatggaaagatctcctaagatcacgacctcgtcgcggtttctgaccttttcattccatctttttatcatatattcattcatttcctccacggaggcaaagcccctgtgatccatttcccggttgagtgcttcatggaaaaaatggcaatctgcaatgtaataccgcatctgtctctccttatgctaacatgatatcatttaatgtccgccgacattccttataatttggataataggtctcgacctcctgccagaaagtcttggaatgatccatatgacggcggtgcgccagttcatgcaccacgacatagtccaaaagttcctgcggcagataagccagccggtagttaaagttgagatttcccttactgctgcagcttccccacctgctcttttgattacgcatagaaatagagccgtagtctatccccatgcaatctgcatagtagtctacgcgctctattatcttttgcttggctatttttttgtcggatgccgtcaggctctcccattccgggatgtcgtaaggattttctgccagatactgtcttcttgcaaacatctggctgcggttttcctcgatccacctggcatgcgaggtcacaaagcggcggatggtcctgtctgaaacacgcataggtacccgcgctaagacggatccatccgtccggatctggagtgccatgctccgccgcttggatcttacgatctcgacctcgatttcttcattttctaaggcaataatcaattctgtcaacattttccttaatcaaggatcctgccatcaatggagatggtcacaacctgccatggaaggaacttgccgctgttttgtaaggcggtcttggctgcatactccagcccgccgcaacacggtacttccatgcgcacgatcgtcacgctcttaatgtcatttgccttgatgatctccgttaatttttcactgtaatcgatcgcatccaactttggacagccgatcagggtcacatgccccttgataaattcttcatggaaggatgcataagcatatgccgtacagtctgccgcgatcaaaagacgggcaccgtcaaaatatggtgcctgtggcggcgccagtttgatctgtaccggccagttagcaagacggctgacactcgcagcctttgtcgctgccgccacttccggcgcatcctcatgtgcaatggcttttgccatgctgcccgggcatacaaatggctttggttgttcttgggctgcttccatgcgtgccttgacagcgacttcgtcgtaatctgccgcttctctttcaatgatatggatggcatccatcggacaatgcggcagacagtcgccaagtccgtcgcaatagtcgtctttgatgagttttgccttgccgtttacgatctcaatggctccctcgtggcaggctgtcgcacatgcgccacatccattacatttttcttcttcaatatgaacaatctttcttctcatgatctatgctcctttacttttcctaagatgactagatcataagacattttgtccaaaaaatatgttgtatctacaacattccatttaaaatctgacgcaaaacatcttccacgcggtcgcagtggttcgccttgacatcctccatggtcggattacatttttgcatcagataaggctgtcccacaaattccaacatagaacggtcattttcgttgtcaccgaaagccaccatttcttccggtgcgatccccatctgctgaccgatggcttcgagtgccgtgcccttattggctccaagtggtgcaaagtccgcccactcattaccagataccatgagttggcatcttccggcgatctttttggtaaagtatgccgtcacctgatcccggtagtcctttggggtaaagtaagataccttgatgatcggctctgtgatctcctccggtgccccgatcacggtcacatcgttcttgatgtgatttctcagataatccacatagtcctctgtctttggcaccacatagcaggtgcgctccccggagatcaatacttcacactttggatcatcaatgaccatatggcaaagttccaaggctaacgctcggtcaaactcccgctttaggagaaccttgtcctgataaaagaccaaggcaccgttttcacagagatacatgacatctccatccacctttttgaacatgttatgtaagttaaaatactgtctgccgctggcaggcacaaagatcacgccctttttcgtcagtgccgtgatcagttcgatcgcctcctcggaacaatccggcatatagttctgtaaaagcgtgccgtccagatccgatgcaatcagttttaccttttgcttcatttctaatctatcctatccttttctctttttcgcttacctatcttagcagaaagtccgcaggatttccaccttgcgcgtcgcagactcccaggaaaattccgacagatcctgtcccagcgtcgccagtaccgatgccgcgtccacgctccacgctctatcctgcaactgctgatagaggaaatccaccgcctgcaggtcctggttttccagtgcagactgcatcatctccaagagattctccttggtctccgccgtcgtatccttgtgatctttgaaataatctgccaggtgctttccggcatcttcgatctgctccatgagtataggatgcagggtctgcacctgatctatccgaccgtcagccagagctatctcgatcaggcgggctgtttttgacaaaagcagggcacccacggtcgccgccgtgccctttaaggtatggatacagcgtctgtagtcctcttttgtctcatccgtccaggtcgtgtcaaaaagagtcgtcaacttttcctgcgcccttgcaagatcacgggcaaattcctgcaaaccggtacgataacgcgacggactcttccagatcagcatggcatattccgcatcaaactcctcgatctgcggcagttccatgtctgcctgcgcctgatctttgtcatccttttgcccctttttcaccagatcttttggcaggtaagtaaggagcatcttttccagttgatcgtagagaataggctttggcaaaaagtcacagaagccctctgccagatacttttcccttgcccccgcagtcacattggcggtcagcatgacgatcggcacctgccgacagagattgccctcatccgaaagcatattacgccgcgtctcgatcccatccatttccggcatcatgtgatccaaaaagatcaggtcataggcatgttcttttgtcagacgcagacactctgcaccactatccgcctccgtgatctggatccggctctcctttaaaagttccacaaaaacacgccgattcatctcgttgtcatcgaccagaagaatcttggctttcggtgccacaaaaccggaggcaaactcctcatatgccacattctgcgctaccatctgcgcaaattccccgatcggtgttggatccgctaccggctggtagagaacaaatgaaaagtcactgccgacgccctcctggctccagacatccagtttactgcccatcagttgtaggagagaggaagaaatactcagtcccagtccactgccttcgatatgacggactgccgtttcttccacgcggttaaagcgttcatagatctgtgggatcttttccggtttgatgccatttccggtatctttgatggaaaaacgtacgcccagatcactactgtctgtcgtctgtaccgactccacataaaaggtcacgctgccctgggcggtgtacttgatcgcattggtcaaaaggttgatcagaacctgacggatacggatatcatccccgatataggcacgcggcagggtcggatcgacaacgacctgaaaagtcagatttttcttcttggcatgaggcgacagcatctgataaagatcggatatcatattgcccagatcataatgtaccggcaggatattgagtttgccggtcgataacttggacgaatccaaaatatcattgaccaggctcagcagcatatttgctgcactctccacgtctttgccatattgcaggatctgcggatctttcgcctctcgcaggatcatttcgttcatacccatgatggaattgatcggagtacgcagttcgtgtgacatgctggcgatgaaatcactctttgcctgattggcttcgttggcggctgtcactagggactggatccgcttcatctgcttttcctcatccgtcagatccatcagaaggatagaatagcccatgagcacatcttcctcataaatctggtcgatatgcacatcatagacctgatcgcccaaatacatcttattggcaattccggtacgcagataagacaaaagttttgtctcagttaaaagttgtccctgccgctgatcggctaaagatggaaaaagtttttttgccttgatgtttgcctctacaaagccgtagttcccatccacaatgatgataggttcatgcatattttcaaagatattgttgtgtgccacacgagcaatatcaaacatatcctgcaccatggcagaagaaaagaataagatcatccccaccgcggtcaaagatggaatgagttcgtagccccgatccagtcccgaaagacggataggaacgaccacgaaaggcaaaaggacacagaaaaagagcatcttacaactgcgacggtatttttcatcctttgcctcacgccagcccttaagcgccagataggcacaggcaaagatctgcactgtctcatagaccgagttaaaatagatgaccggtccgtagactctgtgcagataggtcagactgccggcggtcacataataaatgtcccggtaaaaaagcgaatgatactgactggtccatgcactgatcatgacaagaatgtccactacgagcatgacaccgaccaggtgcttgggtatctttttgtgggtatagcgcatacaaaagagtaaaaagaaagtatcaataaatgccacaccgatatatcgcaatttcatgatcagcagaatcgcactgatcgaatccgcctgtatctccatcagatatgccgcattttcgatcaggcataaaaacgccacgatcagcatcaatttagacagacggttggacttttggatccctgccgccaagacaaaagcgatacaggcgatcgttacgatcgcttgaaaaattaaaattccctgactcatactctcttttgtaaactcctcttctgtttataaaagtggtgcgatcagacgcaggagcatctggataaaccgcatgccctgactgcgcccggtattgtatttttctgtaacttcaagactttccctcatcatggcttccatatcctgtctggtctcttggactgccggaccataggcatagagacagccattttcaaaatgatgatagagactgcggtagtccagattgatcgtgccgcaggtggctaccacgtcatccaccacgcacatcttggcatgacagaagcccggcgtgtattcatagatacggacaccgtgctttgccaggcaatgatagtaagaccgcgtcacggcatagacaatacgtttgtccgggatcgccggtgtgatgatgcgcacatccacgccccgcttttttgccagacggatggcgtgcaccatctcatcagtcaggatgagataaggcgtgacaaaccagcaataccgcgttgccttattgatcaggctgatgtagacttcctcgcccacatgctcattatccatagggcggtctgcataaggctgcacataagcccggctttgcccggtctctccgatctcctctgccatggcatgcggatccgcataaggctgctccagatatttgccaaaatcggcatcatcgatatcgttgcccttgaccgcgttccagttctccagaaaagttgccgtcaggctccgcactgccagccctgtgatctgcacgcctgtgtccttccaataaccgtagggatgggtcagattaaagtattcgtttgccatattataaccgccggtaaagcccaccagtccatcgatgaccatgatctttctgtggtccctgttatttaaaaagaaattcaaccccggcataaaagggttaaagatacggcactggatgccaagggcattgaggtgcttggcaaaatccccattgataaaggcgatacttccgatatcgtcataaaagacgcggacttccacgccagccttgacccgctctactaaaattttctctacctgattccatgcttctgcctgctcgatggcaaaatactccataaagataaagtgctttgccttttttaaggcttctttttgtgcctcaaatcccttgtaagcctcatcataataggtaatgggacaatccgcatagaccggaaatccgctcttttcctgcaaataataggatatactagcaagttgttcattcttatcccgcagttcctccatggaggacttcacatggtctgcccccggtccctgatccagcatgggaagaacgatggcatccacggcatcgtaacgctgccgcatcttataggtgtgaccattcagaccgaccagaagatacatgatgatgccaaaaatcggaaaggcaaggatgagcatgatccaaggggtcttcatactgcttgtccgatcctgcgcataaatgcatacgaccagcaccaccgccagaatacgcgtggcaatgttgataccttccgcgtaatcattgagcctggtaaagaccaccacgataaaagcgatctctaaggcgatcgcaagtacggagaaaaagagtcttgcaatgccgtttttcacatgtgcttttttctcataggttcgtattttcatgcctgctcctttcctaatataaagcactccaaatctagtctttctattataatgcatcgccgatggatattcaacacaggcagatcttctcgtttttctatatagtctttcggttataaataatatgtaatctgtattttacatatataagacagattgttatacttgaatgcagaaaaagaaggaaatgatatcacaatgaaacaaattgattttgaaaatggtggtgtcggcaaaaatattctggctgccgcactgccaatgcttgtcgcccagattttaaacctcttatataacatcgtagaccgtgtctatatcgcccgcattccccaagtgggaacggcagcactcggcgcagtaggactttgttttcctctgattgttattatcagtgccttcgcgaatctgttcggcagcggcggtgccccgattttttccatccacagaggaaaaaaagaggatacaagggccaaccagattatgaacacatcctttaccatgctgtgcatagccgcgattttgctcatggcgattggcatgctatttgcccatccccttctcatcctttttggagcctccgaaaaagcactggtatttgcctatccctacctcatgctctacctgataggtaccctgccatccatgatagctgtgggtatgaacccctttatcaatgcccagggctattccaccatgggcatgttctccgtcgccatcggtgcccttgccaatctgctcttagatccacttttcatcttcgcatttggccttggcgtatgtggtgctgcaattgcaaccgtcatctcacagactctgtctgctgcctttgtcctttattttttaactagaagatctgagttacaggttcgcctgcttaaaaaggaagaattttctgtctccttagggcatgccaaaaatatcgtcagtcttggaactgccggttttatcatgcagttgaccaacagcctggtgaccatctgctgcaaccatgtcctttccatgaccggcggtgatatttatatctctgtcatgacgatcgtatctagtgtaagacagttggtcgaaacaccaatctatgcactgaccgagggttcatcccccatcatcagttacaactatggtgccagacgtccaacgcgcgtcaagaaagccggcagcatcatgagtcttctggtatttgcttataccgctgttatgtgggctgtcattattctgattccccataccctcatacaagtctttagttccgatgccagcctgatcagtgactctgttccagccttaaaacaatactttgcagcctttatttttatggatttgcaatatatcggtcagaccattttcaaatccttaaataaaaagaaacaggccatatttttttccctgcttcgaaaagtttttatcgttgtccctctgacctatctgatgcctttcgttctcggcatgggcacagacggtgtctttttagccgaaccggtatccaatgtcatcggtggaagcctttgctttatcaccatgctttgcaccgtcttaccggaattaaaacgtatac

SEQ ID NO: 12626 - DNA, 2849 bp, Unknown
  gut microbiota DNA sequence
atcttatgggatttcccaacatggagcgtacagcaatttccgcgattttacagacagtttacaaccttttaacaaaacgcagatagaagcaccctaaggggtgcttttataatgttatttgttatgggagatgagtgcgctggcatgaagcttttatctcctgtgacagatacattattttgcaggtaaaaggagtataaaatgagtaaactgaaactgacaaaactggaaaaatcctgggttttgtatgatgtgggtcattctgcatttcttctgctatattgatggcgtatataccattatcgatatggctacagcgtatggaacagcactggggctggctggcagatggcattatctggcagttttggatgccggtggaatggttccgcctctttggagaattattgctggcatgggggattgtgctgatccttgcctttgcattttctttggcaaaaaagaatatataaaatatctgaaaattgcgacctctcgcacaagttgtggtataattatgacaacttagagtgcgggaggttttttctatggatcgtttttatgtggaggctgcaccgattgcagaaaataagacctatgtgagcggacagatacgtctgagtattattacagaccatattttgcgtctggagcgtgtggaaggagatacctttgcggatctggcaacgcagaagatcatgcatcgtgattttggcagcccgtctttttcggtaaaggataatatgctggatatcgaagtgacgacggcagaccgggtctttcatgtggataaggagaccctgcttgtgtccgtgaaattggagaactactgggtagacagccatcaggtacatccgctgggtgggacattccgaaccctggataatggcttgggcgaccgtattttatttggagaaaataagggaccggtcaaattatcggacagtatcttttctctggagggggtagcggagatcgatgattccgcatcctattttctggaagaaaacggcaccttatctgccagaagatcaggcgatatcgaccgctatattctggcatttggcaaggattatctgggcggtctgcgcgagttttacggtttgacaggatttacaccgcttttgcccaaatacgcactgggaaactggtggtcacgctactatgcatataggcagcaggaatatattgatctgatggataagtttaaagacaagggaatcccgcttaccgttgccaccatcgacatggactggcatctggtaaaaaatgtgccaaaggatgcgacgacccacagcaaattctggggcaggggctggacgggctatacctttgatacagacttattcccggactacaagcagttctttcgcgacttaaaagagcgggggcttgctattaccatgaacttgcatccccatgacggcatccgctattttgaaaagcaatatcctgccatggcaaaggcgaatggcattgatccggcaagcaaggagccggtagaatttgactttaccgaccggacatttgtagattcctattttgatctggtcttacatccttacgaagaagatggtgtagatttctggtggatcgactggcagcagggtcgcaagtccaatcgtcaggggctggatcctctgtggctgctcaaccattatcataccttagatgccgggcgggatggcagaacgccacttatcctttcacgctatgccggatgcggctcccaccgttatccgctgggcttttcgggcgataccatcgtgcgttggaagagtcttgcctaccagccgtactttaccattgcagcatcaaatacgggttacagttggtggtcacatgatattggcgggcatatgggaagcaagggcaatccggaactctatacccgctgggtacaactgggcgtcttttctccgatcaaccgtttacactctacccgggataaatggagcaaggaaccatggctttatgggacagaggcagaaaagatcgtgaccaagttcctgcagttgcgtcaccgcctcctgccatatctttatacggcaaatgtcaggacggcgcgggaaggacttcctattgtcatgcctatgtattatctgcatgactgcaaggaagcctatgaggcaaagacccagtattactttggcacggaaatgatcgtggctccggttgtgaccaggcaaaataaagagggattggcaccggtcagtgtctggctgccggggggcaagtggacagacttctttaccggtcaggtctttgagggcaatcatacctatgaactctttgtgccgctggaccgcataccggtctttgtaaaggagggcggtatcgtgccgcttcttgccgattacaggaataatgatcaggaatttagatctctggaagtgtgtttatatgcaggtaatggaaagtatcgcctggaagatgaagcaggcggtatcgacttctccatgcaaaagacaaaggatggcatcgagatctttgtcacaaaagaggagacctgtcctaccgaaaaattggcgatccgggtcattggggcaagcgatacggtttatcatgtgcatggaaatatggaatacagcatacagatataagtttaatttcatactattttagtaggcgatagggagtacatcctaaatgcatgtaggaatacgggaaatgtacaaaatacaggacatgagcgtaaaaaaaggcataaaaagggtgtatttcctatctttatgtggtaatatatcttcgtgtgccgcagggacgttccatttgccacaaggagtgtcccatttggcgcaaatagccaatagggacactccttgtggcaaatggaacgtccctgcgag

SEQ ID NO: 12627 - DNA, 469 bp, Unknown
  gut microbiota DNA sequence
gacgatctacgcccggtgtcttatagccgcagttacagatcagatcgatcatctcatccaaagtcaactgatctaaaaatgcctcctctaatgatggatccacagccacttcctgcagcatgatcttatcctcataaatcgctccgatcgtcggtgccacggcatccgcatccgtttccggtgctacagcagcatccatatcactgatatcaaccggacaggtctcattgacaggtgtggtcggataagtccccaccggatccattcttgacagaaccgtcatctgatcacagaaagcatccgaaaataaattcttgatctctgcaccggatacttcatccgttttctttaccagtttttccccaagtgcataagagaaatcacactcactatcttttacatcatgtgccacatgcaccgtataatcaccggcatctaaaatatatgcctgttcaccgtcagcatcata

SEQ ID NO: 12628 - DNA, 720 bp, Unknown
  gut microbiota DNA sequence
ctgcaaaatcaaacagagaatagagaaaattaatgccgtttttgtccatgccgcctgcaccttagacccaccatttccatttaagatggccggtgtcataattgataagagcaatcctgcaagaaaggcaaatatgcctctcacagaactaactttagatctgtcatccggatccaaactaaaacgggataacatagcatgataactcagattattgattgtataaaaaacaactgtcaaaaggaaatatgtcacgataacccatactgtttttgcacctaaagacgcctgtgaaggcacattatagaccaataactgggttacaaccaaagggataatacttgcaccaaaccatggtcttgctttccccattttcgtatgagtcttttctatcataatcccaaataggatgtcgctaacgccatcaaataaacgtaagattaacatcattgttcctaccatacccgcagctaataaaacactgtctgtatagtataaagtcagccaggaagagcaaaaagtccatacaaaatttgatcccagatcacccaatgcgtacgccagtttttcccctccacttgtcacaccataaggtttttcttgtttatttttcgccatagtgaaacctccttttaccatcatagtttcttaaattcttttactatataatcccacgcctgctttttctcttctgctgtcttaccttgtttgctaaaaagc

SEQ ID NO: 12629 - DNA, 944 bp, Unknown
  gut microbiota DNA sequence
gccgaactttctgtctcccataattcctttaatgtatagtccggtgcatactggattggaactgctgccacaagattaatatcatctccgattgcttggttcatgatttctacagcctttggattagataccagttttccgattccggtaatcacattccagccaaaaggatcatggcaaatcacttggatttccttcgataaaacaatatctctggacgaatttccaactagaattctataggttccagattctgtcacaaactcttccaaagcagtgtgataatgtgcaagatcctcctttgacactgtcagcgtaacttcagttttttctcctggctgcagatatactttttggaatccttttaattctttttccggtttgtcaaaggatgattttggagaggccacatataattgcacgacttctgctcccgccatattaccggtattttctacagaaacctttaccataatatcttctttttccacgtccgtatcttctacctgcaaatcagaaaatgcaaaacttgtatatgaaagtccgtaaccaaatgggaagagcggttcaatctttctggcatcataccatcgatatcctacatagatgccttctccataccagacttccttgttctccccaccatagttcttgtatgacggtgtatcacaatatgcttttggccaggtatccgtcagttttccagatggattgtacaatccaaaaatggcatctgtcacaacctttcctcctgcctgtcctgcaaaatatgggcacagaattgcattacagtcctgcacatattccgtaagtgtaatcggtcctgacgagttgcagaccagaaccagttttctattatgctcttttgctgctttgatagcattttgcagagcctcctgatcctctacatccatatccattgttaatcggtctgccccttcctg

SEQ ID NO: 12630 - DNA, 1364 bp, Unknown
  gut microbiota DNA sequence
catataaagttgtatcttctgatggtgtttgatatgacacattttcgcttcctaatatttccactgcccggtcatacggattgctaatgaaactggaaggtaccttgccgcttccttctgaattagctgcaaattgttttgcccgctttccataaaaacaaatctttgtctgctctgattgaaccggaagtgtcccgtcattcttaagcagaatcattgcttctctggctgcattttccacaattttctttgcttcttctaaatcaaatgacacctctttcttctcaagcatgccactctttaaaatcacatacatgatgcgacgacaagaatcatttaagacttcttctgacaaacttccatcagcaatcgcatccaaaatgcactgaataccacgaggtcctggcatagtaagatctgttcccgcagcgagtgcaggaacctgttcataagaagcgccccaatcagaaattacacaccctttaaatttccactcatcttttaaaacatctgtaagaagccacttattcattgcgcaggattcatcattgatcttattatatgcactcataacagtaagcgctccggcgtcaatacatgctttaaatcctggcagataaatctcacgaagtgcccgcataggaatcttttcattaatcttcaatcgatccttttcctgtgagtttgctgcaaaatgttttggatcagcaataacaccctcatcctgtaaaccacagacaactgcctcggctatacggctgaccaaatatggatcttccgaataactttctgtaaggcgaccacataacggatccctatgaatattaatatttggagacaaaatcaaatccacgccatatttaacaaattcttttgctactgtttttgcacatatatttgccacgtgcggattccaggtgcttgcctgggaaattcctgtaggataactgataacgtcatgcgtcttttgtctctctataccagctgctgcctcttcttttgcctttttttgcatttcgtttaccgtgaccaatagtccgcccatcgtgccaaacgactctctatcaaatttctctccttttttcttctttgcagcctccagcgcacgatatgtcttttctactgtatactgaaaaatatttaagccattacaacagtcactcgtccatatactaggaattccatacttttccattgccatggaactcatcggcgatcctcctatcaccagacttgctttctcgaccaatgacatctcattcagtatcatttccacagatgccatatcttttaacttagttcccatagttttcctccaatacactttcattgtccaatgaattatttattctaatctcattatg

SEQ ID NO: 12631 - DNA, 1527 bp, Unknown
  gut microbiota DNA sequence
gtaagaaacagactgcctatgaaatcatagccgtctgcaatggaaaagaaatctttcataccggtaaggtagtctctgatgctatgacccatatcccatacaccggagaacctttgcaaagcagagacatggtgacatggaaggtcagactttgggatgaaaaagatcaacttggagagtggaacagcgccacctttgagatgggactattggaggaaggtgactggctggcaaaatggatcagtggagactacaagccaaagaaaaaggaacgctatccggtagattgttttaaaaaggaatttcagacgaaaaaagagataaaaaaggccaggctttatgcaagtgcgcgggggctctatgatgtctgcctcaatggaagccgtctgacggactttatattggcaccgggtatgacagattacagaaaacgtatacagtatcagacctatgatgtgaccggacttttgcaggagaagaataccttagaattacgtctggcagacggctggtatcgtggcagcagtgcagcttatggcgcgaccaatgtatatggcagtcagaccagcctgatcgcacagttggagattgattatagggacggaacgcatcaggtcattgcaacagatcagacgtttgcatggagtaatgatggctcgatccgttttgcagatttaaaggatggagaagtctttgatgctagaaaaaaaccatcctatcagggaaaagcagtcgagatcaaggattctgccaaaaacaagccgcatttacaggcatctggtaatgtggcagtacgtgaaaaagagacttttcacccccaacttctgattgcaaaagatggaaccaaagtccttgatttcggacagaatattgccggctacatggcgttttctattcagggtaaacaggggcagaaacttgttttgaaatgcggagaaattttggataaaacaggaagagtggaactttccggcgtgcaggaaacccgaccggcagaagggtggagccagataggtcttatgaaaaaacttatgggggcaccgatcaagggggcaacagaagttacaccaaaacaggagatcactttcatctgcagcggcaatgaggactcctacaagacatcttttgcagtttttggattccgttatgctgaaattgagacagacatggtcattagacctgagaattttaccgccattgcagtatattcggatatggaaaccgtgggagcatttcactgttccaatccaatgattgatcagttgtatcaaaatacactttggagtatgaaaggaaacttcttagatctgccgacggattgtccgacaagagagcggctgggctggacaggcgatgcgcagatattcttcaataccggtgcgtatatgatggatacagcggcatttttcaaaaagtggcttggagatatgcgggatgcccagtataaaaacggaaccattccggcagtccttccttatcagggagtagagatgatgtacaagatgacaggtgtgtccgtgggttggg

SEQ ID NO: 12632 - DNA, 13870 bp, Unknown
  gut microbiota DNA sequence
tgattccttatcgttattataaaagatatggcgatgtatctgttttaaacgattgctgggaaatgattgaaaaatatgccgaatatctttggaaacatttgggactatcggataaaaaagcggcaaaaacaaatccatacaaccaattcacctatgaaaaaggggtacatctgggcgagtggctagagccggaagaattccgagatactgtctatggaccgcaggaaaaacatccggaagagtgtacagcctatctttatcttgctatgacaaaaatcggcgagatcgcagaactccttggaaaagcagaagtcgcagaaaaatgccaagagtatgcaaagggtgcaaaaaaagcctatcatcatctgattgtggaaagtgaaaagttacataccaaccgtcaggcaaaactggtacgtccgctggcgcttggactcttggatggggcagaaaaagaagatgccgagaaggaattggttgaggcagtaaaaggctatgcgtattgtgttggaacgggctttttatctaccccatttattcttcctgtattagcagatgccggagaagtagagactgcctataagatgttggagaatacaagaaaaccaggctggcttggggaggtggcagatggagcaacaacaatctgggaaaactgggaaggtgacgtcagtcacaatcattattcaccgggcgctgtctgtgaatggctttttagcggcgtttgcggtattcaggtagaaggggaaaatcatttcgtgatcgcacctttaccgggtggcagtctgaccgatgccagtgcatcttatcagagtatttatggaaaagtgtcggttgcatggaaaaaagaggagaaaaacatctcttatgagattgaaattccagcgaatacgtcagcattggtacgttttccagatggaagaaagcagacacttggcgccggaaaatatcatttatagataggcttagagcgaaaggttttgccttttttatatgtgtcatatcttgagaaaagcggatgaatgctttagtatagcaatcagagaggtatgaaagcagatgaaagatgtaaaaatggatgatgtgcgctttgtcttggaacgttttttctacgggtggaaaatgaacgctatcgtttttgatgccgatggcaaacttgtggactttgttatgggaaccagggaaaaggtggatttttcaaaaaaagaggaactggaaggtatcatagatgtcgaggataatgacttatatgatacaatccatagcaaggcagagaaggcaaatgcgccaattatccatgtggggcaggatggaatttactatctggcattttgggatgatgagaaacgattctttctttttggcccggcggcaattgaggaattatcttttgcccaacaaatcgcctatcgaagaagacatcagataaaaaaacagggctatctggtgccaaagataccgctggcatcctccttgaacggtgtggcacttgtctattacacgctgacaggaagacaggtgacggagagacatatctttgaagcaagtcatctgaaagaaggggatattgatctgaaacaggatatgatggtctatgagacaaaaaatactgtggaagagaagcagcaccttgcatatcaggaagaattaaactggctgagtcggattgaaaatggtactttaaagacactggatgatcagatgacaccggaaaatctggaaaagatggaacgcattggtacactgactggcggaaattctatgaaacagtatgagtatatggcagtgacatcggttacgctcgcttcccgtgcagccattcgtggcggtgttaatgcttatgagtcttatcggttgagtgaactatatatgcagaaaatctcactttgtaccaacgctatggagatattgcagattcatatgcgggcggttttaaaattcgcggaattggtgcgtcagtcaaaggaaaaccgtaattatgactgtgtggagcaatgtaaggattatattgcaagacatcgtacccagaagttttctctggaaaaggtatccgaggcggttggaaagaatgccagttatctctctcgtctgttttctgagcagacaggcatgactatgcaggattatgccatggatgtgcgcctggaaaatgctgccaacctgcttcaatattccaatgagtcgatcggcgagatcgcggagtatttgaacttttcatcgcagagttatttcggcgaaaagtttaagaaaaaatatggacagacgccggtgtgttatcgacgtgatcacaagatacgtgatttcgtggaataaaagtagtttttatattttggaaaaataaaagataaaaaagcaaatataacgataactatataggggttcctttgttaacattagtttaacaaaagggattcctattttatttcaaaggaagaaggagaaaaagtttatgggtaaaatgatgacaaaactctttgcaaagccgctttttgattctaagatcaaatcggcaaacacagagggcaaagaaaaagtttggggttattttgtaggaccaatgtttatgtgtatggcgtattatggtattgccggtacttatctgacacagttctatacggatgtcttgggcttgagtggtgtggtacttaccatgatgccagtcttttctaagatctttgatgccattaccaatatcatcatggggcgtatcattgataagacaaagaccagacagggaaaggcaagaccttggattttaatatccggtgtgctgatcatgcttaccggtattatgctttacaatgtgccaagggcaagccaaagtgtacagttggtatggattgtcattagttacaatcttttctttgcctttgcctataccatctacaatatgtcacatacgttgatggtgccattggcaacaagaaatacaagacagcgtgacagtcttgctatgctgacatccactggaacatctatgattccgggaatgctggttactatcattatgccgattctggttgccaagatgggcgttggactgtctgcacagggcaattgggcaaaagttatgagtattatttctatctttgcccttcctgcggtattggtggaatactactttacaaaggaacgtgtaacagaagaaaacatcagcgatgatggtgagaataccatgcagattgctgccatgaaagatcagatcaaggcatgtgtgaccaacaagtacttctggatggttatggcattctgggcaattttccagttgacacagaatctgcagacaaatgttatgctttatttctgtaactgggtattgggaagttcggttacgcagggcgcgaccaatcagattctggtaaatgctgtcggtcaggcaccgcttggctttggtatctttattctctggccgttgatccataagtttggtaagcgctgggttacccagattggttttgtaatcgctgctgtcggatgtctgatcattttcctgaatccacacagtcttggtacggttttgggtggatgtgtcctgaaatcctttggtatgcttccaacttatgccatggcagcatttttggcagaggcaatggatcatatcgagtggaagaatcactatcgtgcagatggttttatcgcttctatgaacacgatcattattacaatctccgcaggtattgcgcagactttgattttgggtggacttaacgcatccggatacatatcaccggcatcgatcggagctacatcagataccattatcaaccagccggcttctacacagtcctttatcatctggatgtttgtaggtgtcgaaatgatcggatatctgatcatttccctgatctttaccttctatgatctggaagcaaagattccgcagatttctgctgatatcacagcccgtcataaggcagaggcagaagcacgcggtgaagtatggatttcaccggaagaaaagcaggcaatggaacaggaagaacaggagcgtaaagcagaagagaagcgtattgaagaattaaaggaaaaatgtgctaagaaggggctgaattttgacgaagaagaagcaaagtatcaggcaaaattagccgaggcaaaagcaaaagcagaggcaaaggctgctaagaagaaaaagaaataataggagaagatcatggttcaaagtatgaatgacggatggctgttttataaggagggagataagcagaaacaatcagtgatgcttccccatgatgccatgctgcatgaaaaaagagatccaaaagcagaaagtggaagtgccggtgcttttttcccgggcggcgtgttctgctatgaaagaaaaataatgttgacggaggatcaggtgcaaatgcacctgacccttgaatttgaaggtgcatataaaaatgctgaagttttcgtaaatggtcaagaggtttatcaggctgcttacggttatagtccgtttttcgtcatcttggatgggcacatcaaggcaggagaaaatacaattcttgttaagacggacaatagccagaaaccggacagtcgttggtacagtggtgccggaatctatcgtccggtctggctacatatccaacccaaagatcatattgccatcgaaggcatccgtgtaaaaacggtgtctatagatcctaccgtgatggaagtatctgtagagcgcaccgccggcaaggtgcaagtagaaattatcgatgcagagggcaagcaggccgctactgctttattagaaaaggattctgtacagattccgctaccaaaggcacatctttggtcggaggagactccctatctgtatggtataagagcatcccttctgggggcagatagctctatcctggatcaggcgaaggacacctttggtgttcgcctgattacatggagccctaagggattttttgtaaatggaaaagaaacgcttttgcgaggtggatgtattcatcatgacaatggcgttttaggggcttgcacctatgatgagagcgaaatgcgccgaatccgtattttaaaagagaatggctataatgccattcgttgtgcacataatccctgttctaaggcgcttcttcgtgcttgtgatgcgcttggcgtctacattatggatgaaacctgggatatgtggtatagccacaagtccaaatatgattatgcgacagagtttatgagtcactacaaagaagatttggaggctatggtcagacgggattataaccatccatccgttgtcatgtattccattggcaatgaggtcagcgaaccggcaagtcaaaagggagttgccctatcacaggagatggcagactatctcagaaatctggatgaaacgagagccgttacggcaggaattaacctattgattgtcaagtcttccgcagaaggtaaaggtgtctataaggaagatggcggaagaaacgacagcaacgaagccaaaactgccggtatgagcagtaccatgtttaacatgatcacatccatggttggaagcggtatgaatagggctgccaatggaaaaaaggcagatgatgtaaccagcccagtatatgcgacgcttgatatttgcggatataattatgcatccggtcgctacgcaaaggaaggacagattcatccgaatcgtattgtggtaggtagtgagaccttcccacaggatattgccaaaaactgggctatggtcaaaaaatatccatatctgatcggtgattttatgtggacagcatgggattatatcggagaagcaggcgttggcacttggtcttacgaggcggatgcaaaaggttttgacaagccttatccatggcttttagcagatacaggtgcatttgatcttttgggaaatccgaccggagaggcaatgtgggcaaaggcagtctggggctatgccaagcagcctttgattggcgtgcagccatgcaatcatccaaacgaaaagatcattaaggctacctggcgtggcacaaatgccattcctagctggtcatggaaaaactgtgatggtaataaggtgatggttgaggtctatgcagttgcttcaaaagtagaactttttgtcaatggaaaatccttgggatgcaagaaagtaaaggatgcaagagccatctttaagactacctatgtcaccggtaatgtggaggcggtgtcttatgatgcagccggcaaggagattggcagaagtcgtctacaggcggcaaagaacgcatcgcttcatctactgccggaaaagaaagaggtatctgtgggagaaattgtctatgtcaaggcagtgctcgcggatgattccggcaatgtggaatccaatcaggatagcaaggtacaagttaccgtcgaaggcggagaattgcttggctttggcagtgccaatccaagaacggaagatcgctttgatgccggggaatatacgacatactacggtaatgcactggcggtcatccgggtgacggatgctcgtgctgttacgattaaggcaaagaccgcagctggcgagcagactagttgttcgataccggttatgtaaacgcggacagagcaggtgcatctcgcatagaaaagcagtttgtgatcagacatgatagattgtcttcacaaactgctttttactgtctataaatagaaggggcttatttaggcctgtgtccgcttacggatgacgcgatacatatacttgatattctggcgaagtcgattttcgctaattgtgccatttttaataccttcgataatcggacttacataggtatcgtccgtagtgcctggtgtcatccagcagttgcctgcggcaatggctttggcaacatcagcggtatcgtaactgttccagtctgtcattacatagccattgaagccgaattcgtttcggaagatgccctggatcatctcttcgtcctcggctgtaaagacaccattacatgcattgtaaccggtcatgatagaatccggtttgtggatgtcaaaggctacctcaaaggtgcgcagatagagttcgcggagggcacgctgtgagacgatggaatgattacgctttctggatgattctgcattgttacagcaaacatgtttaatggatgcagatacgccattttcttccaatcccttgcattgatttcctgccatgatgccgcccagcagcggatcctcagaaaaatactccggatgacggccgcagagtggattcctatgcaggttcatggccggcgccagaatcatctgcacattgttttctctggcttcttcggcaatcacgcgaccgacttggtaagccagatcaggattccaactagcacagaccagattagaggtaggcataccaatatttggtttgttgatattgacaccattattgccgtctgcaacagcaaaataaggaatatctcgtccttctaattgatagattcgtccggcaacgccgacatcctgcataccccagccggaacttgcacagacagagaagcgggctagttcctcgacagaccagtcatcgataaaggaatcgtcgatggtttctgtatccgggatgtttgcacggatggtcttgtgctgaagttcatgcacgtctgcaaggataccactctttttgccgctaggatacgtgttttcatcctttttggaaaggcgggtaaagtctaccggtggtttcatataatcaccaacaattttgatggtctgggtttctgttgctgtaatggaagccacttctgtgagggcatggatgtcatccccgcaatagaaatgatattcgccagcctctgtgataaaggcatgcctttcttcatcgtaggaagcaaggttttctacaggaacgtccagtgttaaaatctcggaggctccggcggcaagcagtgatgttttggcaaaggcaaccagacgcagtgccggttgctccagtttcccatccgggatggtggcatagatctcaacgacttcttttccgcttacctttcctgtattggtgacagtggcagaaatggaaatatgagataagtcctgtcccgtgcataaagattggatggcaaagttggtgtaggacagaccgtgtccaaatgcataggcgacatcttttttgaacgtttcaaaataacgatagcctacatagatatcttcctcatacacggtatcgatccagatatcatcatctgcgccaacggattcttctgcacttggtgcaacatagaagttatgtgcagaaggaatatcaaagtaatcgagactccaactatccggaagtttaccggatggattggtcgttccgtttaagatatttaccagtgccttaccgccaagcatgccggaaaatccggtccagataacagcctcaactgccacgtccagtgtccagcggacatccataggatagccggaattgatgatagcaattatgtgggcatattttttcttggcttcgcaaatctgtttttcttccgcatcggtcagataaaactccccctgaaaagttccgttgtcaaagttctctccggatgcgcgtgagattacaaaaagacaggtgtcggcatcttcagtgaggataaagttactgtctgccaatgcctgtccaaggcgtacatggtagcgcggattgatctttccggcaccgacagcaccgtcacggaaattttcctcaccgatcacggcgagtttagcatctttgacaaggggaagcagtccattgtcattctttaagagaaccatgccttcctcagcagcttccagggcgatggcttcgtgggtagcgtaggcaggatccggcagatttttagcaaccgtggaaatgatataatcctgtggatccataacattaccgtcggtatcagtaaatccttcaaagtggaaggtatagtctgtgccgtattgggtgcagatgtcgcgaacatagacgcccattaactgcacaccgcccgcaatagacatggtggaaagaatgtatttgacaggaattccatcgtaagtgacctgacctttgatatgttcatctatcggtttggaaaaggaaaggatgaaacaaccggaaaaggcatgattgagcatatacatcttgccatcgacatcatcaatgtcatattgtgccacggttgaacctccctttaggatgggcttcttcttacttggatccaaaggcgtcagatccacgtccgctccatttgccagcgcgagtatggcatcagcaagttgtgcagattccggttgtgcgacttttaactgtgccagtgtaaggggtgtcaggtagcccttggcaggaccgctaaccatctgtggtgcggctttttccagaagtgccatgacctggggcaactctaagagttctcctatgcttgtgttttctgtgtacataaaaacctccttgaataaataaattctacctaaagcatattgcagaaaaagaaaaaatggaataggataaaatgacagaaaaatatgcagaaagtgacatgtatatcaacagaggtagaaaacatgaatgcatttgacgaggggaaaaaagaatcggaaagcagggacgactatatgagacagaaagaggaaatgcaaaaggagtatgggaggatctttcgcagtctatgttccggggattgcgagattttggagaacgatgactatattgcctgcatgatacggacagcccaatgtctgaaagaggagaatgccagggaatatcgctggcaggcatttgaaacagtcagcgaattgccacaaagttataggacacccttggcacaattgtttctggaagtacaaagtgaacctgatcaggatgcgcaaaagcgtctgcaggagatcttccgtgtacagcaggaagaaatttttttacaaaatgatagcagtatttcatctgcctttttgcagccgggcatgcttccacactggcataagaataattatttcgatattatttatgttatggagggagaaagtcagtgctttttccgtaaggagaaactagaactcgttgagggggatgtgctgatcgtgccgccggatattgagcatggagaaggcgtgcgagatctcgatggcaggacgatgacatcagcgatccgcaagcggacctttttagagattttctttcgggtattttccggcaatcacttgctgtattctttctttcagcgcatattacaaggggatgaagatgtgagttatattctgtttcatacggcagaacaagacgtgccggatgtgacgattgcgtatttgtttgacagacttttggaggaacagaaatgcaaggaaaaataccacagtgagatgtgtgagactatcatgaatgcgatttttgtgcacttgcttcgctattatgaacagaatctggtttttccacaggactgtaaagccaactggaaaaaggaatatgctaagattttttggtatattagtgagaattatcgcagtgtgactctggaagaactggaggataggtttcattatagcagacgccagttgatccgcattgtgcagaatgcaacagggaaaaattttaaagatgtgattcgcgatatgaagatggaacgagcaaagatgcttttgcgggataccacactgcccgtggaaagaatcgcaatggagtgtggatacgagaatgcatccagttttaccagaattttcaagcaaacagtgggggtaagcccccacgcttaccgacatggaatattcgtgactttaccacagtaaaaagttttgctatactaaagtacaatagtgaaaatgctaaggaggcaaatgacatgagcaagattatgatgaagacaccactggttgagatggatggtgatgagatgacaaggatcctttggaagatgatcaaggatgaattgttactgccgtttatagatttaaagacagaatactatgatctcggtcttgaatatcgtaatgagacaaatgatcaggtgacaatcgattcagcagaggcaacaaagaaatacggcgttgctgtaaaatgtgccacaatcacaccaaacgcagcgcgtatgcgtgaatatgatctgaaagagatgtggaagagtccaaacggaaccatccgtgccatcttggacggaacggtattccgcgcaccgatcatcgtaaaaggaattgagccttgcgtaaagaattggaagaaaccgatcacgatcgcgcgtcatgcatatggagatgtctacaaaaatacagagatgattgttccgggaccgggaaaagtagaacttgtttatacggctgaagacggcagtgagacgagagaagtggtacataactttaccggcaccggtgtcgttcagggacagcataacctgaatgattctatcgaaagttttgcaaaggcttgctttaactatgccttagatacaaagcaggatctttggtttgcgaccaaggataccatctctaagaaatacgatcatacctttaaggatatttttcaggagatttatgaggagtcttataaggataagtttgccgaggcaggcattacttatttctataccctgatcgatgatgccgtagctcgtgtgatgaagtctgagggcggttacatctgggcttgtaagaactacgatggcgatgtcatgagtgacatggtatcgtctgcttttggatctcttgccatgatgacctctgttctggtatctccacagggcgtctatgagtatgaggcggctcatggaaccgtacagagacattattacaagcacttaaagggagaggagacatccacgaactctgttgctacgatctttgcatggacaggcgcactgagaaaacgcggtgagttggatggcacaccggaactttgcgatttcgcagacaaattggaacaggcatgcatcaagacgattgaggatggaaagatgacaaaagatcttgctctgatcacaagtattccaaatccagtcgttttgaatagtgaggaatttatcaaagccatcagaacaaggcttgagggcatgttataggaggaagccatgattttatcctgccagaatctttcgaaagctttcggaagtgatgacatcataaagaatgtctcttttcagatcaatgaaggagacaaggtagccattgtcggaaataatggtgcaggaaaatcaacactgctaaagatgataacgggtgagttggataccgatgcaggaacggttgtttttgccaaggataccaccatcggttatctggcgcagtatcagaatatggaaggaaatgagacggtctatcagaccgtctattcttcgcgtacagatattttggaaatgcagaaaaacctgcaaaaaatggaagaacagatgacaaaactgacagatgatgccttagatgcactgcttgtccgctatcatgagatgcatgatgtttttgatcatatgaacggttatgcgtatgaatcggaagtacagggcgtgcttcgtggacttggtttttccgaagaggatttttcaaagacgatggatatgctttccggtggacaaaaaacccgtgtatctctcggaagactccttgttttgaaaccggacatcctgcttttagatgagccgatcaaccatttggatctgaattctattgagtggttagagaacttccttatgaattataagggaaccgttgttattgtagcacatgatcgttattttctggatcgtatcgttacaaaggttattgatatcagcatgcatactgcacatgtttacaaagggaattattctgcctttgccatgcaaaaagaagagattcgtaagaccatgatgcgtgaatatgaaaaacagcaggcatccattgcccatcagcaggaagtcattgataagttaaaacagtttaaccgtgaaaaatccatcaaacgtgcagagagccgtcagaaagccctcgataaaatggatgttatggaaaaaccgatcgatgcgcaggaacatatgaaattgtccttgcaaccagatgtgacaagcggcaatgatgtactggaactgatcggactttcaaaatcctatgatggcatgacgctcttttctaacgtagatttccttttgcaaagaggtgagcacgttgccatccttggtgataacggtacaggaaagacaacattgcttaagatcatcaatgagattgtgaccgcagattccggctctttccggctcggcgcaaatgttacgattggttattacgatcaggaacaacaggttttggatgatgacaaaacactctttgaagaaatgagcgatgcctatccaaacttaaacaatacaaagattcgcaatgtgcttgcggcattcatgtttttaggggatgactgctacaagaggatcggcgatctgagcggtggagagcgtggacgtatctcccttgccaaactcatgttgtccggtgccaactttttgatcttagatgagccgactaaccatttggatatggagtccaaggagattctggaaaatgccatcaatgcctatgagggaacggtgctttatgtgtcacatgaccgttattttgtcaaccagactgcagacaagattttagaacttgaaaaccatcagttcagcgtatatctggggaattatgattatttcatccaaaagaaaacagagcgtatggcacaggaaaaagcagtacaagacgcaaagcgtggtgatacagaatcgatttccggacaatctgaaggaaagacggattggaagcagcaaaagaagatccagagcgaaaagcgcaaggtagaaaatcgtctggcagaggtggaagaccgcattgccgcctgcgaagaagacctgcgtcagatcgaggaagaatttgccaaggacgatgtggcgacaaattcggcaaagcttaatgaattatcacaaaaacaggaaaagttacaggaagaattggatgccctctatgaaagttgggaagaattgtcggagacactgacaaatgatttcgc

SEQ ID NO: 12633 - DNA, 699 bp, Unknown
  gut microbiota DNA sequence
agggtattgatcaaagaaaggacatctgcaccgcctgcttctgccgcgcgtgccatctccgtaatgtctgttacattcgggctgagtttcataataaccggctgttttgcatgctttttcacttctttggtgatcgcctctaccgcctttggatcctgtccaaaagcaataccgccttctttgacgttcgggcaggaaatattgatttccaacatatccacacgcttttcctgtcccagacattccacaacctccagataatctgccgtagtctttccacagacattaacgatcaccttggtatcatagccttccaaaaaaggcagatctctctggcagaaaacatcaatgcccggattttgcagtccgatggcattgagcataccactgcgcacttccgccacacgcggtgtcgcattgcccggccacggcacatttgccacgccctttgtcacgaccgcacccagacggttcagatctacgaactcactatattcggctccggatccaaaggttcctgatgccaccatgactggattttttaaggttacccctgctaaatttacctgtgtattcattagagttccacctcctcagccagaaataccggaccatccttgcagacccttgcattatgcacatgagaatgtgcatctacttccttggtctggcagacacagcccagacatgcaccaatgc

SEQ ID NO: 12634 - DNA, 6199 bp, Unknown
  gut microbiota DNA sequence
aatttttataaaaagtccccctttaccgggagcgacggcaatatgcgctaccgcgtggaaaaaatagagttccccatcccggatacggaggatgaaaaagaagtcaaactgcaagccaccatctggccgggacctttcgcctttgctaagacggacgaagaaaaaatgacacgccagacagcagacttttccgaagaaggtctctgtgctcttgtcgactggctaaacgaaaaacaaccggagttttgatgctccggttgtctttatgtattcgttttcttttatctctttgcatgcatggaaaatgcatccatatcgtaatgatccagattttcatggataccacgctcatccgcttcggaaagaatcgtctcacggttctttttaaaagaagcctgtggacggaaagcactcggtccgccgacacagccgccctcacagatcataccctcgataaagtcttccggcaatctgccgaccttcatcaaaagcaatgccttcttacattctgcggcaccgttacacttgttgacggtcgctgcgatctcatcatcgctttctttcaaactctgcaaaactgcctcggtaacaccaccggaatttgcaaaacgcttgccgtagatggatgactcctgataagagttgtcgtcctcctccagttctacgtttctcgcatgcatgatggcacggatctcactgtaggtcagtgcatagtctgcattgccctcaatggcatgatccttgacctcggatttcttggagatacaaggtccgataaatacggtaaccgcatccggttcttttgcctttaacatacgggatacggcacacataggtgaaatggtcgttgatacattttcgatcagttccgggtaatgcttctttaccatgttgacaaatgcagggcagcaggaagtggtcatcttcttgccattcttgtatgcttctgcccattcctctgcttcgtaggctgctgtcatatcaccgccaagtcctacttccacaagatcggtaaagccgactgccttcatggctttcttccaactgttcatggtgatatgctcaccgaactgtccctcggtcgccggtgcaaccaatgcatataccggatgttctgacttgatcgccttgatgacatccacgataaaggtcttggaaccaatggcaccaaacggacatctgtgaatacaaagtccacagcggatacacttttcttcgttgatcacggaaatgccattctcgtcataactgatggcatcgaccggacaggagaacttacacggacgctttaaggctgcgatcgcatggtaaggacaagcctgggcacatttaccacattccttacacttggaagcgtcaatatgggaacgatggcgtcccatctcgatcgcaccaaagttacatgcgttgatacatgcctttccgatacagttctggcagttgtcggttacaacataactggagattgggcaatcttcacatgcagaactgatgacctgaacgatattgccatcgtcatgcatgcccggtgcctttccctctgccaggcggactctctggcggataatttctctttctttatagatacagcaacggaactgcggtgttggtcccggaatcaaagactgcgcaatgccgtccctcttctcttccaattcatctgcaaatgctaatttggctacttcataaagtacatcatgtttgatcttaattacattttcgtcagcatacatttggtatggttcctcccttttttcaatacttgtgtggttggtctgttacttttgtcaaaaaaataacaatcttatattggtaatataacacggctcagggaaactgtctataaatccacctcatgtactcgaaaaagaccaacaactaacgcagtctctgattgatcttttgcttggtcttcatatcatacatacgccggtctgccagcatatatactttttgcacggattcctttggacactcgctgctttttgccacgccatatgctgcctcaatattaaaggtcagttcgctggatctccgcttctccagacgcaccattttatttaagcactggtcgatcagtggaaactgttcctggcggactaagactaagaactcgtcgccgcccatacggaatacctcacccataccggaaaaggcatcctgtaagatggctgcaaattcctgcaagagtagatctccctggacatgtcccagagaatcattgatggtctttaaaccgttgagatccatgttgatcagggcatactccgcatctcctgcatccagttcgtcaaagcgctcattgcacttggtacggttgtaagtaccacagagttcatcgtgatatgcacggtcagccagccactcctgctctgcctcatgtaccagaatgccatagatgtagaagatataacttacgaccagcataacgataaagagcagggttcccaccggaatgatactgatggtcagaaattcattgtcctgcatgacatatttttgcagattaaaacgaaccagatcgattgccacactcacgcacaggatcactacaccgatatgtaaggctctttccgaacggtcacgtttttttctttatcatatccggtcagcgccaccaggaatagggaaatgccgccaaagaggtggaagtatcccaagagtctcggataatgctcgatattcaaaaagtgcaaaatagtcgaaactacaaagaacagtcccatcagcatagccgatgcatatgccagttgctgcttccagatcgccacatgctttcgcatttccgcgatcattaagataaaactgatcggtgccagatacagggtcaggtactccaccgtcgtgttggaagccagatcgatcttgaagatctcaaacaccttcatattgcccatggaccagatgcccatcaaaaaactaaagatcccgatatacaaaagacgcacatacaacttgctgtagcagacagcgaccgcactgacaatggtcatgactgctcccaataagatcaaaaagatccccacaaaggtactgagcagatgctgtcttgcaaactcccgatagacctcactggtcgctgtcaccgtcggattggtgatattggtaaaagcgtccggctcacgcacatttaaggtaatgacaaagtctttaccggaaacattgtccggcaggtctataaaatgatagccgctgcctaccaaccagttcttctcggcatactcctgtccataatgatagatctgtctgccgtcgatctccacatcgatcgtggacagataacacagaaatgtcatggtctgatgccgtgccatatccttagggaaacttcccatcaggacgatctcatcccccacttgtaaatgtgagaacttgtatgccgccagtgtgtcctcctgcgctaacgcttgtccgttcacgctgacatgccagccctctgccaactccatgacctccgatgatgtcgagtttttgcatagcatccatgcaaaaaataaaacccagatcaaagtcgccgcagctgacaagagtgccactatgagtttgaacgttttctttttttcttccagtcttgtccccatgatactgccccctactattatcctcttaaaagcattgtatcatatccctcccctgcgctccaacaaatacgacaatttttaggcaattttttatatttctttctataaatatgatatactccttgtatcaaagcaaaggagcatctcatggcaggaaaaataaagaaaaagcaccgcggtctgcgctttttgtgtggtctgatcttatttttaatagcgctcagtgtcatcggcactgtttttttattgcgccgcaatgtcactgccacttttactccggtggactatgccgagagtaacgaaactctggcaaatccttataccggctggtatcacacctatgagtatgagatctccgacgagacatcttttgatccatccaccgtggactatgcgttggttctggataattccacacgcctctgtcttgtccgcatcaacctcaaaaattatgccgccggtgccatatccgatcatggactggctgacatccgcgccattttgagcacctgggcggcgaccgacaagcagatgatcctgcgtttctgctatgatacgaccggcgacaattccatcagcgagccttccgacctgaccaccgtctatcgccatatggaacaggtgtccgacatcatcaatgactatgccgcacacatctaccagttgcaggggatatttgtcggtgcgcagggtgagacactctcatcgccaagtctgacggatgccacccttgccgacctgacagactactatgcttccctaaccgacaaatcgctctatctgggcttgcacgatgccgggcaatatttgcaggcgattggacagaccagtgtaccaccgaccctttttacttccgacaagacccttttctaccgtctgggactttttaacgatagcctgacgtctgccctatcaaatgcagaggcagaagccacatctacgatcgcatcctttgctccatgcggcggctctgtcgcggcagacccttcgctggcagacgcagccaccgccatccagatgcttcaggcacgccatatttcctatctgaacgccgagcagacggaaagcacgctgacatcctggaaaagccagacctacacttcttccgatgcctacaatggtcttaccctgtatgattatatgacgacccatctgggttaccgctatgtcctgcgggatgcagccctatcttttaacacctggaaaaacgaaagcggaagtctcacgctttccatagaaaatgtcggtttttccgtttcttacatgccatatgatgtgtgcctgctcatgcgcaatcaggacacggaagaaatgatcacccttccactggatacggataatcgcagttggaatccgcaggaaacgaccaccttaaagcagtcccttgccctgcgggattatgacaaaggtacttacagcctttatcttttggtacagaatccttctagcggagaggtcatcaaactgggaaataccatgcctctgacctccaacggctacatgatcggaagccttgtgatcgaataaatcagattttacagtaaaaagtttacaatttatccttgacttcatgtgtaaaaacagatagaatactatttgcgcgcaggagtggcggaattggcagacgcgcaggcttcaggtgcctgtggtagcaatatcgtgtgggttcaagtcccatctcctgcatcaaaaaaggaatccttttcggattccttttttcattatcaatataaatatttctgttcaaaatcatctacactaagcggcttgtcaaacagatagccctgtatcagatccacattcatatcctttaaggcatcacactgattcttgtcctcgacaccttcaacgcagacatgcatatgcaaagcatcagccagttgggaaacagatttgacaaaagcctccgaaaagacatcctctcccacatcctcaacaaagcacttgtcgatcttgatcacatcgatcggcatactacggatgtgattcagcgaagaataacctgttccgaaatcgtctaacgcaacgcgcacacccagtttcttaatctctcctaagacctcctgcatgcgtttcatatcattgatagcaagcccttccgtcacctcaagtgtcagattagaaggctgaacttctgtctctgtcagtgcattttttatcgtatcaataatgtcattctgtaacagttgaatgacggaaagattgacatttaccttatactccggatgtccgaaatcattccagtatttgcagcgcttgcaggcttcgatcaggacatgatagccgatctcattgatcagtcccagatactctgccaaagcgataaattccgatggcatcacaaagccgagtttcggtgaattccaacgcaccagagcctccgccccacagcacggacgctccggcttgctaatgtcaatgagaggctggtagtagacttcaaactctttgcagccctgttctaccgcctcgcgcatacatttttccatatccagacgttccacagaactggtgcactggttgttgttgtaatactcgactcgattctttccctgactctttgcccagtgcagtgcgatatccgcgcgctgtaacaacaaggagaggtcaatcccatc

SEQ ID NO: 12635 - DNA, 258 bp, Unknown
  gut microbiota DNA sequence
agtaatactctgtcccctgtaagagccatggtcttgaaaacagattctgtatatttcggatcatcgcatccctctgttcgatatgacggtttgtcacgatcactgcaaactcgtcgccgcccaaacgatagcagtgacctgccacaccatccatatgtcccagagcatctgccacattctgtaagagcaggtcacccacatgatgccccagcccgtcattgatatggttaaagtcatccagatcgatataaaggatag

SEQ ID NO: 12636 - DNA, 38855 bp, Unknown
  gut microbiota DNA sequence
ccctctccgccgcttcgcacggtcgcatggatctcttttgtcagatcctcctcaaaacgcatacggttgtaaaggcctgtcagataatcttcatttgcctgatgctcaatacgttcctgatagcgtttggtcttggaaatatcatagatcgttgccagacgcacctctttgccgtccacccagccgatctttgaaaacgtgatctccagccacttgtcactgcctgccacccgatactcatgaatgccttccatgccatccggggaaatggtcagcactttctccagttcgattcggtcttgctctgtcatgctcatttccttaaaggcatcattggcatataggatctggccggtctttaagtcattgacgctgatgccgcagccggcattttctaagatcgcatccagtgccgcataggaacttgccaatgaattttttgtgatccgtttaactaagatcgtctgcgtaatgcgcttgacgtcatttaaaaagcgcaagtcttctacgctccatttacggtcttcctccatcatggtaaagcacagatacatactgcatttgccattgacattcaaaggcagaaatacgccacagcggatctcatacctggtaaaatagtctaaaaatggctttggcataatcgtctctgacgagatcgtgtacggacgccctgtcataaaaggtacttctgccagcggcaggctgccgtaagtccgcatatgctcatgttccggcttatctgcccattcacagatcatctctacatgttcttcgtccacctgcaatttcaaaagactgccattggacagatgcatataagttcccacgcgttccaatatatcttccatgatctgtgcaaaagtgacatccgattccatcatctttaagatctcggtcagcacctctgtcttttgcaaaagatactccatgtgcttttcgtttgcttctaactgggcgatctcctctgcctgcgcagccagatggatcttgctggaaaaataattttttgtcagcacatccaaaagtgccaccgccgcatcaaaggcttttgtcgtcgttttacgcatgatctgcggcacttgatcttccggtctgatgcattccgcgtcgatagcaaccagtacccacgcaccgtcaaatctgccatcctcgtcacggatggcgattccacgcaactgcacacatggcatactggattcgaccgcgatcacatcttctccccctacatccgaaaaactggcgatcagatttcgctgcgttgccaccggaaacacgcggtcaataaagttctgctcttcctttgtaccagaaaaagatgtcagccggcgcatgtttctgctgacgcatacgcaatagacaccctgtgtctgacaaaactgatcctgcattgcctgcatctgttcctgatccagacaattcatgacatctttcttttgtaagtcttgttcctgtccctcatgatctgtatacataccctaccctctttttttcaaaatgtagatctgctcacgtccacgcataggaatctggcgtaccagttgaaactcctcatgcagacgtaattgttttttcaagatcccttcctctgttgaaagggcaaagaccatcgcctgatctgccgtgatctcaccggtcttatcaaaaaatctacgataaaattgatcgacttcttcccgctccttatgctccatgcgtgggaattccgtgatcacctcctccatcagatacgatgaagtaaaatcaaaataatctcgattgataaaataaatgttcttttttgccttctcggcatcctgtctgccataaaaaatggcttctccaaaactgtcaatgccatagacatcacgcgttcttcccgcctgcatacgttcgatcaaaagtgtgccaagaccgcagaaagggtcgatcacatgtgcttcttcttttaaatatggacggaccaactccaccatctctgccgccacgactggcgccatagaggtcggcaaggcatgctctcgataaataaaacgtctgtccgcctgtcctaagactctggcatacaccacataagtcccatctttcttttgcctcggcaaaagttcgatgaccgcatcttttgggcggttagcaagtcttccctgactgccttcctctatagcataggcaagtcgcttggtcgtcttgctgtcagcgtccatctgcatccgcagggcaaacgggtattttttctttttgccatagacctcctccaaaaggggaagaagttcggaaagtacgatcgcctgcgccagattttcttctgccgcaagggtctgaccgcgaaatcgaatgacaaagagcatttcccgatagatgcggatctggctcaatttatccagggagtctgtgagcaggcgtaccccacgccctaccatcctcgcatccgcatagcccagatcctgcacctgtgccaggagtgcctccctcatataaggatccgttgtaaggatcagagcgtgtttcttgtggataccctgataccggtagttttccttctcctggtatgcctccagcaaaagatccatctgctccagcaaaagacgcatatgttttttgtcttcttcccagatctcttctgcgcccagccgctttctctctgcctgcaggctttccaagatctctccacagtcgtaagccgaaagtcccttgatataagaagccagaacaaacttggtatcttccctttcataagccgcccagagtgcctgtgtgacctgacctgccatttccagtgcctgtacccggtcagaaagatctcccagcaaaagggctgcattctttctggtcttagcatccgcatgggaaagcaagtcccctaagcgtccaataaaggctgcgtctacataggtctctgccgcctttttatcctccttgatctgactgcgcagattgctcaaaagggatcttacctcttctgtttgtgtgatctctgtcaataattctttgatttccatgctctatcctaaattcttttcttctttatctgtccgctttgcggtccggtatttgcgcggcgaaataccataggtcttttgaaacaaccgatgaaaataagaaacattttcatagcccaccgccactgcgatatccgccacggtcagcccggatgtttccagcagatatgccgcctgacgcatacgcttttgctgcaccaactcggtataagtcgcaccggtaaaggaatgaatggcgcggctcagccaatacacatcataatggagcatctgcgccagttcggataattcaccatccttgtaatgctcctcgatataacgatataccgacatcaagagttcctgatttttattgtctttaccaacactgaccaagtcggtataattcatcagttgcagtagcagcaagcccatggtcgcctggttgatgctccgcttgttgggctgttggttatgtatggtccagatcagattctccataagattctggatgggcagcacccctgacacctgaaagtgcagataggagacatccgcatccttactctttaaacattccagaacaaacttacggatcaggttgtcctcctcgcccatcatagagagggcatagtcaaaaaaagccggtaagatgataaagttgacagcaatatcatcctcgcctgccggatagatctcctgcgtggcgttctggtttaaaaaaagcatttcaccggtctttaactcgatccgatcaccattgacgatatgcgtggtctgtccggaacacatatagatgagttccacataattgtgtgtgtgcgccggaaaatgcacaaagcgggtatgggtacggatctctatggtcttaccactctcgatcagccgcttgtaatcgaccatatgggtctccggctccatatagattccgcgatccacatcgacctgtcccttaagatagccctgttcttcatcgctgatctgtcttaattcattcagcagttcctgattcatctgactcctctaatctgcgccaatcttcttcccgcatcttgtccttcatccgatgttcctttaaatatcttcgcacaaagcataagaggacaatactgatggtagatatcagatcatccaacggtgttgtcgtcgtgacaacgatcatatgacgtgccactaaaaagatgatcgtctccaagacattatctgcggtcggcctgcataacattttcaaaaattcaacaccgatcacgaccagaaatacctgttctaaaaactccagcattgccccagccgttgaacggttctcccacaattcacccacatgtgggatcagcgcgatcagcgcgatcacgaccgcaataaaaacaaatatcgctgcgatcaactctaaaatgtgacacaattccgtcacccattttttgacataaccataaaccttatcaaacataaatactcctctttcatcttaaatcctagttatccaattaaatattatcgtattatccttacccacgtcaagcccattatatgcaggcttcctccagcgacccaaaaataaaaaagcccgatcagatcctgtctgatcgggcccttcatttatcctattctgcgatcttattctacaacctgtgtccatccgtaaggatcttcgatcttgccccactggatgccggtcaaagtatcgtataatttctgtgttaattcgcctgtcttggcatcgttgatgacaacaatatcatccttgtaacgaagttctccaaccggtgagataacagctgctgtaccggtaccaaatacttcttccaaagtaccgtcatgccctgccttcatcagatcgtctacagaaagacgtgtctcgttgaccttgtatccccaatcacgaagcaaatggatcatggaatctctggtaacacccggaagtacggttccctcgatcggtgcagtgtaaatctcgccggcgatcttgaacatgatattcatagtaccaacttcttctacatatttacgatgctcaccatcaagccagagtacctgtgcatagcccatcttctcagccttaacctgtcctaagatagatcctgcatagttaccgccacacttggtaaatccggtaccaccctttacggcacgaaccaattcatcctcaaccagaatcttaaccggatcaagtcctgttgcatagtatgctccaaccgggcaacaaatgatcataaacttgtaagaagatgccatatgcacaccaagcgctgcttctgtagcaaacataaacggacggatgtaaagagaagtatccggctcagatggaacccaatctgcttcctgctttaccagtgctctgactgcttctacaaacatgtcctctgggaatgccggcatacaaagtcttgcgttggaattgatcatacgtcttgcgttcatttccggacggaacaactggatcttgccctcagcggtacgatatgccttcaagccttcaaatgtctcctgtgcatagtgcagtgtcacacatgccggatccaattcgatcggtccctgtggtacaattctagcatcgtgccatccctgatccttgtcccagtccatgataaacatatagtctgtcatgtacttaccaaatccaagatgtttctgatctggcttttcctttaactgcttacgttcttcaaatctaatttccatgatttcttcctccatatattgcataatcgcagatgaaatcctgcaaaatttctctgtttttcttattatcttcctctttacaaggcttgtcaagaatacagtctataattatcctgcatttttcttaggcttttttgtatattttttcattccccacaggcaatggttcttgaaagcctttttcaaaaataatataatggtaaaaataagaaagatacgaagggagtacattatgcatacatttcaaccatatcctatgaatatgttagaatttaatccttttcaaaagatcggtagcgaatgggcagccgtgaccgcagaggcagacggcaaagccaatgccatgactgttagttggggcggtgtcggtgtcatgtggggaaaaaacgtagccaccatctatatccgtgattcccgttacacaaaggaactgatcgatgcaagcgatacattttctatcaatttctttgaagatgatcatatgcacagcacactgaattacctgggcaaggtttctggtcacaatgaggataagatcgccggagcacgtctgcatatcaaccacatgacaggcactccgtttttagacgaagccaaatttgtcatcctctgtaaaaaattatctgcgacccgcataacagccgatcagttcattgatccgaccatcgcagacaagtggtatgcggatggcgatatgcacaccatgtatatcggcgagatcacagatgtcttagtccgctaatatatgctcatacccaaaagcccggatgctgtttgcacccgggctttttatgtattactgttcgtttgagatcgtatcctgtaatttttctacttttccatgcaatctgccaatcgtatcggagaaatcctgaatggtgtcgtaaatcatgacagcaccatctacaccgtttccggatagttcagaaacacgattggtattttcagaaacactcactacactgtcaacgatcttggctgtgttattggacacctcattgacaccatcaatgataccatccaccatagtctttaacttaccgacattatccttggtctgttcaaaactgctgttgacatccgcaatcttggtattctgtaactgaatcccctctacgcagtgattcatcttttctacagattgatttgccacagagatcaactggttcataatctgtgtaatctcttccgtagagttcttggtctgctctgccaacgtacggatctcatcggctactacggcaaatcccttgcctgcctcgcccgctctggctgcctcgatcgacgcattgagggctaagaggttggtctggctggaaatggaaagaatagcatccgtgatgctggaaacgccctggatctgtgctaccagatcggtaatgatctgattggtcgcttcgatatctcccgatactgcctgtgcctgcgtgcgcatatcctttgaaaggacagcaccttcgctgactttttcatacacttcttccgcattctgctggacacgttctgcacttgcctgtgtttcctgcacgattgcataaatgttctgtgtcaattcggactgatggctcatttcctgactgttcacggaagatgcggaagaaatatcactgagtgcacccttattttcatttgcctgctctgtgatgtcatgcatgccatccgtgatcacatggaaattatccagaatgtcctgtgagatctgtcccacctgatttgccacctcgatggcttcattggtctgcttttggatctgatccatattatccttggttgcattgtagatacgaagtaccgtatacatgctaaagaaaccaaacagcatagtagagatcaactctatggttgcgtcttcccctgtcatctgtccctgtacagatcgatatccaatacttaccagattgatgatgactgttgcagtagtaccgcaagacaccagacggacattctgatacacaatcaaagcatacaccgttataaatacaatcggatatattttggctgctgatgtgaatgtcacaacaatataaggaatcagatacatgactgacatcttgatatgcgtattttcttcgcttcccttacacaatccccagaaagatgccaatataaaacataccagcataactaccatgcccggcgcagacatggtgtgcgtgatcagcatgatcagcagccagcctaggaaagacataccgtagatcatcacccctaatttatttgatctggcggtctgttccggtgtaagcgcaattgctttctttggtttctttgccataatttatacccctaccctttctagtacctgattattcttctatgttttctaacgcaagtcccaactcatctaactgtgcctgatcaaccggtgtcggagcctctgtcatcagacaggatgcatccttgaccttcgggaaagcaatcacatcacggatagaatccgcatgcatcatcagcatgatcatacgatccaatccaaatgccagtcctgcatgtggcggtacaccataagagaaggcatccagtaagaatccaaatctctcatgtgcttcttcattggtaaagccaagtgcattgaacattttttcctgcacatcgctctgatagatacggatactaccaccaccaagttcacaaccgtttaatacgatatcatatgccttggcacggacagcacccggatcactggtaagtttgtccaggtcttcctcataaggcatggtaaacggatgatgcatggcaacaaaacggttctgatcatctgaccactcaaactgtggaaaatccacaacccaaaggaaagcaaattcatttggatcatagagattaaactcttttcctaactgtaaacgcaaggaacctaaaacttcccatacgatcttattgcggtctgctgcaaacaaaagcagatctcccggctggccatccatagcagataccaaagcggcaagttcttcttctgtcataaacttggcaaaggatgacttgtaagtgccatcttcgttgatagaaagatatgccagtcccttggcaccacaacccttagcatgatctactaacttgtcaatctttttgcgggacattgctgcctgacctttgacattgataccacggacgcttccgccattttccaaagcaccggtaaatacgccaaaaccgcatccggcaacaacctctgatacatctaccagttccatgccaaaacggacatccggcttgtcagatccaaaacgatccatagcctcctgccaagtcatgcgcttgagcggaagtggtacttctacgtcaagtgtctccttgaatacgcgggcgatcagacgctcattaacatctaagacgtcttccatatctacaaaagacatctccatatccacctgggtaaattccggctgacggtctgcacgcaggtcttcatcacggaagcactttgcaatctggaaataacgatcatacccagagcacatcaacaactgcttaaataactgtggtgactgtggcaatgcataaaaactgcccggatgcacacgggacggtaccaggtaatctctggctccttccggtgtggatttctgtaagatcggtgtctcgatctctaaaaatccttcatcctgtaagaaagaacggatcacgcccataacacggctccgcatcatcagattcttttgcagatccgggcgacgcagatccagataacgatatttcaaacgtaattcttccttggtctggataccggcttcgatcgggaatggcggtgtctgtgcctcagaaagcacgcggagctgcgttgcaaacacctcgatatctcctgtttttaagttctcattgacggctgcggaacgcttctgtaccttgccgacgatagcaaccacatactcgctgcgcaaagttcctgccttggcaaatccttcgcttccgatcacaggctcatcaaagactacctgcatcataccactgcggtctcttaaatcaatgaagatcagacttcctaaatttcttcttttctgcacccatcccatcagcgtaacttcctcgccgatcatagtgttatttacttctgtacaacggtgacttctgtgaagcccctgcatagactctgccatgtttcttatcctcctgccttagtctctattgaaaaactctacgaattcttcgtagccttctttttgtaattgttctttttggaactttttgttcttgttcatacgaacgacctgtacctgttgtccgttttctctggcttcttttgcctgctttaagacctccgtcagtttctctgccgggtacttcttttctaccagataagccaccttctttgggcgctccggaatctcaaatccctgctccatcaaaagtaagatgatacgctcaaatccaatggaaaatccgcaagccggtacattctgtcctgtaaacttgccgatcatttcatcgtaacgaccaccgccgccacaagatccgccaaattccgggattgcgatctcaaagatggttcccgtataataactcataccacgcacaagagtcggatcaaataccaaagcaaaatccgcagccttagccgcctcaaccgtctgggcgatctcacgcagattgccggagatttcttcatctaaatatccacccagggtctcctgtaaaaatcctacgccctcagccacgtttttcttgtctgccaatgcatcaaaaagtccaagatacttatcgacgctttcctttgcataaccattttccagaagttctgtagaaacgccctcgctgccgatcttgtccatcttatccagtgtgataaaaatactgtcgtaatctttttcttcaaaaccactgtaggaagccatagcctttaagatacgacgttcattgatacggatctcaaagccggaaaatccaagacgccccagtgtcgtggtcgtagcaaggatcaattcgatctctgccatattggacggctcgcctaaaatatcaatatcgcactgggtaaactggcgatatctgcctctctgtgggcggtctgcacgccatacattaccgatctgcaatgccttaaaaggacttggcagatcattggcattattagaatagaatctgcaaagtggcacagtaagatcataacgcataccaaagtccaccacatcgttttcttccttcgcagtgtccaaatgcaatttttcgcctctttttaacaccttaaaaatcagtttttcattttcgccgccctgcttgttgctcaggtttgcgatattctccatacaaggtgtctcgatcggtgtaaatccaaactcacgataggtcgtcttgatcacattggtcacgtaatcacggatttccatctctcttggcaaaatatctttcataccattgaccggtttcttacttaaagccatttcatttcctccagtatttacattttcatttcattataatccgtattcttttaagaagcaacttgatcgttttataaattgcagaaggacgcaaaatcacaccacacagtctcttcctttttgcttggcctgatataacttgtcatctgcacgactgaacaaggctgtaatctccatatccgctacataacgctctataccgcaactgaaagtaaagtcttctccacacttttgtctgccaaaggccttgtaatcctgacgcatcttttccagtagatcgcgcacctgctcctctgtcatttgcggtagaaccagaaggaactcttccccgccaaaacgtaccgaaataccatcgtccggcaggtaacggttcataatatccgcaaatccaatcagcacttcatctccaaaaaggtgaccgtatttatcgttgatctttttgaagaaatcaagatccataagtgctgtataaaaatccgcatgcgctgctcccatgatcttttccatgtaatggttgagatatctgcggttgtaaagtcccgtcaaggcatcatgatctgccgcagaccacacagagaatcgacggaaccgtccatccatatatgatgacattacctaaaaatccaagcgtatttccaatgcatccggctgctccaagaatatgaaattgctgtagcccgacattctctgaggcttcaaatcttttctcatcttttttgtttctcatttctatgatcttcgctccatacatggtagtcttacatttttcttcagcacaaagtctcccttttattatacgcaaaatacaatctcgttcaaggcaattcttgattattttccacagcatgtaagacactgcaatggtctcgattttctttaccattgcgcatttcaaagacttcgcccaatgccggaagatccttctggcattgggcgatgaaaaccaccagcacattttcataagtgggcacaatgatctgcttcagagcctgtgcaaaaaagacattcatctttctgaaaaaagttcccgctttctctcaatcatctcatcaattctttcaatatagagtccaacatccttgacattctcacaccttgtcactgtcagtccatggtcactcacacatttgcaggctgctcctgccccaagcgccacgatcgactgcttctcctccatgatgagtatattgtaaagtccagccttgccttccttggcaaagccaatgttttccagatttccggtcatattcttctggcggtagagataataaggttccatgcccagtgcctgcgccgtccggtgtgcaagcgccatatgcttctcagaattttccatgtgaaggtcctgatatttatcccattccagattcagccttgcagacctcttgatcgccagtgaatgtacggtcagattgtccggatccagttcctttatcacagacatggtatgttccacatcctccatatgttctcccggcaatcccacgatcagatccatattgatggtcgcaaatcccacctctcttgccaaatgaaaactgtctatcacctgctcgaccgtatggtgtcttccgatcagatccaaggtcttttggttcatggtctgcggattgatggaaatacgaccgattccgtgtcgatgcagggcttccaatttatcccgggtgatactgtcaggtcttcccgcttccacagtaaactctaaaagatcagataaatccaggctttcttcgatcttggtcagaagccgatctaactggtcggcactaagacttgtcggtgtgccgccaccaatatagatggtatctaagaccttgtctttaaaatgctctgcaacaaaatcaatctctttaaaaagagcctctaaatacgcatccacacgctttttccagataccgatcggataggaggtaaaggaacagtaaagacaggtactcgggcaaaatgggatcccgatataaagactgtatccattttcataatccaccggtgctaacaatctatgctctttcttggcaatttccgtgcatagcgtctccttttcctcggagatcagataggtatctttcatataagtacgaattgccgtctcatcggccccctcttccagcatccgcagtgggatcttcgtcggccggattcctgtcagcgttccccacggcagttcgcgtcctgaaatctcctgcaatatttcatatagtaagcgcttcagtctgtttttggtatcttttctatcctgataacaaacgtcgcatcttctcgtcgtttcagcatcctttatcttccatgtgatggtgatctgctccatggcataggtcacggcaaaagaaaacgataccttctcctgatctgcctttggattcgtatccacaagaatttcttcctgtggatagaaggctttgatcaaagagtagatatcgtattcaaaattcgcttcatttaattttactgtaatcatttatctcttcactttcttagagaaatggattgtacatccgctcctgttcaatgctggtttccacatcatgccccggatagacaatggtattctcaggaagcgtcatgagtttgtttcgcacagattctacaagaagtctcgcacttccgcccggaaaatccgtgcgtccgatggaaccgcaaaaaagagaatctccggaaaagacaatatcctctctcggaaaatagtaacaacatccgcccggtgtatgtcccggcgtaaacagaacccggatatggaatcctgcaaggtcgatctcctgctcgtcctttaaaaagatatctgcatgataagtcacggcaccgccagccataggtcctgacaaattgatgcggctatcggccaaagtctctgcctccttttcatgggcatagaccaaaaggccgtacttttctgccaaacttgctgccgccccggcatggtcaaaatgtccatgggttaagagaatggccaccggctttgcctgcatctttgtcaatgcagatacaatacggtcagcctccgcgcccggatccacaataatcgtctcttttgtcttttggttcatcacaagataacaattggtctgcaccggtcctaccaccagatgcacaatctgtctgtcactcatatgctttctcccatctagcctgtcgtcctttccacatcgatcacagaatcgatctgctttaacttttcgatcagactacgcaattcgttcttgctcttggttccaaaattgaccacgatcgtcgcaatgccctgcttactggtcttagaaaagatagacttgatatctatatcacgctctgtaaatactttggaaacatctaccaaaagcccggttctattgttgccgtaaatatggatctctgtctgataaacttcaccggaacgctgttcaatggcatccggctgccactctgcttcgatcaggcgttctctttcactatccggcagattgagcacattgatgcaatccgtacggtggatggaaacgcctcgtccacgcgtcacgaatccaacgatctcatcccccggcaccggtgtgcagcacttagagaaacggacagaaacatcataaagccccttgacggtaataccgctcttggacttgtgttccttttgtttttcctttgccgcaggtgtgttgtcctccggctggttattttctgccaagatatcctcatccgtgatcaaaatcggatgatccttcttgtatgcttcatacatacggttgacaagttgcccctctttcaagccgccatgccctacggctgcaagacagtcatcccagcaatggaaaccatacttgcggatgatcttttcctgatattccggtcggttgatatcggaataattgatcccctttgccttggcagaagccatcatgagttccttgcccttgatgatattttcttccttaaactcattgcggaaccactgattgatcttgttctttgcctgtgtactcttgacaacatttagccaatcccggctcggtcctctggaattctgggaagtcagcacctcgatacggtctccattctggatcacataatcgatcggcaccaacttgccattgactttggcgcccaccatcttgttaccgaccgctgaatggatgctgtaggcaaagtcgatcggtgtggagccgttcggcagattcttgacatcaccggatggcgtaaagcaaaataccatatccgaaaagaggttgagatcacttttcagcaggctcatgaactccttgttgtccgacatgtctctctgccactccaagatctggcgcagccaactcaacttttcttcttctttgttgatcgtggcaccctcgccactctccttatatttccaatgcgcagcaataccatattcggaagtcctgtgcatatcataagtacggatctgtatttcaaacggtgtacctgtcggtccgatcagagtcgtgtgcaatgactggtacatatttggctttggcatagcaatataatccttgaaacgccccgggatcggcgtatacatctcatggatgacaccaagtgccgcataacaatccttgaccgtctcaacgataatacggatggcaaaaagatcatagatctgatcgatcgtcttgtgctggttgaccatcttgcggtaaatgctaaagaaatgcttggcacgtccctcgatgtcagcctcgataccggcccccttcatgtgctgtgacacctcggcaaccagaccgtcaatataagcctcccgctcctgcttgcgcagtgccaccttttccaccagatcatagtaggcttccggctccagatatttgagcgacaggtcgtccagttcaatcttgatcttggaaataccaagacgctgtgccaaaggcgcatagatttccatggtctctctcgccttttccttctgcttctccggtgtcatatatttaagggtacgcatattgtgcaaacgatccgccagtttgatcaaaataacacggatatcctttgccatggcaagaaacatcttgcggagattttctgcctgcacttctaccttgtccgcatcataggacaactgtcccaacttggtaacaccatctaccaaaagcgctacttcatcagaaaactctgctgagatctcctcgatcgtcataacggtatcttctaccacatcatgcaaaagtccggcaacgatcgtctccttatccatttccagatctgccaagatgatggcaacgcaaagcggatggatgatataaggctcgcccgacttacggcactgcccctcatgcgctgtataggcaatgtgatatgccttttcgatcatggtaatgtccgtgttcgggtgatacttacggatgcgctcgatcagttcacgatgcagttcttccggctcaacaaaatccgcagtggcgataatgcccttgcgttcccggtcgatactctgttccatctgttctagttgttctacagtgaaatctgccattcgtcatctcccctttctgtttctgatactctccacgagcaaaaccaaaaagtagcacaaattttacctttgattatagttaaaattctccaaaaaagcaacaaatctcgcgggattcctttacaaattataagaatagatccattcgtccggcatttgttttccctgaaatcccattttttccaaaaattgccgcgatgccaggtttctttcgtccacatggctgatgatccgctccatgccgagttcgtcttttgcataggaaaggattgcctgacagacttccgtggcatagccttttcgccagtgctccggtgtgatcagatagcccagttctgcctccccttcccgacaaggttcccggtactccagacctgcacgcccgatgagtttgccggagtctttttcaaagaccagccacataccaaatccataaaaaccgtaaatacgctcgatataagtctcctcatacagcctttcctgctcatactcatacaaaggttcaataaaatcggtcacatgcggcttggcatataaggcaaaaaggtcgtccagatcatccatgcagaattcgcgtaggcggcatcttttcgtctctaagatctgccatgggatcccgtgatacctttcaaagacccggacaaaatcccggtaggtcacctgttccagactgagcaccacatagtttgcctgcatcatttcatcttcctctgcctgaaatccaagcacagcgatccccaacccctgcatctgctttgccatatccggcgaagtcgtcaggcagatggtcgccgccatatccgaaagatcaaaaagtactgccacattctccggttccaaaaagaccaccttttgaaaaaatggcgtattttctttcaaatacgccatttgtctttcataattctgcggtgtgaatttttctttttctatataaaccacaagattttttaaagttaatgttttcatagatttttaatacgttccagtgcgcgcacggaattttcataactgccaaaggctgtcagtctgaagtagccttctccgcttggtccaaatccgcttcccggtgttcctaccacatttgccttctccagtaagaagtcaaagaaatcccacgaggtcatattctccggtgtctttaaccagatgtaaggtgcattgatgccgccatagacttcgtaaccggcatccttgagtccggtgtagatggtcttggcattgttcatgtaatagccgacctgttctttgatctgtgcctgtccggcatcagaatatacagcctcgcctgcacgctggatgatgtaaggtgcgccgttgaacttggttccatgacgtcttgcccacatgccgttcaaagaaacgccgtcacataccagatcctttggtacgaccgtaaagccaagacgaacgccggtaaatcctgcattctttgaaaaactgcggatctcgatcgcacaggtctttgctccctgacattcatagatggtatgtgccacattgctctcggaaatatatgcctcgtatgcagcatcgtaaatgataatagcgccaatacggtttgcataatcaacccattcctgcaactgatccttggtcagtgtggttcctgtcggattgtttggcagacacaggtaaatgatatccgggttctcctttggaaattccggtacgaaattattttctgccgtacatggcatatagatcacgttgctccacatctgtgtatttgcatcgtatacacctgttcttcctgccataacgttagaatcaacataaaccgggtaaacaggatcacagacagcgatacggttgtccacagaaaaaatctcctgaatattaccggaatcactcttggctccatcggatacaaaaatctcatccgcagagatatcgcatcctcttgcctgataatcatgtgccacgatggcatcccgcaggaaggcataacctaaatccggtgcatagccgtggaaggtcttggcatctcccatctcatccactgccttatgcatggcctcgatcatagccggcgcgatcggctgggtcacatccccgatacccagacggatgatgtctgcctccggatgtgcctctgtaaaggcattgactttctttgcaatattgctgaacaaataacttcctggtaatttttgataattcgtattgatcttgtacatcttcattctccttttatgtccattcacaagttacttttgctgtcaagttctatactcctataaatcgatttccccggaaaaaacctcggttgccggacctgtcataaagacatggttggtcttttcgtcatagacgacctccagatgtccgcccagaagttcgatatctacactccgtcctgtgaacccgttaagataggacgcaactgccacagcacaggctcctgtaccgcaggcaagtgtttcgccggaaccgcgttcccacacgcgcatacgcaaatgatccttgtcgatcacattgataaattcggtgttgacccgctccgggaaaagttcatgtttttcaaagaccggccccacttcctccagcggaaaatctctgacatcctccccgataaaggtgatgcagtgcggatttcccatagatacgcaggtaatatcataagacctgcccttgatctctaatggctccgccacgatcgcttcccttcgatcgtccgccaagccaaggacagatgctttgacgggaacctgcgccggaatgagttccggctctcccatatcgacacgcaccttactgaccttgccatcttctaccgtcagtttcaatgtcttgatgccggaaagagtgttgaccgtgatcgtcgtcttgtctgtcagaccatggtcatagacatattttgcaacacagcggatgccgtttccacacattttcccacgggagccatctgcattatacatgtccatttcaaagtctgccacatcagacgcttttatcaggatcagcccatccgaaccaatgccaaaatgacggtcactcactcgaatggcggtttctgaaatattgggaatgacttcctttgtgcaatctacatacacatagtcattgccacatccatgcatttttgtaaatttcatatgacgttcctttctcttctttttctaacagacctgctcaaagaccgattccaagccccaccgcaagaagaagcggtattgccacaccgggtagccatcccaagaaaaaggatgtgctctgccgtaagatctgattctccgatagcatagaataatctgcaaattttttatctatcttagcaccataaaaggctgttagcaaacagtaagcaaggctgcataggagaaaaccaagactttctaatatgccaaaagaaaacgctaatcccaggaaaatacaagatacgaccgcaaccggaatggtgataaaaaggtttctcttgaccagcagtccctccatatctttctcctccataggcatagattccatgatccaatgccgctttccctccatggaaaatccgcagtaactactgcttcccataccgagcagtgccaacagtagacaaaggatcacaaggtcaacacgtcctctgtcacagtcagcatataaaaattgcctgatctcctgcgccctcaacaggcaaaacgcactcgacataagcgcatacatggggccgatcagcgtacttaccatataagaccgcgaatggatccactgactccatagtctttcttccaaagcccgatgcttggtttttgcctcctgtgtgccataagaaaacgttttatatacttttggcgcgcgcagtgccagcacgatttcctgataggcgaccagcataaataaaaagaagaataaaaaccagacggaggaggctaccaaaaacaggaagaaaaaggctccgttattttccacaacaccattttgatacatcctgccaaaggagtagttggcacagattgcccggatgatctcagactgatctttatgcatcgacaccgcattggatacatttcctatggaatttcccaccagaagtcccatgacaaaaagcactgccagcatgatcatcgaatgcagtaagttgctgtttttgacggaacaaaggatgagtgccaggaaaatacccgccagagatgcgatcccggtgatcggcagacaggtaaaacatagccccacgatccaacgtcccaaaaagtccccatctacagaaactgccatcagatatgcctgtaaaaaaggaatattgctcaaaagaaccagtatggtacattctacatacaagcgtaaaaagatcaaaaacacatgccaaaaggtactgatgggcaaggataaaagaaatagggcattatcatcaccggctaagagttcattgatcttgatcatagtaaagatcagcgtgagaaggcttcccagcagatagcctaagaccggtaagactcctgcaagcccgccctttgacaaagtctgtcccagataatagcagacaccatacagaacaaatgccaaaagcagtggcaccagacttcgcaaaaagaaagcgatttttgctttgccgctttttgcataacggaattcgctaaaacgaaagatcccatccaactgtaatttcatcaaaagtgccaaactacgcatggctttccacctgcgctttcgcgagttctaactgttccaaaaagacctcctccaaggaagcctccctggtcagttcctctacacttccactcacaacgatatgcccatgatcgatcatggcgaccttgtcacacaacttttctgccacttccaacacatgggtcgaaaagaagatagcacttccctgtgcacacaaggcgcgcatctcttgctttaataccgcagatgccttgggatccaagcccacaaaaggttcatctaagaccaataacctgggctggtgtacaaaggcactgatcagggctaccttttgcttcataccatgggaataggaagatatcagatctcccaaggcttccttgatttcaaaggcatccgcgatcttctcgatacgttctgtccgcacatccgtcggcacttcataaatatctgcgataaagttgatataagaaatcccagtcatatattcatacagatcaggattatccgggatatatgccatctttttctggcattctttcttggcttcccaaagtgttttcccatcaatatagatttctccattatgggaggataagatgccaacgatcgacttgatcgttgtagatttgccggcgccattgtgcccgataaagccaaagatctctccttcctctacctcaagtgacacatgatccactgccggcttttgtccatcataagattttgtaaaatcttttagttgcaatactgtcgccatttgcttcccctcagcactcctcttttctatacatcctgcacatattttagtacggtctcataattgagattgccgccaaaaagatccagtgccgaaccgatcgtgatattgatcctgccgtcaccgatctccttgatgtgtgtaatgtcctgataatcagaaatacctcccgcataagtgatcgggatcttgccccagtctcccaaaaggcggaccagatcttcctcgatcccctggcacttgccctcgacatccgccgcatggatcaagaactcatcacaataggaagaaagccgatccagtaactctgtcgtgatcttttccttggtaaaatgctgccaacgatctgtcacaatgaaataatcgtcatctgccctgcgtgcagaaagatctaagacgatatgttccttgccgaccgcctccaccaatctgcctaaattctggtaattgaccttgccatcagaaaagacataggacgtcacgatcacatgactggctccttccgccaaaaaatatgcagcattgtccgctgtaatgcctccaccgatctgcatgcctcccgggtaagtatggagtgccaagagtgcctgttgtctggttgcctcatagtagggactgtccgacttgttcagcatgatcacatgcccgcctttcaatccatcctttgcgtaaaagtctgcaaaaaaatcagcatcccgcttagatacaaaattctcatttgcctgatcgccctcatcctgcaaagaagctccgacgatctgtttcaccttgccattgtgtatgtcgatacacggtcggtattccataataatatgtagtttcctttcttaaaaaatcatttggattgagcatagcacactttgtacgaaaaagaaacctcttgttctacttgcctatcctctgctattttgttaaaatatcatattaaagtagggcttggttgtcttgccgaacctgctaaaaatatgaaatacgagtgaaaagaaagagaggaaaacacacaatgggtacaattattggcgaaggcattacttttgacgatgtattattagtccctcagtattctgaggttacccctaatatgattgatctgactaccaatctgaccaaaaaaatcaagttaaacattcctatgatgagtgcagcaatggatacggttaccgaatccaagatggcgattgccatggctcgtcagggtggtatcggtatcattcacaagaacatgtcaatcgaagcacaggctgaagaagtagataaggtaaagcgttctgagaacggcgttatcacagatccattttatctttcaccggaacataccttaaaagatgctgacgaactgatggctaagttccgtatttccggtgtaccgatcaccgagggaaccaagttagtcggtatcatcaccaaccgtgatctcaagtttgaaacagatttctctaaaaagatcaaagaatctatgacttctaaggaagacggtctgattactgccaaagtcggtattaccttagatgaagcaaaagcaattcttgcaaaggcacgcaaagagaagttgccaatcgtggatgatgacttcaatctccgtggtctgattacaatcaaggatattgaaaagcagattaagtacccattgtctgcaaaggatgaccagggtcgcctgctctgtggtgccggtgttggtatcactggaaacatgatggaacgtgttgaggctcttgtaaatgcccatgttgatgttatcgttatggattctgctcatggtcattctaagaacatcattgaggctgttaagaaagttaaggctgcttatccggatcttcaggttatcgcaggtaacatcgctaccggtgatgctgcaagagcattgatcgaagccggtgccgacgctgtcaaggttggtatcggacctggatctatctgtacgacccgtattgttgccggaattggtgttccacagatcactgcgatcatggactgctatgccgttgccaaagaatatggtatcccggttatcgctgatggtggtatcaagtattccggggatatcacaaaggcacttgctgccggtggtaacgtatgtatgatgggtagcatgtttgcaggttgtgacgaggctcctggcactttcgagttattccagggaagaaaatacaaggtttaccgtggtatgggttctatcgctgctatggaaaacggaagtaaagaccgttacttccaggaaggtgctaagaagttagtaccggaaggtgtggaaggacgtgtagcttacaagggatctttggaagacatgatcttccagctcgttggtggtatccgttctggtatgggttacaatggatgtcctaccatcccggaacttcaggaaagagcaaaatttgtcaagatttctgctgcttccttaaaggaaagccatccgcatgacattcacatcacaaaagaagcaccaaactacagtgtggacgaataattttcacttcaaatagcaagaaaaagaacagccatgtcctatatgggacatgactgttcttatattttatgcaatttttaccttttcctactcgtcacgaaaatgacctgctatgatatcaaagatacaccagatacctccgcctgccgtagatgcaagaaatatcttgataatgcagatcaatagggatttctttgtcaatgttcctgccataaatccaacataaaggaaacgcaccggacggatgaacaaccagtaaccgcctacataaatggcaagaattgttcccagcaagcccaaaagcactgctgtcacttttcgtatgtttttcttcatattttactctcccatatatggcttgcgtcatctaaaagatcacataaaaacctaaaaatccgatcaaaattccgagaaatgctcccgcgatcacatcatgaatataatgcacaccaccgatcacacgtatcagggcaagaaatacacccgccacaaagatcacacctgctatcaccggaaaaacaggcataaaactcatgccgatgataaagattgaaaagacatggcggctcggaaaactctttccctttgtatctttttgaataagtggtctgatctgcatctgctcataaggacgtggtgcgttgtaaacacgtcggaatatgctgacaaccacaaaggcaactcccggcactaaaacagtgtgatatagcatctcatatttttctgaaaaaagcaaatacaaaagaagcataggatatgctgccatcgtaagtaatgtgatcacacggtttagccccagcataagcccaagcattcccggatgctttcgtaaagcatctgccatctgattatactgctcttcgcgcatcctactcctcctgcacttcaccatgcgtatcaacatattgattgacatctgtcaaaaactgttgccaggcatcctcatgctctacataataaagtgggcattttttccccgtcacatcataatgacgaatgacatcgtccgttgtcaactgaaaacgtcccatcagatatgccgtcaactccacaagcgaatcgtaagtctgctgattaaacttacctgttgcatccgggtgacaacactcaatggaaatcgtgtcgttgtttctgtcattggaagcataactgatctcattggttgggatgcactgcacgatctctccgtcaagacccacaataaaatgactgctggccatagtctcatgactgtcttttaatccttcaaaataattacggttctggatcgcagtggaacccggattggcggtatagtgtatcacaatccccttgacttcattcatcgcaagtcccggtctggaataatcattgatggataagagttccacatcaagttgcggctgctgactcactaccttatgggctgttctgcccgaaaatacttcaactaccttgtgtccgattcccagaagtattgtgatggcaccaactgttgctaaaaagagaatcacgatctccaagatcaattttttcttttgtttttttgtaaatttatgtcttttcttcttcgttgccataaatctattatagccttttttttcattttctcaatgcacaataaaaaaaaggtgccagaaataaaccaacaccttcctaaatgtacaaagccggatataaaactcacgctatgtattataaactgtatatatgaacctggcctgtaatcccactgccgtcctttggcacttccttcggacgtccatacggatccggtgtgctgctcatctggcgttccagtgttgttgcgacctcaatgcggatcttattttcgcctgctgccaaggcatctgacaggtcgaatacataaggggcaaagatctgcagtcccagatgcttgtcgttgacatagacatccacagtctcaaaggcatccgtaatctcaagccagtatctctttccggcctctgcccttagtgtattctcatatcgaatccaaccggaaaattccggatctaccttggcataatcatccgggaaggatacttcttcggcatcggaaaatgcaggatagtcgatactctttacggtacttcgtttccatgtatgcagaggtgccagttctttggcttcatctgcaattgcagtctcttccgtcacggcaccagcaagcatttgatccgtccctgcatcctgagccagcaataggaaacggctcttgcccggagcaagtctcaggctgatttttccatccttatcatcacttgcatagattttttgctcccatgcatcatatacatagacagaaattgtcttttctttttcctgcaccagatcaagacttccctcgtaaacttcctttccttcgttgaccagcatgtagatctgcatgccgtcttccttaatataatgataataacggatgtaggaatcctgcggtgctatggtaatatcagccacttcttttgtcttctccgcgatgtcagccaagcctatgatctctgcgtccgcgagattctcttccaaaacctgctctgatatttctccatcaaacactccctccggcttcccatcaacaaaatataccggcagaccggcgtcggtaagtttctttacgtctgatacaaatgctgcatccataaactgcatatacggtacaagaactgcctgatacttctgtgtattgatctgcaaactgccagtttcgatctttgtatgatatgtttccttgtctgaaaaagcatcaaatgggacaaaatcaaattccacctgattttccgcgagggctcttgccaccttttcatccggcagaacctttcctgtccactcaccttctccatgatagagcaaagccaccggtgccacatgtctgccaccggaaatcagttcattggcacgattcatataaaccatcaattgtccaaatgccttatactccggattgtgtccatgtgcatagaaatgtggtgggcagtccggatccgggaactgtgctgcactaaaggcatgcggaacatagtggttgacacctcgcaccataaagtgatctgccagatatttttccagacgaagtccctcctgccatccgtagtttccaaagatctcacacatagcatttccatgctttttctcgtccaatgctgccagcgaacttgccaattttccaagcataaagtgataaaactcaccatttcttacctgaaatacaccaaggtcataattatcatcttcgccctgtggatatacctgtccaccgatatcatcaatgcctgccatatcctgtccaaaaagtgaccggaagtagtgtcctaacgtagaacctgtccggcagtgctgtccgttatcctcaatgatatgtccgatgtactgcacaccgtggtcgcgacaccaatcaccgatctggtaagaaaaattcttctctaccagtcgtgtcagtatatccatatatgtatatctagcttttgcgcgctgactctcatcgccctcagtctcccagatcaaaggcagttttcgggcaaaatctgcacccagttgcgcctttaaagccgcctccaattcctgtccccatgggtagtccatatcaaaaccaatgcccatctcatggtgcagttcatacagatgaccattaccgagttccggttcatctgagaaaaatcctgcgatcgtcttgccaaaatcatctgcatagtgctcccaatgcttttcatagacggcatcgatcagcacccggcaggatgcaccatccgtcatattgatatagtccgggtgtggaccacggtttcttgtggtgttcatcttgtacaaaacgccatcttcctgtggtgtatatgtgaacgtgccgtcttctgcaacaagtcctgtcagatcttctgcccgtccatccgaaaaatgtacggatatcccaagcagtctatcatctgcaaatgccgattgcggcttgctttcatccttgccgccaaacatcatggcaatctgtttttctacatccccaggcttcttctcatccggatgtttcacctggtctgcatccagcgacaagacctcccctgctttcaaaacatacttctggcagcagatactacgtctggccagagaaagcggttggtccttcatggctccgttggcaaagccagttgggaaatggctgtcatccagaatccacaccttcatgttacgttttctcgcctcgtccaggatcacatccatatcctgccaccatttgtcaccgcagaaatccggatgtggacgactctccacacagaccgctccaatatttgcttcatcaatcgctctcatgtaatcacggagcgtatcctcgtcctctccatgctgccaaaagaatggcagaatgtaattttcatgctgatcgtttaaaatcctctcaattgtttgactcatcgcctatcctcctcgttttcctatgtttcaagacaaattttctcgaaaatatacttatcttattttagattatacgaatctcctaattcctctgtaatctctgaacttagccattgtattgaccaaacttcacatttatgttatgaaataataagatagacaggaggacagcacatgacaccggaacatcttgatgaatttttacgacaggaaaacgactatgaaaaggatcccagcgccacctttaatcttacggcttttaacgagatcctcttacatatgacctctttcccctacatagaggattctaaggcttttacagaacatatgataatttctgccgatggtgttattgcatccaagcaggatcgtcatcatgcggtacttccccatgcgcataactggatggaactggcatatatgtattccggtcacgccgatctcaccattgccggtcaaaagatttctctggttcaagggcaatgtatactgataaactacaatgtttcccattcctgcgcctcatgtggtcacgatgatattttgataaacctccttttgagccgtaattatctgcaaacgaatttctttaaccgtttttcagacagcggttctctcgcccactatctgattgcctcgcttaacaatgaaaatagggaaaacggttatatccattttaaatcggccgacaatcgcaggctttccgtttttatgcgggaatttctgtgtgaatactacgacaaaagtatccattataatgactatctggacagccttacgaccctgatctttttggaactttccgacatttataaggacgaatccatccgggatgcatcagaacacaatgaaattctttccatccttcgttatattgaaggcaactaccgcaactgcaccctaaaaagtaccgcagaatttttccacatgaatcccaattatctgtccggttacatccacaaacacacaggaaaaacttttaagtcgcttattcaagaacagcggatgatgcttgccacaagacttttaagcaactccgatcttcctgtcacagacattgccctgcaggccggttatgaaaatatcacctttttttacaagaaattccgtcaactccacggatgctcgccggcagaataccggaaacaattccaataaaaaccttcccatacaaaggatttccatgtaaaataacctattcagacaaaagttatgctagaaagggatataagtagtaaataaaaggaacaccgcctctttgattataaagaccggtgttccttttcttattccttaattggcatttgtattgtttggtttggtcgttttattgttgtctgtcatattgtctgtggcattttccacaccattggtcacatctttgacaccatcggatacgccgtcggtcacatccttaacgccgtcgcctacaccatcgacaacatcatcaatgatgccgccgccattgtcctccgtctttgtgtcatcacttgtgtccttcttgttgcctccggtcgcgtcgttgacattctgcgtttcgttcttattattgtcggttgtgttcttgttagttccgcaacctacaaaagtagcgagtgccaataccgaaagtgccaataccagcagaagttttccttttttcatcgcgatattctcctttacacaatttacctcgttccttgcaaggcatttatagtatggcttggattttctgtttttatacctagtcctatgcgttttatcgttttcgcttgagtgggaagatcagggctcccagataaccaaagatgagtgccgccgaaatccccacagccccggccttgagcccacctgcaaaagttcctaagaatccctgttcttccacggcttctttgacgcctttccataagacattgccaaagccaagcaggggcactgatgcacctgcgcctgcaaattccacaaaaggttcatagatgccgatggctcctaaaagtgctcctgtgcagaccagaagtaccatgatacgccccggcaacatttttgttttttccattaagatctgtaccatggcacagatcagaccgccaatgacaaatgcttttacatagtccatcatgccacctcctcatgttcgatcacgacaccatgagcaatgcctggtacactgttgccctcattgaaactgaccggagataagagcgctcccgtcggaataaataagatccgtttccatttgccggatatgacacggggcagataataggatgccaacgtgaccgctgagcagccacagccggagcctcccgcacaggtgtgctgctcgtctgcatcaaaaatctccatgccacagtcatagtgattgtctgtgatgtcgcatccaccgatactgcaaagttctgccaggatctcgcttcccacacttcccagatcacccgtgatgatggcatcataatctttgggactccgctcaaaatctttcatgtggtttaaaatgagggcagatgctgcaggagccatggcagcccccatattctgtgcatcccggatgcccagatccatgatctttcccgttgtgatgcctgtgatctttgccccggatttaaccgttcccaaaatataagcaccgctgcctgtgaccgtccatgtcgaacaaagtggtctttggttggcatattctatagggaaacggaattgccgctctgctccgccaaagtgtgaggaagtgaccgcagcaacaagatcagcatagcctgccgcaacgctcatggctgccaaagataaggcttctcccaccgtcgagcaggcaccatacaaaccgaaaaacggtctttgaaactccatcaagccaaaagaggatgcaatggtctgtcccaaaagatcgcccgcaaagagatagcgcaactgctctccgtccatccctgccttacccagtgccagcgtcagcgactctttttgcatctcgctttccgcacgttcccaggaatccgcgccaaatcggtcatccgtacagatcatgtcaaaacaatcccccagtggtccctctccttccaattttccaacaacagatgccgtctgcatgatataaaccggcttcggcagacagagactgtccgctcccatttgtatttgcatactatcctcctcgccacagggacgttccttttgccacaaggagtgtcccctttggctcgttcccatgttttcgttatttttctataggataggatgcgtaaattgaagaaaaatatactggtgaaacaccattgatagaaaatattcagattgaatatctttgatttcaaaaaattgatgccaaagggacgctccttgtggcaaaaggaacgtccctagtggccatccctgccctggcgaaataggtctgccatctgggcatcgtactcatccgccggacggtagcgcaggagcaaggttttcaaataagccttgaccggctcagtctcttcatccggtgtataagacgctaaggcttcatccacgatctccttcatgacaagcggtgcggttttctcatccaccgccagatccatcagaccttttaattttccacaggcataataatattcatagtttcccaccaaaatggatgcctgcatatccaatttcttttctacagcattgactgccaattcttctaccattaattaccacactccacactgatctcgttaaatacacccatgatatcgtcaactgcaagatcctttttctccttcccggacttatcaagaatcgcctgcccctgatgcatcatcaaaagccggtcaccatattccactgcataacggagattgtgggtgaccatcatggtggtcagatgtttttcggctacgatcttacccgtcagttccataatgatctctgctgtctttgggtctaatgccgccgtatgctcatctaagatcagcatgtcgatcggtgtcatggtcgccatcaaaagtgccactgcctgcctctgtccgccggagagggaaccaacctgcgtacgcatcttatcttccagcccaagtcccagcggaagcaacaactcccggtaataatcttcccggctctttttgacgctcatacccagattgtatggcttacccttattgtccgcaagtgccatgttttccaagatagtcatatgcccgcaagtacccttggaaggatcctgatagacacgcccgatactgcgatggcgcagataatctttctgccttgtgatatcctcgcccccaatcaggatctgcccccgatccacaccgatactgccacagatgatatttaaaagggaagtctttcccgaaccgttactgccgacgatggaaacaaattctccatcctggatcgtcagattgaaatcgtcaaacaggcacatttcgctgacggagcctgcattataatatttgtgaatatgctttaattcgatcatgcccgctcctttctacgctttctgccctgatatttctcgatccttgaggaaagtaccaggatcaagaggaataagactgccgttaccagttttaagtccgtggattgtagtccgatacggatggctgctgccacacagcccttgtaaaggatggatcccaggatcacgctgatagaaaatccaaaaacgctgatctgtccgaaaagtgctgttccaatgatgaccgatgccagaccaatgactgcggttccaacacccatagatgcatcaaaaaaacgctgctgctgggcgaacatggagccactgagggaaaccagaccgtttgcaatggcaagtcctaagatcttgatcttgcccttgtcaatccccatcgaagtcaccagtgtttcgttgtccccgactgcctttaaaagataaccggattttgtctttaaataccaatccagcacacattttacgatcacgacaatgattgcaatgatgatcaaattcttataaggcgacagggcaccgccaagcaaatgattggtcagactattgttataaatattgtcataattgtagatcggcagatttgcctttcccgcaatacgaaggttgaccgaataaagcgccgtcatcatgatgatgctggctaaaatatcccgcacctttaattttacatgaatgagtcctgtgatcgtccctgccataagtcctgctgcaaaactaagaagaagggtcagatatgggttcatgccctgtgagatcaaaacagcagacaaggaagcccccaaagggaaacttccatctactgtcatatccgggaaatccaggatcttgtatgtgatatacataccaagtgccatgatcgcgtagatcataccttgttcaaaaacactgataactaaagtcattttattcctcgcttactgtgatcgtatcaaatacttctgctttttcggtaaatgtatttggtaaatcgatacctaacttatctgccacttctgtgtttgcgtagtaacttgggtctgtgatcttttcaaatggcatttcagaagcctttgcctgaccctttaagatctttgctgccatttttccggtctggatacccagtttcttgtagtcgatacctgctgctgcaagacatccattctttacctgctctacttcggaaccgaataccggaatgtttgcctgatttgcatgctcaagtacggtctgtaaaccgctgactacggtgttgtctgtcaggttggtaatgcagtctaccttgcttaccatgtctgctgctgccatatccacatcagcgatggtgttgataccggtctctacgatctcaaatccgtaatccggtgcatattccttgtaagtttcaatggtgctgactgaatttgtctcgcttgtggtgtagataataccgatcttctttgcatcaggcatcagttcgcggatcatctctaactgttccttgaccggaagtgcatcggatgttcctgtgatatttcctacggaatttccgtcatcatctgcaagctgcgctgcgaccggatcggagattgccgtataaacaaccgggatctctgtattcattgcagaattgtatgcgctcatggcacaaggtgttgcaatggcacagatcatatcgacctttttggaaacatagttgtctgcgatcgtgcttgctgtaccggtatcggtctgggcattgtcataaaggactgtcaggttctcgccctcaacaataccttcttccttcagcccctccaaaaagccttcacggcaattatccaaagagccatgctccgcaaactgggcaataccgatcgtgtactctgtgtcggatgacttcttgctgtcactgcttgcgtttccacaacctactgctccgattgccatcattgctaccatcattcctgctacaattcttttcttcattttcttttcctcctagaattcaatactttttcaaagacatttgccattctttgaatgatgtatgaatcggattcggaatttggactggtaaataggataataaaaaaaccgccccagaaaaactctgaggcggtaataaaatcattatcgcggtaccactcaaattggctgctatgcaaccctctcattccacataccatcatacgtgccagtttagtaacgagtctggttcccgtcatcccctactctgaaaagatcatttcaggcatgccctcacaagtccattcctaactttttgcattgccatcttccaccaacgatgactctctgtgaatgttccaagatagtacttctcttgttcaacggtttctcaaatatatgttatttatactccaatgttgtccctctgtcaagaattttttataaggatttttacaaaaaatcttttcgtaccctgctaaggattccatccgtcacccccgtattgtgccgcatccgccgctccaaagaagatagggttcttacctgcagatccagatcataggtcactttatgcttcttacaatccagccaggcgatcgcatccatgaccatataaagttccagatacatattgcccaagagaatggtcttgagcagatgataatcctcatagacacataagagcatttcatagagatagtatatgtaatacttgcggtatttgtcataagttcccggcatttcctcttccatttcctgccagatcttttcaaaaaaggctcctgcttcctctgccgtcttaccattacaaagacgataataaagccggatacattttttcaggtaagcgttgttgaccgccagatttggcagatccaactgatgcgcaatgaccttatctaccagatccatagggaaaaataacatctgccttggtgcacctgcatccaaatcctcctgttctcctacccgcctgctttcctgacaccggttcctataggcatctaacacggtatttgcctcagcacgcttatcacgcatcagatgctcatgcatggcatcgaagcaccggtattgccggtataaaagtgcgacgtcaaaacgctcctgcgtctgtgcctcatccaccatggtctgacgcagatcctgtaaaaattctaaaaaaggaagatcctcattgcctatcttccaaaggatctctctttcttccttttgccaaggaagcatggaaagcggctctttttcctctaaaaacaggcgtgccacctccggacaggcaagttctaaggcgatctccgcaaatgcttcataagagatcgtgcgcctcggatattccctgcatacacgcggcatcagatccgtcctgccctcctgctgcaaaccgcacaatccctccccggtatgatagggacaggatcccaaacgctttctgatctgggggctatctgtcttttgtcctttgatatttcgcaggagagtctttctacggtctgccggctcctgctctatcttttccatcgttttcgcatccaccaaaatctgccagcccttgcaacaagtcttggggcatacccccttgctgcaatgaaatttatctaaaaaggaaatcccgaaatacttcatactatttgtcctcatccgtctcctgtgctatactgttccgcgaacgaaatcatttacgccacgaaaaaggagatcttcatgaaattagatgccgtaatctttgatatggacggaaccattacagacaccgaaaaattttataaccgcacctggccactcgcttttgccgcctgcggttatcctgattttaccagagaagatgccctgatgcaacgaagcctcaatcacgcggatgcacaaaaactctggggcagccgctacggggaggatttctcctttgagaccgtgcaccaatacaacacaaaactggttttggatctcatggaaaaagaaggtatcgagacaaaaccaggcttagaccaactgctgacctatctcaaagaccacaagatccgggcggctgttgccactgccaccaaactggatcgcgctttggaacgtttaaagacagtcggactggaaaacgcttttgataccgtgatcagtgcttccatggtaaaacagggcaagcctcacccggatgtctatctgcatgtctgcaaggaactgggcgcggatccggcgcattgtcttgctctggaggattcgcctaacgggatccgttcggcacatgatgccggatgtattaccgtcatgatcccggatcttaccatgccgacaccggacattgagccactgctttatgactgggctggcgatctttccaaggtcatccctctaatcgaacgcttacaggcagaataagaagacacaaaaagcaaaagaggcatgcacgcagcatgcctcttgtcatttcaaaagcctgtcttttatttaccctcataggtcacaacagatgcgacatcatactttgccaacttatctctgccgtgaagtcctgcaagttccatcaagaatacgatcttgacaacctcgccgccaagttcttctaccagttgtgcagcagcctcgatcgttccaccggtcgcgatcagatcatctaccaataccaccttttgtcccggcttgatagaatccttgtgcatctcgatcgttgcagaaccatactccagatcatatgtcttggatacggtagcgcatggcagtttaccagccttacgaaccggcacaaatggcttgttcagcgcataggcgatcggcacaccaaagataaatcctctggactctgctcctgcgatcacatcaaaatccacgccatccagcaacttgatcatctcatcgattgccaaatgtagtccatctgcttcctgcaaaatacttgtaacatcacggaagataatgccttcctccggaaaatccggaatacttcttatgtagtcttcaacctttttcatcgcttgacctcttatcttttattttataatgtccgataccctgcatcaaacaccaagtcctatctcatgttatactcatgcgccccacatgtcaagtggcagccttgcccttttccagtatatctttcatctgctcacagatcgcaatactggtatccagatccagatttctgacactagccgccagttgatcgatccttacctgcaaagtttcctcataggcatagccctccagcatctgcatgatctgatctatgccgtcataatccagattttccgcatcggcacataacatagaaagcataccaaggatccatgctctatctgtcatatttggtttcttttctaacggctgcatatgcaccgaaagattttgcctgcaagcctcgacttcttccatcaaaacgccatgcagatgtcgcagacgttcttccttgccgtctcttgccgcatattctaagatcctggcaagcgcggatgcctgcatggctccgatcaacgccagattgctctttagggcatgcaccttgatccgataggcatctatccccttagggccggaaatatcctgatataaaagatccagttccgcaacagcactctcacagccattataaaaatcttccacggattcccacaacatctgcgcattcagaaaatgcaagagcccatattcccagtcaaagccttccacctgcggcagttcctgtaaggcttcgtgatttttttcaccgtagacttccgagttattgccggaaagttctataggctccacatggatattgtggagtgccagttgctctacgatcagattttccaagcgatgggaatcgatcggtttggacagatagtccgtaaaaccgatctgcatatactgctccttggcaccgatgatggcatttgccgtcagtacgatgaccggcgtatcctt

SEQ ID NO: 12637 - DNA, 18072 bp, Unknown
  gut microbiota DNA sequence
gcggttctcctgcatgctctgcatataagaaaaagtctcgacaccgtccagttccggcatcatatgatccaaaaagatgatatcataatggcgctttttgaccatttccagacaggtaaagccattgtccacctcgtcgatctggatctgtgtatgcttgagcagtttgcaaaagaccttgcggttcatggcattgtcatccacaaggagaacatgcacatttggcgccagaaaagtaaaatgctgctctttgctgttgtctgcattctttttatccttgatctggaaatgcccgatcggggtccaatctttgacacgctgttttagatcaaaataaaaggtagagccctgcccatagacactcctgacctgtaggttagagtccatcatatgcaaaagatttgccgtgatcgccataccaagtcccgtaccctcgatgttgcggttggtcttttcgtcgatacgctcaaatgcctcaaaaagacgatgcaggtcttcctcccggatccccgctccggtgtcttcgatctcaaaatgcaggacttccgaatcttcttcctggtgcccggtcacggaaaaattgataccgccctctccggtgtatttgatggcattgctcatgatattattgatgatctggcgcaggcgcagggaatctccccgatacatggcaggcagtttctcatccacatggatatgcagatacaagcccttttccttagcacgcagaccgaataccgtcacggtatcgtgtagcacatcacacagttcgtaatcatctgccatcaattccatcttaccggattcaattctggaaaagtccaagatctcgttgacgatctcaagcagggattccgttgaagtccgaatatcctgtgccagacttctggtattatcttccctggtctcacgcaggatcatttcatccatgcccagaaccgtattgatcggtgttcggatctcatgcgacatatttgcaaggaaattgctcttggaatggttggcgatctccgcctctctctgcgcatgctttgctttttgcgtcacttccaccagaagtttgtttttctcctccacgatactatcctgctgcttttgcatccatgcctgcaccttgacgatcagacctaccgccaccgtcgtgacaaagatactctgaaccacatcgaggaaaaaacttgcccgcagcatctgcccgtgcaccaattgtgaatatttgtaagagagccaataacaaccgatgataacgatagcatccaaagacaacataacaacaaaatttacgccatccaaaagcaggaaaataaataagattcccagcgcaaaccaactggacattccactttcaataccgccttgggagaaaaagatgccaggaaataaaaagaagcaactcacaataaccataaaattggaggctacacccagccgccccttataatttgccagataaaaaggaagggcagcgatcagaattgccacaataaagatcggcaccggctgtaccggcaatagcgatgctattgccatgataatagaaaatactccgcccagcactgcgaccacgaccatcacattaaatagaaccagccgcatacccttggtacgcacattgaaaaaacttttgatcttatccacaaaactctgcataaattcccccacgatatcacgtcaatattatgtttattataacgcgactgccgcgaaaaaaccatccttacttattccagactatcccttaagcacaactttccccatcctgtcctctcagatggcataggctctcccagcaagggaagcgccccacgcaaaagatatgccttcaacttttccccataggcatatgaatcattcccttccagaatcccccactgcatgatcaaggcagccgaaccggtcacaaaaggtgttgccatggaagtgccgcttctcgtcacataaccaccgcccggcgcgcaggatgtgatatccacacccggtgccaccagatccggcttgacttccccggtcacccaagcaaatcccctccccgaaaaggaggcatactgatttctcctgctgtcatatgctcccaccgaaatgaccttgtcggcagtcgacggcaccgtcaaagtcgtttcctcactcgcctgtaaaaagccggtattttcattcagacttccccccgtctgcagccaaagagcataagagccatccttgatccgccgaggcaagagcctgatcgtccagatgccagcatccacataatctgtccttggcaaaaatgcaaaataaatctcctgataaatctggtagggacttggtgcgtcaaagaaaacatgaatctctgtattgttccatacataagatgcgatctgcccttccccgactccctgctcactatctaaaaaacggaaaacctgactctgatccggtgccaaaagcaccaaatccacaacatcctgatagcgtttccaaaattgcagattgacactggtctcatagacatccactgccagttcgattcttaattcctgtctgaatgcagacagtctcccttgctgatgcaatgcctcctgtccctcattcccggtaccgatcgcgatcgccatcttccactgatttgccacctgggatagataagtctccaaaagcgatgttcctgtgtgggatccatagttatttccaaaactgatattgatcgccaccggtttcctttcctctatggattttcgcttgacatactccactgcttccatcaactgtgtggtcaaagggaatccaccggatcgggctgtccctagttttacgacgatcaggggactttcatatgccactccccggtttctccccccggatgccctgccgtttcctgccgcaatccctgccacatgggtaccatgcccggacggatctgtcaccggtactaaagaaagtgccgacgtgcgatcctccgctgccagcgcctgatcgatctgcgccttactgtattcttttccatccgcaaaaagccatgcgatccggctgcttccatccgcattgcgaaaatccgggtgaaaataatcaatgcccgaatcgataatggcgacaaaaatcccccggccagacaaaggtcctaccggggtcatctcttgttgtaacggccagatacaggatgcacgcacgccctgtgccactcctgttacgatccgtttgggttgctctatataaatcacactatcctgcgccgccagcgcctcgatcgcatcctctgggacaagtgccgtgacatagccaccgctcaattcctgaaaacttgcctggggaaaagcctgccgcaaggtctgcaccgatcctgccagacgcaggatcaactcccatgactggctttctttttcatagcctgccgacagactgccggatttctccagttcttctgtaggaagctgcaatgccagttgcagcgatgcatctatcttatcgctgatcacatccataaattacatctgatgacgcacgatcagatactcgtcattggactgatagtaaggacaggacgccgtatttcccatcaaaaaacgtaccatatcatcctcatccagatccatatcacacacataacattcatcttcgtcatcatagacaaaattattgcacatttcacagtttgaagtctctgccatgctcatctctcctttttttgtcattctatgacttgtgtcatcccttcatgcaaaaagtctttatccaaagataaagcggagcaatccgccaaccagacatgccgctaagattgccgccaacataatggcatactgatagccttcatgctcgcgtccccacttggtatgcatgacgcctagataaatcccaagccctgcaaaaatagcgatgacattgataatcatattcaaccaatccataaatgattgcctgcctccctctcttcttttatgcctgctgcaagatttcttccaatgccgcaaacagacgctccatctcctctttggtgccgatggtaatgcgcaggaaattgtcaatgcgcggcttgttaaagtagcgcacatagatatccttttcttttaaagccgcaaaaataactgcagccgccatcttggcatggcttgcaaaaataaagtttgccttggaatccaaaaaagtaaatcccagacgccgcaactgctcttttgcccattctctggtctcaacgatacggtcgacctgctccttaaaataaggtgtatcctccatggatgccttgccgatctgtatggtcagtcgatccatggtataagagttaaaggagtacttacaatcgttcagataagagatcagtttggggctgcccatagcatagccgatacggcttcctgccagtgatctggatttggaaaaagtctgtacgaccaaaagattttcatattttggtaacaatgccagcgcactttttgttccaaaatccacatatgcctcgtcaatgatcacgacagagtccggatttgtctttaagatctcctcgatggcatctaaagactctgcgattccggtcggcgcatttggattgggaatcacgatcccgccattttctctcttatagtcctcgatacagatacggaaatccttctgcaaagggatctgtacataaggaatacggaaaagttctgcccagacatcataaaaagaataggtaatatccggaaagaggataggcttgttactgccaaagaaagtcagaaaactcatggcaaggacatcatccgatccgacaccgacaaagatctgatctttggaaagtcctttttctaaagcaatcgcctcgatcagatctgcggcttcgggatccgggtatagccggagttcttccgcatcaaatccatctaagaccttttgcacccgagggcttggtggataaggattttcattggtatttagtttgatcaccttacgttttggctgttcgcccggaacataaggttccacttttctaacatatgtctcccatccactcatctgcctctgtcctttctataatgcgttatatgctgctactgccgcatctaaaactgccttgttgctgacttttgcctttgcggcatccgacaatccgttgtaggcattctgtgctgcgtcaatggctgccttgctgtttgccgtcaccggtgtgccgatctgatcgatcaatgcaatgactgtatttgcctgattttgtgcatccgcatctgcctgctgtgcaataccagcccagatatttgcatatgcattttcggcatctaccaatacctgatagttgtctacacaagccttgccggaatcttttaaggcatcgtaagaactacgtgctgcagaaatggctgcgccgctgtccgccgtcacgcttccgatcgcattgatggcattcttgcaggcatctgcctgctgctgggtcaaagaatccacggtctctgtgcctgccagatcatacatgagtaccgggaagcctgcctgcacataactaaagatggtgccggcagccgaaagtggcaggttgacacagccatgagaaccatagccctcacggtaacgctgtccaccaaaggacttctgccaggtcgcatcatgcagaccgatatctccgttaaacggcatccagtaagataccggtgttctatagtttgctcccttaaggatcgcatttctctcacaatatgtaatgcgaaaagcaccacaaggagtcacatgaccgttgtttggatttccggtaacacaaggagtatccataacaacagatccgtttacgaccagatatacatgctgtgccgtacggttgatctccacataagagttgccataatcgttgccgtcatggctggctgctgtgtactgataaacgaaatcacggctgacatccttaccacccttgagatcttcggtcaactgtgccacttcgccatccttgtcgatacgccatccgtagttgccacccggtacggtaacggtcacgccatactgtgttgccagttgttttggctgtccgtaagtatcgtatttcttgctcatggtagagacgaattctttcattttttcggtatcaaatgccggctgcatatcgtcgtcaccggaaagccatgtgccgatcgtatcctttggcacagactcggtcgcactgccgatctggtaagtgatcttggtatccagatagccattgagggtcttgatgagtttcttgacttccttgctatcctcggtgtatttcggctgtttgtaacatttatccttggtcagatccagggtcttttgcaaagataaggctgcctgttctacctttttgtttaatttttcaacctcgatctccgtaccgtagacttctttggtgacaacaaaagaaccatccttgtaggagacctttgcattttcggtcgccttgacatcctgattggtcacacaggagagttttgccacattcttttccagcgtatcggtatcacaggaaaccaatgcatcatccatatactctgccggtacgaacagacgatatacccagaggaaaccgttctgtttcttcaagagtgtcttgatcttcttgtcgctgatgtcgatcttgagtcccaattcatcggaagaaagtgtttccttgtctccttcgctgtctacaacggtgagatcatatccctttgccgcatcttgcagacgggtcttcatggtggtttcactggctgcagaagccttcacaccattgaccgtgctgcggaaaaagaagtggctctggaaaaagatgccaaatcccacaaatacgatcaaaagcgcacctaagacactgccaccaatgatggcgatcttctttttgtcaacgttctttttctcttctgtgctcgtttccacagtcgatggtgcgtccgtttcttcacccttttttgaaaataactttaacataataattacctttcccttactctacgctcatttatataaggatgcgatctgctctaaccatagttcggcacatgcatctgaaggcattctgagatctcctcgcggtgacagactgaccgtaccaacctttggtccgtccggcagacacgagcgtttgaactgctgcgcaaaaaatctgcgataaaatgtatgcagccactttaggatcgtggcttcgtcataatcctctgcaaaggcatattttgccagacgatagatctttttcggctcactgccataacgcatcagatgatacaagaagaaatcatgcaattcgtatggacctaccaattcttctgtcttttgcgcgatcacgccatcctttggcggcaggagttccggcgataccggggtatccaagacatcgcgcagcacatctgccaatgcttcatcggcaagataggtcgcatagtaggaaaccagatagcgcaccagagtctttggtacagatacattgaccccatacatagacatatggtcgccattgtaggtcgcccaaccaagcgccagttctgacatatcaccggttccgatgaccatgcctccttctttattggcaatatccatgaggatctgggtgcgttccctagcctgtccgttttcataagtcacgtcatggcattcggcatcctgtccgatatctgcaaaatgctgaagcacagcatcccggatcgaaatctcacggaaagtcgctcccagactttttatcatagaaaccgcattctgataggtacggtctgtcgttccaaatcccggcatggtcacagcgattacgcccttgcgatccagtcccagcatatcaaaagcacgcacggtaaccaaaagtgccagggttgaatccagaccaccggaaatgccgatcaccgccgtttttgctccggtgtgtgccagccgcttcttcaagcccatagactggatgtctaagatttcctcgcagcgtctgcgcaggcttgcctcatctgatggtacaaatggtgccttgtctacaaaacgtgtcagtttcgtctcctgcaaaggcagagaaaaataggtctcataatagtcggcatctgtcatctcataggtagacatcatatggcgttttgcagcgattgcatagacatctatttcgcttaggaccattccggtcgcaaagaggtcactctctactaagatactgccgttttccgcgatcaggctatgcccggaatagacgacatcctgcgtggattcgccctcgcctgcgctggcatagagataggcacaatataggcgtgccgatgtcattgccaccagatctttgcggtatgcattcttgcctgtcacttcatcgctggcagacagattggcgatcagggtcgctccgtgcagacaatgcctgccggatggcggacacggtgtccacaggtcttcgcagatctcggaggctatgacaagttccggtatctctctacaacgaaagacctgatctgttcccagaggtatgtcagtctcctgtccttccagacagacatttacgatctcctgcatacccggtgtaaactgtcttgcctcgtaaaactctgcataatttggcagataggtctttggcacaagtcccagtacctttccaccgcaaagcgctgctgcaacgttatataatttgccctgatgctcccatggcagtccgacaaaaaagataccggataggtcttccgtcttttttgccaggctaagaagccctgcctttgcctgcgtcagcaaagtgcgctgataaaagagatcatggcaggaatatcctgtaatgcaaagttccgggaataccacgatcatagcccccgccttagcacttgcttccatcgcctcttgtatctgttttacattataagtgacatctgcgacacgcacctttggtgtgatacaagccaccttgataaatccgtctttcatactcttctctcttatcttatttgcgcttacgcatctcgatcaattcgtccacggtataattgtatgccttgttgcagaactgacatttgacctcgatcggcttgccatccgcaatgatgtctgccacgtcctcatccccaagactgcacagacttcgctccacacgctctgcggagcaatcgcagacaaagcccgcatccactgtctcatggaaggtcacgtcaaagcctgccagaacggtctctaagatctgctccggcgtcttgccctcggctaacatggttgttactgatggcagatttttgatattttcctctagtttttcaataatctcatcggaagtaaaaggcatgagttggatgataaagccacctgcctgtgccacggtattatctttattcatcaaaacgccaagtccgactgaagacggcacctgttcactggtcgcgaaataataagtcagatcttcggcgatctcgcctgtctgcaacggtaccgtgcccacataaggctcttttaagcccatatccttgatcacgcgcatgatgcccagatcaatggctccgccgacatctaatttgccgtccttattgggtggcagcatgacatccggcacattggcaaagcccttgacatgtcccttggcatccgctgtgaccgtgatccctttcatcggtccgttgccctggatctgcagggtcagcatgtcgtcgtcccccttcatcataatgcccatcatggcagccgccgaaagcatacgtcccagtgccgcggtaacgaccggactggtattgtggcttgctctggcaaattccaccagatcctttgatgtaatggcaaatgcacgaatagcatcatctgccgcggttgctcttacaatgtaatctttatatgcactcatcttttatcctctcttctttcccacttctcttgcaatgacatatatgcgctcggtctcctccaatactgtcgtcatggtatctgcgtctaagatctcaagcagatccatccctccctcacgcagtgccttttttatcgtttctatctcataggcgcgctgataatgcacctcttcaaatcgcataaagtaatccggatcttcctcatcctgaatatagagcgtcaggtcatattcgttgatcccggtcgtctcgtcaaaggtattctcccagataaaactgccctgctcgcggttctcggcaaaagtattatccgccagttgactgcgatacttatacggcgtattcaggtcaaagacaaagataccgcccggatccagataattattgactaagcggataacctcgaccagatctgcatattccacgatatagttcatggaatcacatacactgaccactgccgcgaccgtgccatacaactcaaaagcacgcatatcctgacacagataaaggatgccctctgcaggatgctccatggcaatgccaagcatttcataagaattatcaatgccgatcatgtcatagccggattctgccagccgtcttgtcatcttgccggtgccgcagcccagttccgctaccagcccctctgtaattttataccgcgccaagatgcccagtaaattgtctttccacgcatcataaggcacattatccataaaaaggtcatagacctctgcaaaactttcgtacgctgccatattacctctttcctataaaaaggcatacttgtccagtaaacctttttaaccataagtaatactaacacatttatccataaatgcaaacgaaaagtggtctttgcccgccttgaaaaaatcaggtacaaaccttatactgagagaaataagacattggagtatgcgaaatcatatgaaagaaaattttgaacattacatcagcaggagcatccgctccttctatcagcatagaattgtatcgccgatcatctttttagccatcttggcactgcttgcctttttctatccggtcagcaatctcatgcgtccggcgagtgccagcggtgaggacgatatcgaaaaactataccaagacaatgaccgctacatcgagatcacgctgaaagacctctactttaccggttataccaagcgctggctggatagcacggtgggctattattactatacggtcatgggcgacgactgcatcatggttctcttgaatccggacgactcccagcagggacttccgactattgacaagatcaagatccacggcaagatcctatataattcccatgccatgagcaaattgctgctctatctgtcggaagatctggcatggtcgcagaacggcattacttccacgatctcaccttatatgatctcacagccggatgccaccgatcttgcaacgacactttttaaactggtctatattttaagcgggctttatgcttttatcagtatcatccgctatgccatctacattgcctttccggtgctctccgtacctgtgcagaggctccgttgttatggcaagccccgcgagatcttagcggaagccgaggaagaactggcaaccctgccacaacttgccacggaagatatgttcatcacggagcattattttattgaaacgtccaattatggtgtggcgatcgtgccgatcagtcagatcatctggatctacaaatactctaccctgcataagtttttgtggcaccacttttctatttcctataccttgcatattactgccgccaaacgtcagtacattcattgtccgaaaaatatcaagtctgacattgatggtatcatggactatctggcagaagccaaccacgatattctggtaggatttaacgaagccaaccgtcttaaggtcgaggagatccagggcgaccttgccccgttcaagaagttctgggcatttctcagtaagaaagtgtaggcgacagttcgggctggggatgtggacagatgctgaggcgaatttcctatcacacaaaaatccctgcaagaaacgccagcacgtctcccgcagggaccttctattttatcttttcagacggactatgctcccatcttcttttgcatccacgcatacagatcctcatatactacctgacggtctgtctcatttaagatctcatggcgatcatccttgtataatttcaaggaaacatcctgcatgcctgctgcaaggaacttgtctctagcaacctcaacacccttgcccatatttccaaccggatcactatcaccggaaacaaagaagatcggcagatccttcttcatctttgcgatgttgtttggatcattgtcatacttggtagactctaccagtccacggtatgcacctaaggaaaatgtgtaggtacactttggatcctgataatatttctttacaatatcaacatcctttgtcagccaactcttctccggcctagcacctgtgcagtcatactgcttgtaaggtgcaccataggtcatatctctgaccatagtactgcgatactgatctgagcggaagaaggataagaaattaatcaacgcaagtcctgcattgatggttccgtcactctctgtaccggttcccataatgatggctccgtccaattcatccatttcctctgccttaacgcacagacattttcttgtcatataagatcccatgctgtgtcccatgataaaatatggaagtgtcggatattctgctttggtcagtttgtagttgctgtagatatcctctaccatgatgtcactcggatgctttgcatgcatgatgccccattctttcggtgaagaaacagactctccatgtccgatatgatcatgtcctactaccacgaaccccttactgttcaaaaattctgcaaacgggcggtaacgctcgatgtattctaccatgccgtgtacgatctgaagcacggcaaccggctcctgatccggcgtccacttgacaccgtgaatctgtgttaccccatctgctgatgcaaattgatatgtctgctctgccattttataatcccccttattatttgtctcatatatgtaaatggtattgctacctttacttttgtgtctctgaaccgccggcatcagcaaaggtctgcttcatgtgtgcgaccgtctgctctaaatgcgttgtgctctcttcttgctccatataacaggtgccgatcttttccatctcttccaagatgcactcctgcctgctgatatcatctgtcacacgtccctgatactcctgcaaagtctcgatcagacctgccatagatgcctccggtgactctgtatcagtctgtcccgcgttatagcggctcacatccgttgccatcttgctaagcgcacggttgttgtccttgagcaaagaaataaactgatggatctgtccactcatctcggtgatctccttctggagattttctgcctgctctaaggtgtccgataactgtccgccaaagacttctgccaaagaccggatctgctctgcgctacggataaaatccgcgccctcgtcgcccagtctccccgcatcgattgctgcctgtaaggcgagtgcactgatcgtcccggtaaacttttccaagcctgacatctgttccatcagacgcttgatctcggatgtctctttattggagccttccgaaaccgacttggcaagtccggtataatgcttgctctgctccatcaggtcggtcaatgccgtctcctgctggtgtaaaaaatcagtatgcttggcacttttttccaggatctgtcccacttgcagactatcctgtcgtaagacctcgacacattcctgtatgccatcttccatgacctgctggtcatcccgtgtatccttggcataacctacaaccttggtcaggcttcgatccatctttgccgcgctcatctgtaactgatccacatccatctgtgcttctgccacatccgatgccgccgtctgaagcatagcctcgtatgtctccacctgtcgcccaagcgtctcagcctgctgtaactgttgcttcacttctttgctatgaaacatgcctgcgcatacctccattcatacattttcttacacaaatgtatactatgtattctacatttttttgtagtattatgcaacatctagcagacatttgatatgacgatctgcaggcttcttctgccacggaagtcattgatctgcggataatatgtgatggtaacgcatcccttctcccgctctatttcttcgaaagcatccacatccccaaaatacaatccttccatacaaaatccgtcttccccctgcaagtccatacgcaaaaattgtttttgctttccaattgggatttttcgcataatgcgtacatttttctgggcaaaaataggctttggattcccatttccgaaaggttctaagatttctaattgcgaaatcaaatcttcacggatataggaaaatggcattggcacatcaatatgaatcactgtctgcatttcttcttttgtcatctgcgtattggcattgatggctgtccgaaaggcatctatattttcgaccggaagagacagacctgccgccataggatgtccaccaaatttgctaaaaagttccttgcacttgcacatctcatcatacatggaaaaaccttcgacagacctgccgctgccttttgccccatttccgtctgccgcatccaccagaataaaggtcgggcgctcatagcgttcccggatgcgcccggctatgatgcctgcgacactctcatgcacctgtggcagataaatgactaagacaggcgcatccgcgtctgcagcctgctcgatctgtgcgatcgcctgcgcaacgccctgttcggtcatgacctttctttcttcattcaactggcgcaatgtttccgccaatccggctgcgctttctatatcctcagcctccaaaagttccaaggcctttgtagcagaatccagcctgccgctggcatttaaacagggacctaagacaaagccgacatgataggcactgatgtcctctggcgcaagatcacagcgtgcgatcagagtctgcatccccagattcttggtatggcgcagccggtctataccaagggctacgatcgttctattttcttcgaccagttccatgacatccccgatcgttgcaaaagccgcattttccataaaacgcatggcttcctgacgcacaatgcctgccgcttcatataatacccagatcactttccatgccacgaccgctccacacaactttttacacggatacatgcagtcctcccgcttgggatcgaccacggcatccgccggcggcagatgatagacttttttgccttcgaccatttcgtaaggcacctcatgatggtccgtcacgatcacctctatacccgcctccttggcataggcgatggcatccgccgccgcgatcccattatcgcaggtgatgacaagaccgatcccatcagccacgcacttttccatcagacggatattgacaccataaccgtcctcgatacggtcgggtatggcatagtctacgatcgcccccagacgcagcagtccctgatgcagaatataagtcgcctggatcccatcaatatcataatcgccaatgatacggatcttttttttctcttttatcgccttttgcaaaagagcgaccgccacatccatatcctttaaggcttttccatccccaaggtctttttcgctgggatgcaaaaatgcagtaatggctgcatcctccgtcaaatcgcgattgacgagaatgcgcgccactaccggatcgatctgatattttttgcccattgcggtaaaatctgcccgcttactatacatgagccattttgccatgttttttcctcttttctctatctgtaacttgtatcttttttacaattccgctataccggttactcccacatagatctgggagattttataccatgtacgatagtctaccacacctgtcgccggcagtccaaaaatagattggaagatacgcaccgcttccgccgtcaaaggtccataaataccatccacagccacacgcggaatcgccggataatcccctgcaatcacattcagatgttcctgcagctggctcaccttttttccttctgaacccacagacagttctcctgcccaggatgtcggtatgccactgatttcttctgctgtgctaatatagatattactgccataataataacgaagaatttctatggtacgaagcccctgatctgccaaatctttcgagccccactgactgagccactttggacatcgtacatttttcccatcacaatattgcgtcaaaattggttgcttgacatttggtcgtgccagataattggtatacatttcatcgaccacttgtgaaatcgattcaaagatggtacgtccatacgaccatttttgatcgtatgccgttgatgatgtaatggtaaaatcataccctttgccacgataccactccgtataaacacggttcagtgtaaatgacataatggcaagtacatttgcacgaattgcagcatccggccaggtcgcatagatttcactggatgccacatttttgatataatccggatatgtcacataatagttcttcgcttctgcatcggacggagttccatcatgcacaataatatactctggaatcaccacgcggcttaaaacgatttctccggtttcagtaactggttttacctctgtctccggaattttaggtattcccggtacataaagcgtattgccgggcaccacaatttcttctgtttttcctgtcatacttcccatggggatcaaaggaaccggctgcagtgacagttcctgcggcaatacctccgcatttgtcagttctaatgtttcataccctgcagcttctaccacgatattatattgtccataaggcatccccattgcctgcgattctaagctgtattctagcggcggtgtttctacacgtatatccggaatctgtcctgctccgtccgaaacataacttgctattttctcaccatctgacgcccggtaaatgctcacctgcgccccacgcaccggtcctctgttagtactatcatataattcaatttcgagttctcctgaagatgcaaatcctatgtttcctggtgttgtcacatccatttttttctcctgcagccatcgtctctttactatatgacagcattaggaaatgcgtgatttttcatccacacttcgatcaatctgtaaattcttataatactgcataggtgtcacaccatattctttcttaaatgcccggaagaaatggttgtacccaccaaatccacccagttcatacacttcgcgaatgcttttcccctgctcaatatagcgtctgcaaagatcaagtcttgcctttacaatataagcatgtggtgtctctccggtcatttttttaaattctcttacaatgtgataccggctgacatagaattcatcctctaaacgttccaacgtaatatcctccgtcaaatgttccttaatataaataaagatatcatccatcaccacatgttttttcttattcaccttatgctgtctgtcctcctgcacagacgagcgcaatgccaaaataagcaaaatggtcaactggctcttctcatataatgcatgtgcaaatttttgttcttcttttgccattacatagagttttttcgaaatatttttaatcagcattgctgcttcactctctgcatgtaccatttttacctgaaatggtacgacatcaaacgccgcattcaaatcggtatgttcatcggaaagtgtttttagtaagtcagcgccaacataaagaacatacagttccaacggatatttgtttttacggtattccaatttgatacgattgccgggtttgataaaaataagatcttccatcgtacaaacctcattctgttcctctgcctgtaaataggaaacaccgccaacaacaaaaataatggtatggcgattgctttgtccaaaacttctctggccgctctccacaatctttacatgctccatttcatatccttgtctcttcatatgttcactttgcacattccttccctatattttttgtttattttgtcaattttaacgatatatcaatttttcatagtttgcaagcaatttttgtatatgtggtctctttttttgtttctataataatactgtagctaccaaaacattataaaacgagaggtattttattatgaaagaaacaagacctttttctatgaaggacaaaatcggctacactctgggggatttagggtgttgctgtacggaacaattccgtgctatgtatctagcaattttttacacattggtat

SEQ ID NO: 12638 - DNA, 722 bp, Unknown
  gut microbiota DNA sequence
tagtcgatgtatcgactcgaaaaatactctctaaacgtatatgggttatcctctaaatcctctggcaatttttcagcaatatcgcacagtttcttataatccatatctcgttgatccacctcactatatgctaaaataagtcgcagtgggtctacattcttctcattacaacacttgtaaatatccttaatataactggaatgaaagcctgcgtatccacaaatcaaatccagcggattttgtaccttgccatccgtaatatctcgcagtgaaacataaccatattccaataagcgcgggatatctacgtcaagatcatatccttttttcttcaatgccattatcgtcatttctgtagatgcatttcccaaactccgtcccagtccctgcatagacgtatcgatcatatcgaatccaagatctgcacaatatatactatttgagacagcaagccctaaattattatgcccgtgaaatcccaatttcacatttgttaattttcttgtttcctcataatagcgtctcaattcatccggcagcatactgcccgccgaatctacgatatacacacattcagccccttgctcgtgtgcccacaatgcattttttgcaaattcttccggcgatacaatatatgtcttcatataattgactattattatcaagcccaggttttttgcatgcttgataaattcgcctgcttgttccggcatatttgcatt

SEQ ID NO: 12639 - DNA, 215 bp, Unknown
  gut microbiota DNA sequence
aacgtggatggaacaagatggatatgctccgggtgaatccattgcatttgactttgagaatggaagtgaaacctatacctatcagggaaagattgcaggatcctttgtaagcgcggacacttatcttgtcattccggaaggtgtataccgttccatgaatccgaggggaacagcctatggctatctgtgggtggactgtgataaaaaagatgttg

SEQ ID NO: 12640 - DNA, 7998 bp, Unknown
  gut microbiota DNA sequence
aacgggaaatgcggatactgctggaagtgtcacgcagataacggcggagttcgcctatgatcatgggagtcgcaggcagtaggtactgaagtgccgtatttactacactttttaaacaaaatacttttttgaatgtcgccaatgtgtcatgaatgtgccactttgagcgtctttttttatgcaaaaatctaagcataaggagtggttctcatgttttcagatgaaatcctagaaaaaatttattcaagagaagaacttcggcaggtcgatttagcaacgcaggtacttgttgtgagagtgatcgaggaagttttgcaagaggggaaaaatgataatgaatttcagcccgatcaatattccgaatgatcctttgtttttgacacaggacgaaacggatattttggtggagacatcgaagttagaaagagaggaacattatgcaaccatttacaaatccgaattattttcagcagacagtaccagtaagttataacgcagggggctacaatccttatatgagaaatcagatggtgtcgccacaacaggacatggttcggacaccagtagttcaacctacgatgggaatcactggaagatatgtgcaggatgcaaaccaggtaacggcaaatgaagtgccgatggatggtaattttgcatttttcccaaaggaagatttgtcggaaatctacgcaaagtgttggtctgctgacggtcagattaaaactatcgcatttaagccatcagaaatcatggatgctaacaacactacccctaatggcgaaaaatcgaaaatagacgcattaggcgatgccacagagggtattattggcaaacttgatgtaatgtcagatcagataaatgccattgagcagaagttgtcagcaaaaacaaccagatcaaaggcaagtcaagaatagtcggaggtgtttatatgaacccacagatgatacaggttttcaatcagataaaatccattagaaatccgcaacaaatggctatgcagtcgcttcaaaacgctgcgaaccaaggaaatccgatggcaaaaaacattttgaataacatcgaatctgggaatatgcaaaatgtggaacaggtattaggcaactatatgaaagagcagggtcttaatatagatgaaatcagacagatgattagatgatcgtacatattagggttttgtccggacaataaaaaccaaggttccctatttgtaaataaatcaaataggaggaaactaatatgtttaacgatggagttagccttgccgatattgcggcagtgacaggcaacaacagaaacaacgatggtatgtggggcgatggtgcatggtggattatcattcttcttatctttggctggggcaatggctttggcggttggggtaacggaaatggtggcggtgcattgcagggatatgctacacaggctgatattcagagaggatttgataattcagctgttatcagcaagttagatggcatttccaacggattgtgtgacggattttatgccatgaacaacagtatgcttacaggttttaatggcattaacacaaatatcatgcagaccggctacggcattcagcaggctatcaatgctgatacagttgctaatatgcagaataccaacgctttacagtcacagcttgctaactgctgctgtgagacgagagaagccatccagggtataaactacaatctggcaactaacacttgtgctttacagaacacaatgaacaataacacaagagatattattgacagtcagcaggcagggacaagagcaatccttgatttcttaacaaatgacaagattgcaaccttacaggcagagaataacgatttacgcagagcagcttcacaggatagacagaatgcacttctgactaccacaatggcagcgcagacaaatcagattattgatgctgtaagacctacaccggttccatcattcccagcatctaacctatatggctatgcttacaataattgcggatgtagtaccggatgtggatgctaaacgtatgtaatttcatacggataacaaccgaataattgagtatcttaattgagttcaacttgattatgtctgctaagcagtattacttacaaacacaaagggcagactataatgtttgcccttatttgcacattgacaacagaatattaggttgatggatttttaaagtcgtggtacaattttcaaaaaaagaaggagtgccaaaatggttattttcagacaacatagaggcggattagctgaatccctagaaacagcaagggaatttgaaaattttgatgatatgaaaaaatacatatatcaaattcacaaagacttttgcaaaaagataggagtagccaatgcaccatttgaaatatcagacattgtaattgacaataattcaaaaacagaagatgcgagaacgaattggcacgatacaatgtatgtttgtgttaaacgatacggagatgaagattatattgaaaaatatggaactccgcaatgcataggaatgtgtgcgacagactacaaaaagtaaacaatggattttcaaaccatcaactaatattcagttggtggttttttattttgtgaaagagaggtaaaaataatggaaataacaggaattgcattacaaacagttgccgccggagaagatgtggcattcacagaaacggcagtgaacggaacaaaatgtatcgtacacagacagggaagcggaattatcaagttaagaggtatcaccaatcagtgcaaggctagatttttggtatcttatagcggaaacattcagattccgacaggtggtacagtagaagctatctcacttgctatcgcagtagatggagagcctttgcagtctacaagaatgattgtaacaccagccgcagtcgaaaatttatttaacgtatcagcacaggcatatgttgatgtaccttgtggctgttgcagtacagtagcgttgcaaaatacatctacacaggctatacaggcacagaacagtaacttaattgctgttcgcgaagcataaggagggtgtcgattatggatgttaaaagaatgcatgatatgattgaaaaactttccgagcgtgcagagtgcgaatttgcaaagggaattgataatgtagacacttgcgaaatgggaaaagtcgttgacatgatgaaagatttgtcagaggctatgtactatcgcacactcactcacgcgatggatgaggttgaaccggaaaaaacagtatctatgatggaacgttttggcgatggtcgtagattttatgatgattaccgctatatgagtactggaagatacgcgccaaagggcaaaggaacctatgtaggcagacgaggatatacggagcctccatattggcatagagatccggtgcgtgaccgagattttgatctggaagagtatgatcggatgtactataccgacacaaagatggctgatggtactatggatatgatggaaagccgttacgatatggcaaaacgtcactacacagagacaaaggctatgcatagcggaaatacgaccgatgacaaggacaagaagatgaaagccttggaaagttacatgaaagaattgggtgttgacctttcagacatgataaaggatatgaccgaggaagaaaagaacatgatgcgctcaaaattgagcacgcttgtatcaaaaatttaatgattgtggctaggggtagaaatattcctagccatttttaggggaaaactatggtattttatgtaaacggaagtaaatggcatctgcgctttgtatcgcctaatgacggcaatttaaggcgaagcgacggcatttatacgattggagttacagacaatcaaataaagacggtctgcgttgccacagggctatcagacgcaatgctagacaaagtattgtgccatgaattgtgccatgtgtattcctttgagcatggattgaaaatggatattcagacagaggaaatagttgctgattttttggcaagttacggcagagaagtaatttacacggcagatagccttatggataacttcatggagaaattagcatgagaaaagcccatacatggggcaagtcacaaaggttttgaattatcaaaaaaatggaagaaacaaaatgtttgaaattctgtgagagaacggaaattatagcaataggggtggatttaaaatttggtctagcagattttttatcccccctatatctgtttttaaagtggatttttcaaaatggaaatttcagacatttgctttgaattttgcaatgattttttgaattttcaaaatttggtcgacgagattttgatacccccctgggtgatattttcaaacgcaaatttcaaattggaaattctgaaaatacggtgtcgattttgattgaatttttcagataacatactttttccttggtttttctttaaatcaatttttttctgtcagcatagtaacacaaagcgaaagaaagacaatcacacaaaatcacacacaggcatatataaacagactacacccaaacggcgcaaaggtcaataattgcgtaccaaaataaagcaatataaacggaaaatataattctattcagttttcaaggaacgaagaataggcggagtttgcccgactattcttcaattataggattgattccggcaaccctgcaaaagtaatcaaaagacgattccgggacaaattgagagcatacaacacgcccctggtagtactgctctagcatataaccgtttttgccttgaaaattgcaaggcttcgcaataaagccattttccatagtatcacccctttatcattttattttttccacttattgcaaatcaccgccgcaggaatcgaacccgcgcaagccgaaaaaggacaccagacacggcaaaatggcagattaaccgccctagatgcttttattcttccagtaaatcttcacacaaaaatacaaaacctttgagagttccagaaccaatctccacattatcaatagaacaatcgaattcgcattcgtgccgttcttgcaagtcgtgcattctctcaaaattgtcatttgtaaaagcattttcaaagttatacataacaatatcatctagattgcatttttttaattcctcaatcaattctttgaccttcatattttttatacctccgtaaagtaattttttggagcgattttttcaatgaaccactccgcagacattccattttttaattgttccatattttcaaaaatccgtaaagcaatttcttgcgcttctttttgttcatagccttttttcataatcagcttacttgcctttataacattgttatatgtctttcttttcattttgtacacctccatatatttattatttgcaaaattgcaaaaatccgcagcagggcgttgaaccctgccgaccgcctgaacggatgacggaaagaattaatatttttctgggtttgttactttgtcaaaaccaaaataaaaatatgcattgcttgccatgtttgccttgtctgctgtagccttgtcaatttcacaatatcctattacctcgtgatccctccatatagcatactttttcaatggtttcttgtcgtcaattataaggaaatgcctattttcaaaaaataatgttgtaccatatccaggcaagaaagcacttttggtcgttttgtctattatttccttttttgtgtaatcaacgatataatttgttttataatcgttcggtattctttcccattcttccattgttaaaatgtgcaaaacgcttttgctttcgtctgataactgtatttttttcatacaaataccacctttcaactttattatcctcttatgaggtaaagcaagccgtggaatcgaaccacggaaaagcctgccttgctaattatttgcttgctaaaatctcccttgataataagtcccaataaagaccatcgccgctcttatcaagccacttttcggcttcttctgtgctttcgtctaaccattcagccataagccggataatatcataataactatatgcaacgccaacgcctaaacctctaagccattcgatacaggcgttacgctccccgagtcttgcaaccgcccagccgtattcgtttataaacttgtctttaatgtccttgatcgtgttaagatcttcactctgtgcgacctctgttaaataatttctaactgctgcttttacttccttgctatttgttcttctcataatcttgtaccatttcgccgattgtgatataatcggcttacctttcttttttgattggtgccggtgtttgcttggtaggttgcaccggcttttttatttgcaagattataatatcactattatcagtgcatgtcaacactaaaattagtgtttatgtaaaaacttttattagttgacttttctatgtaaaaaggtgtatatttttctcataaatgtagaaaggatatattgacatgtggaagtataagattgatgtattaaaagaactttctaatcgaggatatacaagcccacgcattagaaaagaaaagatattgagtcaggctactatgcaaaatattaggcaaggaaaaggaataacgaccgatactttgaataccatatgtattatattaaggtgtcagccgtccgatgtaatagaagtaacaccaacggacgaggaaaaaataaaatatttttaaatagcactaaaaatagtgttgacatactagcgcacttatgctattatacttgtatcaaatgaagataataggaggacggaaaaatgaagaaatttaacacaagcgaagggataagaaggggttggaaaccagcggaagtatatgcagaagtagcgaccatatacgacatagaaagaccaggagtttatgcagtagacggcatcaactatccaatagatgcaaggagtgtcacaagtgacacccatgaagaccttgccgaacgtggtgaggactttgtaaatggcttgtgggtcgttgggttcgggatgtttgtagaggagaaaaaagatgaagaaatttgatatttatgtaaattatggcgtccttacgcatgaaggaaagaacgtctacacctacggagcaccgcatccacacgcgacctgctccgaaaaaacggaagttgcacttccggaaaacaaatatttctcgctttgcgagaattatatcggagacctgatggtcgagtcagcatggggctggacttatcagattaacgatgtgttacaagggaacgaacgtccttgtttttatgcgctagacaatggcatgaaaggtcatagagtttatttggaggaggcataaggcacaaaaacaattggcataatagacaaaatgcaaggcacaaaaaagaaagacgagagaatccaaaagattctcgacaatctccagaacactctggaagattaaaacaggctaggcggttgcgaaagtgaccgccaccatataacaagggaggaaaagaaaatgaagaaagagtttaaaatttatccgggtgagcacacaaacaattcactagagttcaaaaaatttttaagagatgttgagaaatcgatcaacgaggactccgagataatcgagagtgctaagaaagtgaatagggagttcacagaaaaagctgccgtgattttagccgatccagataatgcggagttttccgctggaatgattgaaaaaatcaaaagagaaatcccgcgttattcatataaaaagaatctacagtatagcggcaaaagatatgacgcagagatagaccagttgctccgcgttttctatctggtggaaatttaaagaaaaaaatagacctcttcgggggtctttttttatttcaagcaaaattatccccagaatacacgaatttttcacaatttagcccatttgtaaatattcaacaaaacagcattaaataaattctattattttcgtgcaaaatacatcttgatttttttgaaaaaagttttgtttacaaactgtttacaaaatgtaaacgtagataagattagataagat

SEQ ID NO: 12641 - DNA, 3122 bp, Unknown
  gut microbiota DNA sequence
ttttagccggtttttcagagacgtatgtcatggtacttggtgtgtattacaaattacagacatttatctatctgtctgctaccggtattgttcagggtattcgtcctctcgtcggatacaattacggcgcaggcgaaggcaaacgtgtacgcaaaatctatgcaaccggtcttgtacttaccgtatttctcatggtattaggaacaacgctctcctggattatgccagagcgcttatttggactttttaccacaaatgccacaacgctatcgcttggcgtagaggccctgcacatcatcagtattggctttatcatttctgcgatatccgtgaccacctgcggcgcgctcgaaggtataggcatgggacttccatccttaatgatttccttgttgcgctactctattgttatcatgcctgctgcatttgttctcagtcgtatttttggcgccacaggcgtatggatggcatttccgattgcggaagccatcaccggcatcgcttcatatattatctggtgtaaaaagagaaaatcgtttataatggtatcttagtatatgactgatagatacaaggaggattttcatgaagacagaagtattgaccttaaacaaagaaagaaatgtcactctgacaacctacatacaagattgcggggaaggattcggctgtgtagccaagcgcccagctgtactgattcttccaggcggagcttatcagatgtgttcggatcgtgaagctgatcctgttgcctttgcttttgcaaaagccggatatcacgctttcgttctgcgctactctgttatggacgattgtacatggccaaatccactcaatgattacgagcaggcaatgacactgatccgctcccatgcagatacatggcacatctacgaagataaaattgcagtcatcggattttctgccggtggacatctggcaaccgctgccgcaacacttgcacagaaccgcccaaatgctgctattttaggctatgccgtaaccagtcagcatgtacaggcctgcaatccaaatgcaccggagacgatctccgctgtagaccggaaaacaccaccttgctttgtctttgcaacacgtacagacagcatggttccaatcaacaattccattgattttatgcgcgctttatcagacaatggcgttgcctttgaaagtcatatttatgcttatggaccacatggtttttccacatgcgaaagcagtattcaggacacgcgtccacaaaccatctgctcgcgtgtaccacactgggtggaagacagtattggctggttaaaagacatttttggtgaatgcacactcgaaggcatgacagatccactctgccctgcccatatcaatgacaattacctggattatctgaccgttgactgtacttttgcacacgtgatggctattccagaagctgctacactcttagcaccaatgattgatgctttgattgccggtctatccgagcaggcaaaaggtatgagtgctgctttcgatgacagcaacggaacttctatggtcagcgatatgaaactgcgcgacttacttgcctatggtaagatttcagatgatgaactaaaagccttagacaaccagttacgccaaatttccgtaaactaagcaagcgaaaagactacagaggatgtattttccacattccctgtagtcttttcatttgtcttacttttcttatttattccagagatataccttaccgcaaagaccggactttgatgtcggcttgctctcgcccatcatcttggcacgcataccactggcattctcacgccagagcgttgtggcaacctcaatgacgatctcatgctcacccgctttcaaatatccactcaagtcatacagatactccggtacgatctgcaagccaaggctctgaccgtccacaaagacttccaggccttctgcggcgtctgtgatctctaagatcttatcaccgccatcgcttgtgatcttggtctcataacgcacaaaaccacagaatttcggcttttcttcttccagatgatccggcaggctgacatcttttgcatccgcaaactttggatggtctaaggcagagcagatactgcgcttccatgtctttatttctgtcggttgctcctgcttttctttcttttcatacatgcagtctgacaaacgcttgccaaccgtcttttcttccaaagatgatgtatcggcttcctcatcaaataccatgatcagactctttcttggttccaaaacaaaggacacctgacaaccgatatccgtcatctgctgatctatatctgcaatggaattatcccacgcatcataaacatagcctttctttttcattggaaggcttacctttccccgataggtctgcgccgactcattgatcagcatatacatatgacagtcggtctgataatgcatgatatgaatatatggattttccggtgcgatcacagcatctttgatatcctctttttcaagatatgccacgagatcaccaagagctagcaccttggcatccccggctaaatcatccgcctttttcgccttgttttctgcctctttttgcatggcatcttctcccatggtataggcatccggcagggcatccacatagatgacattggatagaccggcgatctcgatcggctggtactttgcataaggcacgatcacatagataaacttgtctacctgatccagatgatccagaggtaggaaagagaaatcgatctgtgcatcataaagaggtcttgccacctgatccagacgcatacactgaccggaccactcgccttcggcattgtaaagaactgccaccttttgtacgatctttcctccactgatcaggcttgccacacggttcatatatgcgcacaagtgaccgaaatggcgatactgcggattgtgtccgtgcgcatagaaatgtggcggacaatccgggtccgggtatgctttcggtgaaaaagcatgcggcacaaaattgttgacaccacgcaccagaaaatgatctgccagatatttcatatcggtaacgcctgtcttccaaccgtaatttccaaatatctcacacatagtacgtccctgcttgctttcttgtaaataggcagcagaca

SEQ ID NO: 12642 - DNA, 6128 bp, Unknown
  gut microbiota DNA sequence
aacgtaaaaaagacggtccaggtcggattcgcgtttttatccatctgtgcattctggcagatgtataatgccatcattccgatcatcctgacctacacattccatatgaatgagacgatctccggtgccatcatggcagcggacaatgtacttgccttgttcttactgccgctctttggtggtatttccgaccggtgcaagtgcaattggggcaagcgtaagccatttatcctgtttggaacgatcgcagcagtcatcctgatgcttttgatcccactcatcgataattcttactatgagaacccgtcgacagccaaattggcactctttatcggggtattgggagcacttttggttgccatgggaacctaccgcagcccggcggttgctttgatgccggatatcacaccaaagccactgcgaagccgagccaacgccatcatcaatctgatgggagcactgggcggtatcatgtatctggtgatcgccagtgtgactttgaattccaagagcgagcatgagaactacttcccgatctttctgatcgtagcaggtatcatggtcgtagccgtcatgatcgttatgatcacggtagatgaagtagacttaaataagcagatgcgcgaatatgaggctgcacatccggaagagaatctggaagtacaggatgagtccggtaatgcagaactgccaaaggatgtcaagagaagtctgatcttcttactcctttccgtagctttctggttcttcgcatacaatgctttggagacatggtttaccacttacgcaaagagcgtatgggaaatgacgaccggtcaggcatccctttgccttaccgttgcaaccggtggcgccatcttagcctatgttccggttggctctatcgcagccaagattggacgtaagaagaccattttgagtggtatcatcctgatgctgatcagttttatcgtggcacttgcattttcacttatgagtgacaccttcagcccggttctctatgttctcttcttgttagtaggatttggctgggcaggcatcaatgtcaacagtctgccgatggttctggaaatgtgtaagggaagtgacatcggtaagttcaccggctattactatacctttagtatgtcagcacagatcgttacaccgatcgtggcaggctttttgatggagcatgtcggctacaaggcgctgttcccatatgccgcagtctttatggtgatcgcatttattaccatgcagtttgtaaaacacggcgacagcagagaaggtatcaagcagggtattgatgcatttgattttgaagattaagagagaggaagtaatacataatgagcacaaaaccacttgtatgggcgcatagaggagccagcggatatgcaccggaaaacacacttgccgcttttcagaaggcggtagatttaggcgctgacggagtagaactggatatccagttgacaaaggacgaccagattgtcgtcatccatgatgagatgatcgaccgtaccagcgatggcaagggatgggtcaaggattatactttggaagaattgcgggcattcaattacaaccgcaccaaaccggagtataagcatgctgatatccctaccatgcgagaagtgtttgaactcttaaagccaaccgggcttttcatcaacattgagatcaagaccggtgtggtattttatgaaaagatcgaggaaaagatcttagccctggccaaggaaatgggcatggaagaccgcgtttgctattcttccttcaatcattacacagtgacacgtatccacgagttgaagccggatgcagaggttggatttttatatgcagacggtccgatcgatatgccgtcttacggcgtaaagcacggtgtcaacgcactccatcctgcactttacaatctgcaatatgacggatttgtcaaagagtgcaaggaaaaaggactcaaactcaacgtctggacagtcaacgagagaccatatatggaaatgtgctgtcagtacggcgtggatgctatcatcactaactacccggatatcgcaaaagaggtagtcggctaagacaatatacaataaggggatgacatggaaatgttacaatatttagagcagtttaatttgctctctgtatttgtgcgtctggcgcttgcgacggtcttggggggattgatcggcttggagcgtggatcgcatgggcagcccgcaggtctgcgcacctttgcgctggtctgtctgggagccaccattgccatgatcacagatgaatatctggttgtgacatatggcacgggagatcctgcccgactggcggcacaggtcatcagcggcattggttttctcggcgtaggtacgatcattgtaaccggaaagaattacgtcaagggattgacgacggcggcaagtctgtggacgaccgcctgtcttggcatagcgatcggcgcgggatatatcgcaggaagcctgctggctttctttttcatcgctttcgttatgactgtgctgacagctttaagccattatgtggatgagcataacaccaagattaagttgtatctggaagtggataaatcagacggcattgaggtgctgtatgattatgtgaccaagaatggctacgagattgcttccgttgacaagcagaagcggcaatctttacagggcaaggacacggtgcttatggtcgtgatcgatctgaacaagcgatgttcgcatgcagacttcatcaatggactcaatcagaacgattcgatccattacatagaagaaattcgataacagagatgcaaatatggggaaactcggttgagtttcccccttttttgttttataattctctaatataagtaaaaacagaaagtaggaaaaaatatgtcagaacacgataatgattttcgagaagtaatagatgaagaagaagacaagaatgcggatgtcgtagaagtgacaggcgatactacggtagacccaagcgtcgcagatccgaataacgacaaaaaggatgattatgaggacatctgctatatctgccgcagaccggagtctgttgccggcaagatgatccacattccaaataacatctgtatctgcaacgactgtatgcaaaagacctttgattccatggaaggttttggctttggcagtggggacaatgcaagtttaaacaacattgatttttccaagatgccaaatatcagcatggtaaatctttcggatctttctgatttcatgccgaacatgccaaactcacagcgtctgaaaaagaagaaaaagaaagaagacaagcaggaagcacctgtgctggatatcaagaatattccgccaccacacaagatcaaggcagaactggatgagtatgtggtcggacaggaatacgccaaaaaggtcatgtccgttgccgtttacaatcactacaagcgtgtggcaaccgggaccatggatgagatcgagattgaaaagtccaatatgctcatgatcggaccgaccggtagtggtaagacctatctggtaaagatacttgcgcgcctcctggatgtgccgcttgccattacagatgcgacttctctgaccgaggcaggttatatcggtgatgatatcgaaagcgttgtttccaaacttttggcggcagcagacaatgatgtggaaaaggcagagcgcggtatcatctttattgatgaaatcgacaaactggcaaagaagaaaaataccaatcagcgtgatgtcagcggggaatccgtacagcagggcatgctcaaactcctagagggagccgaggttgaggttccggtcggagccagcagcaagaatgccatggtgccgatgaccatcgtagataccaagaatatcttatttatctgcggcggggccttcccggatctggattctatcatcaaggagagactcaacaaggcatcttccatgggctttatggcagatctcaaggataagtacgacaaggaagaaaatatcctgatgaaggcgacagtcgaagacctcaagaattttggcatgataccggaatttctgggacgtctgccgattctcttttcactggaggcactggatgaggatatgttagtccgtattctgaaagagccaaagaatgccatcatcaagcagtatcagaagttactggaactggatgaggtcaagttggagtttacggatgaggcactgcatgccattgcaaaacaggcaaagcagagagaacttggcgcaagagccctgcgtgccatcatagaggagtttatgctggatatcatgtatgagatccctaaggatgacaacatcgggaaagtcattatcacagaggactatgtgacgaaaaagggcggaccaaagatcgtgatgcgcggagcagaagccaatctgatcgaaggataattttttacggtattgagggagtagatatacatgagatacatcgcactgacggaagcaaaagcagggatgcagctggcgaccagcctatatgatagtaatgggcgaacgctggttggcagtcatatcctgctgacggacaattacatcgaaaaactgatcgaatacggctatgcgggtatctacatcgaggatgaactgacacaggacattgaggtggaggatgccatttcgccgcaactgcgtgcggagggcatggattgcatcgaaaaaagagatattgacggctgcaaggtcgtggcagaaaagttggtcgaagagatcctttccaagggaaggatttctttggatatgctggatctgcgttcctatgacgattatacctatgcacattccgtgaatgtaggtgttttgtgcggtgtgatcggcatggaaatgcacatgaatgaaaaagagatggcacaactggtcacggcagcccttttgcatgatctgggcaaacttgccatcccgggggagatcctcaacaagccggggcgtctgacccagaaagaatacaagcgcatgcaggagcatccggtcatttcctatgaactcatcaaggatcgttttgacctttctgcacagatcaaggtggcggttctctttcaccatgaaaatgtcgatgggacaggctatcctaatggtgtcatgggtgaggagcagactctttttaccaagatcttacatgcggcagatgtctatgatgcgctggtttccaagcgtccttacaaagagccttatgcgccgtgtgaagcggcagagtatctcatgggcggttgcgggatcctttttgaccgggaggttgttgaggtcatgctgcgttccatccctctttatccaaagggcaccgaggtggaattgtccgatggcagggtcggtgtgatcaaggagaatgcggatgcccacaatctgcgaccgatcgtgcggcttttggatggcacgacactggatctgtctgaccgtgccaatatgtcgatcgccatcttaccgccaaagggcaagcaggaagtttctacttcttctgagaccgagcggaaggaaatgatcaagcatcagcgggaggttcatatcatcgcggtggatgatatgaagaccaatttacagatgatctatgacattttaaaggatgattacaaggtgacgcttttgaagtcgggcgcacaactgatcaaatatttagagaagaatccatacccggatctgatcctgttggatatcgacatgccgcagatggatggcatcgaggcggcaaagcgggtcatggatatgacaaaggagagtgtgccgatcatgtttgtatctgccctctgtgacaccaagacgatcatggcatgcaaggacttaaatgtggcgggctatgtcgtcagaccatacaagccggtttacatacgttccgagatcgagcgtatcataaaccgatgggaggcaaattagatggtatttggatttcaagtggtatgtttgctggtgacactggtcacggtatttgcctatatcgcgcatcatgtgtattccagagaacatcgtcttttgcctctctttttaggcgtaatcgccgtctttgatttttatcggatcgttttgatgctgacgggagccgtaggtctttttgcccagttggaaaatctactgatactgacgctgacgaccgttatctcttattatgcggtcgattatctgcatatcaaattgcctcacgctatccatgtg

SEQ ID NO: 12643 - DNA, 3419 bp, Unknown
  gut microbiota DNA sequence
acacagtaagcacaggtatcacttccccaggaacagagaaagatcagccataccagatactctccaccgtccaacattctggtctggtaaataaaggaaagcatcattgccacataaaacagggcgaaaaaacaagccatgatctgatctgccttatatttggggtaagagaacacatagaccgccaaaagcaggatcaaaaacagcataggcaggatcataggatccgtaaaaaagccaaaatataaattcagataaaaagcaatggctgccagatagccaacgactgccgccaatgacttttccatttgaaatacacggtataactcaaacataccaatgagggaaatgatccccataacagaaagcaggacattgccccctgtgataattactaccagggcgatcgcaaccaatacgataccactgatcaatctagtcttaaacattgtaaaacctcttaaacctttccatatcttcgatctctattttcatatgcttccacagcttttcttaattcctctccatggaaatccggccatgcgaccggagtaaaatagaattctgcatacgctaactgccacaataagtaattggataagcgctgctctccactggtgcggatcatcagatccgggtccggcaggtccgcggtatccagatatttgctgacagtatcctcactaatggcatcagcatctaatttatgttcttctacatcctgatacatccgcttgatgccacggacgatctcatcccggctaccgtaattgatagcgatggtcaggttgagtccggtataggatgcggattctttttccaaaaggcagatcttttcctgcatggatggatcgagtcttgaaatatccccgatcacgcggatacgcatattattcttctttgctgtctttaaacagttcttcaaatactggttcagcagattcatcagggctgtaacctcttccttggagcggttccagttctctgtcgaaaacgcatagagagtcaggtactcgattcccatattgtatgcttcctcgcagacaacctctacattttttgctcctgcggtgtgtcctgccgtcctcggcagacctttcgcctttgcccatctgccatttccatctaaaataatggcaacatgtcttggaacactcatattgtctcctttctgcttgtaaaaaaaggacacttacgcaagtgtccccttttcgtcaaaagactataccgttaagatctcctgtgtcttagcctcaatggccttgtccacttcagcaatatacttgtctgtaagcttttgtgcctgattttccaattcttttacttcatcttcagacacatctgcttccttgccatatttcttaaaggaatcatttgcatctctacggatattgcggatagcaaccttggcattttcgccatgcttcttgacatcctttgccaattccttacgacgttcctctgtcagttccgggaataccagacggatgaccttaccatcgttggtcgggttcagtccaagatctgcaactaagatcgccttctcaatatcctttaacaaagaagactcccaaggctggatctggatcatacgtgcttccggcacactgatatttgccacctgctgtaatggtgttggtgcaccgtaatagtcaactacgaccttatctaaaacatgaggattggctctaccagcacgaatggtggtgtactcctcaagcagattgttgtaagacttttgcatcttatcttcaaatacttttaatttttcgtccatcattatcctccattatacggtcacttttgtgccgttaaagtcgcctgagattgcttttacaatactattttcttcctgtaatgcaaaaacatacattggcattttattttccatacacatgatagaagccgtcagatctaccactgcaagtttctggtcgatcacatcttgaatcggcaggacatcataacgcttggcatttggattggtctttggatcactgtcatacacaccatccactgcctttgcaagcaggatcacatctgcctcgatctcgatcgcacgcaaaacggtcgctgtatctgtagagaaatacggatgtcccgtaccacctgcaaaaaatgctacctttcctgctttgaagcatgcattggctgcatccttagaaaacaaggttgtaaaagcaccacaggtaaatggtgtcagtacctcggtatccatcccaacataacggaagatctcagatacatagatacagttcatgatcgttgcaagcataccgatctggtctgccttggtacggtcgatcgtctctgaagtacgtccacgccagaaattaccgccaccgatcacgataccgacttctgtaccggcatctaccaactgcttgacctgcttggccacctgaatacaggttgcctcatcaaatccagtcttcttctcacctgctaaggcttcgccacttaattttaataaaactctcttcatcgttctaccttcttatctcttatgcaaacaagccttctacatcaacatctgcatagcactgtgaacagaaaccttcgataacagcaccattgttgatctgaacagaacgtgacttgatattacccataacaactgcggaagtatctacaacaaccggtccctgcacatcgatatcaccctttacggctccggcgataacggctgatgttgctgtgatattgccaatgataacagaaccaacaccgatcttggctgtaccggatgtattgacctctccctcgatcttggctgcatctgcaaagaactcagaagatgtgctgtttccatgaacgacaccggtaacaaccaacttgccgttgcaggtaatgttgccttcgatgccacccttgacatctacagaaccggtagactcgatatcacccttgatggtcatgcctgcggtgatcactgctgtctcatcatcaacaggtgtgctcggtgctacgaccggatttggtgtcacattgactgctggtgccacctcgcgaactggctcatttactacttctcttgtttccattgtcactgtatcctccactgtgttttcttgttttgctgtagccggtgccgcctcttccggtgtgccgtctactctctttgtaacctgctccaataaaccgtccagttttgacaattcggattgcacatcgatctcttcatccaatgtatctgttgcagtgtcttctgtatctaattcctctgctccagggacaagatcgttgactgcctctgaaaagtcatccttaaaatccttgaaaaatcccattttcattcctccgtatattattgttggatactgacatgttgtatgaccgttgtatcctcatcaatcggtaaaagcatggctccggattgctgtaatgcctcaatcattgccggtaaagcctgtaccgtt

SEQ ID NO: 12644 - DNA, 35968 bp, Unknown
  gut microbiota DNA sequence
cagtaaatgcatgtgatgttgcatcaccgctggaaacattccagtcgaaataagtaatcccctgatcattcagataagaaataaattctgacatatcggtattgctgactttattgctgctgccacccggaaatctgtaatatctgcactccactccagtcgtgtcatagatcagattctggatgcgctcaaagtcattttgaaaggcctccttggatgcataaatatcactgtatttgtgtgaataagaatgcatagcgatcgtatgtccctcgtctacgatacgcttgtaggctgcctttgatgcctcgtcttctttgcctgtcacaaaaaaggttgccttgacgttatagtcatccagaacatccaaaattgcattggtattatcacttggtccgtcatcaaaggtcagatagaccttatgcagatcttctgcagtcgccaaattttctttgtctgatgtattctgggtcagttttatatctgccgtatccgatgcactctggttgaccttggctgatactgccgtggacgaatcgtagtccccggtcaggatgttgatctgcttttgcagtgatacaaccttggcgcaaagaatacaggtgatcacgatcgaaaggatcatccagacagagatcacggtaatgatccctattctgatatgttgcacacgctttctgcgattcctttgctctttcaggactttatgttcctgttcgctcatattagttttctccgtcttctttttcttccagtttgaacctgctgactacgccagtcagttctcttgcgatgacatcctctttctctgccatctcagaaacattgtccacatgatctgccacaactacaaccttttccgtcatattgccgctgacctctgtggtatcctgcgtcgcttctgcaatgctctgtactgcggcagtgacctcctgcatgatctgcttgatattgtctgacatattggagatattttctgccgtacgttcgatggatgctgcatcctcgccgtattgctttgccacctctacaaaattgctgtaatccggtgtaacatcatttaccacaaagcccagcatattttgtgcatccttggtcagggaatcaaaggcattctgtacctgtgagatcgtattctggatctgtccgacagcctctgccgtgctggttgccaaagatccgatctctgatgcaacgacggcaaatcccttacctgcctctccggcgcgggctgcttcaatagatgcatttaaggataagaggttgatctgctctgcaatttcagaaatgacatttgccatttcctcgatactgctgacaacctttgcattctcaatactctcagccagacgttcttcaaattgctttgccaatgtgcttgctgactcaaaggacttgcggctggtctcgccgacctctttggcacgtccacggatctcctgtgccattgccgtactgttctgcgtctcttcggtcaaaagattgacattagaaagcacttcttcggtagaagcattgacttcctctgtcgcagcactggtcgtcatcatcgcattgttgacttcttctatattcttcttgatctctgcaaagttctcggataattcagtcgtagcactacgcaatttcgtacttgcttcgtcaatatctgtcgcatgctccgcaatattgctgattacgtctttgttgctgtcatacatggcattcaaagagccgcccatgacgccaagttcatcctgggtctttacctgtatcggatccacggtaaagtcaccttctgccaaagatcccgcaaaggctttgacacggttcagtcccttggaaatggaattaacactgaaaataataaccagggctaccacgatcagggcaacaatacagataccaaacagttttgccaaaagctgcatgatcggctgggtcagttcagcgttcggcatagtgataatcagtatccatcctgtagcatccacacgggaataatacagattgatctgtccgtcactgcctttataacttgtctctccactatcaccggctaagatcttttctgctgcctttgccagtgccggcgcatccttgtcctctgtgatcacaacgctattctgaatcttgtcacccgctgcaccgccgatatagacaccctctgcggtaaggagcatgcccctgcctgcatcgcctacttttatattgtcaaccaatgtcgtgatcgcatccaactggatatctacggtcacacagccgataaactgatcattgactaagatcggcatcgcacaggtcgacataatactatcagaagtttcatcataataaggatcggtaaataccggttcggtagacgccttggcaagttcgtaatattcctgggcgaaataattgtattccgcattgctgtaatcataggtcgtcgccaactggtcgccatccttatatacataaggtcccatatactcagcatctgcctgataagcataaggctcaaaccagagtccactgccggataccatatcattgtcctggatcagttctcctaacatcttctcataggtatccatcgatgtcgtctggtaggtagtcgctaccacacgagagatcgactgtgccatagaagaaactgtgtgcagatcttcgcccatgacgccgctctgtgcagacaactcctcctgcatcctgctgtcgatctggtcgtttatgatatcacgactggaaaaaccgatgacggctgtcaaaagaagcattgccagaatcacaaccggcaaaataacaactaacatttttgtcccgatcttcttaaacttcatagagacttcctccgtaaaaatatataatatttcacgtttattctatcataattttccaggatgtatatactgattctgcataatttctacatttttcgtctattttcgacaattaaaaaaatatcagtcgcatctcatttgagaactgaccgatattttttgatcttttaaagaaaaagcaccacgattggaatggtaatgatggaaaaaagtgtcgtcatcaaaacgcccttgctgcatatgtcctcttcttctgtctttccgccatattcccggacgatcatggcaataatactgcccgacggcatggcaagcataaggataaagataacaaagagcatggtatccctcttgagtgggcgcagcagaatggcacaaagaattgggatgaccaaaagtttgatagcactaaaaatataaagttttacatgcccgaagatctctttccaaggcatctgcgcaatggatatgccaatgatgatcatggaaaacggaatcacggcattgccgacataatcaaagaaggtcacggctccctgcgggatgtttggatggaatacaaaaatcagtatggcaaaaacagcagagaccgtccccggattgatcatctctttgactgcatttttccgctcctcttttggcagacttctctgggcaaaggcgatccccagcgtatagatcaaaatattatagatcaggatataaaaggtaatatagatcacacagccatttccaaaaatggaacgtaacaccggaatgcccataaatcctacattagaaaagatcagcatcaactggtaacgattttccatcttccccacccgcaagactttagcgattggaaaagaaagtccgatcaaaagcacaaaataaaggaagatatagaaaagattttccagcaagaggtctttttttgccacgactgtcttatctaagacgccattgatcaagagtgcaggatttaggatgttgaccagtaactttgacaaacggtcggacgtatcctgcgtcacccagtgcaccttatatgcataaaatccgataaagatcatggcaaacaatgccagcatctgttgtaaaactacaaaaaaattcatcttttttcctacttttctttcgcccatgccccgctgtcatcggaaataccaaattttgccgggtcaaataccgggcgctttttctcttttttttgcacttcgtaatcttttaaaatggcagaagcctgtttggataacaataaaatggcaatgatatttgcccatgccatcagtccataaccgatatctcccaacgcccacatggcatctgcgctgaccagacagcccataaaggatgccagcacaaagatcatgcggcataaggtgatggcacgctcgttgcccccggtcagataacggatattcgcctcagcctggtaacaatagcctgtcatggaggtaaagacaaacaaaacgataataaccgctaaaagtttaccgctccaggaaccataagaagacatcagggcgtgctgggtccacttgattccagcctctatgcctccggtctggtctaagagcaggtttcccgcgccgtccgtcacatcataagtaccggtcaaaaggatgatcagtgccgtagatgtaccgaccagaagggtatctacatagatggaaaatgcctgcaccaatccctgctttgccgggtgggaacactctgccgctgccgatacgatggcgccacagcccatacccgcctcattggaataaatgccgcgcttgacgccccaggcaatagctgatcccaggataccgccaaacaaaggctgcaaaccaaaggctgactgaaagatcatggcaaaggttaccggaacccttgtgatattcatgcccagaatgacgatggcaagccccatatagatggcgcacatcaggggtgccaaaagttctgcgatccttgcaatgcgcttgatactgccaaagacaacaatcgcaagcacaatacagcagatgaccccgacaatgactttatcaaccgaaaaagcctcctcaaaaaccgttaccaaagagttgatctggactcccggcatcaaaacgcccggtcccaagaatgcgaccacggcaaaaagaatggcataaggcttgcattttaagccacgttctatgtaatatgccggaccgccgacaaactcaccaccggcatggcgcactttatatgcctgcgccagcgtcgattccgtaaatgcagatgccgcgccgataatggcaatgatccacatccagaagatcgcgcccggaccgccataaaaaattgccgatgcaacaccggcaatatttcccatccctactcttgctccaacagtggttgcaaatgcctgaaaaggcgtgatgccatttccgtcttcctcgccgtttttaaggacacggcccatctcttttaaaaggcgcagttgtggaaaacgcatgcgcaatgataaaaagagccccacgcccagacacagtgccaccaaaagcatactccagatggcatcatccatccgggtaacgattgcagaaaatctatccatcttttcttattcctaacctaataatttttcgatcataagcgggtcaaagacgacctgcttcttctgatccacctcaatctgatacagggcatttgcggcgatatgttctgccgcctgttccagatcacgaatacctgaggtattggcgtaaagttcgatcaccttatccagtgcttcctcagacaagacacattcctcctgccgcatgccgatacgctttaatacttttggcagtgcaaaacgtgagaaaatgatcttcttttcttcgtcggtatagtccgggatctcgatcacggcaaagcgcgacatcaatggtgcactgatctgatctttgtcgtttgccgttgcgatcggatagacgccattggtcgggatcatacattccatgtaattgtcggtaaagcccagattatccaaaagggtcaaaagcacatctgccggattgccgttgcccttgccggatgccgccttatccaactcgttgatgataaagaccagattggattctcctgccatggaaaaagcatccatgatgatacccggttttgcgttggcataaatgcgggaacttccggtcaactgctccggatcattgatggaagacatatccagtgtcgtccaaggcatgcgaaggatccttgccacagcataggcgatctgggattttcccgtacctgccggtccgatcagaagcaacccataggcaggcagtgtatgggtacggttgatctggatgatcgtctcgataattctttgttttacccgctccatcccatacaattcttcatccagaatacgtctggcttctaccggatcgatggcttcaaaatattggtttttccattgaatattcatcataatggaaagagcgcgctgcgcgtgtctgcgctcctcgggtgagacttcatgggatttggcaactgccagatttctccttgcccaaagccggatatgatccggcagagtcttgcccgcacaggtcataaaatccgtgatgctctggatgctggtcagtttcatatcatccccggactcatccatctcctcatcctcagtcagatctaccggtgcctgacttgcaaaaagcctctccatcataaactgtaaaaaaccgtcctccgcagataacttggtgccaccaccaaaagccatttcgcggatgcggtaaactgcatagcccacggtcgtattgactcccgataactgcacctgaatgtggttttctcccagccattttaaaaggcttacaaaacgggcatccacgcgcagaatatctgcatttatcgtcatcccatccacatcaaaggcaaaggctgtctgcgtattctggttcagaaacgtaccgttggaatgatgcttccactcctgtctgctatgatcgaggatcaggatcggatgcttttcatccgcgtacgattcattggatgaaaagaccgtataggtgcattcacgtttcttctcctcttttggtttatctacaaaatcaaacactggcatgtgtttttcctccttgcttatcttatgtctgcaataattattttattatagcacaaaatagaaagatcatgctcgctttgtaccatatctgccaaaaattttgtaagtactattttttagatattttccatatatcttctttatgatattttctttgcatggcaaaagtatgctctgttcaatattattttctgaatatttaacccacataaaaataacccctacgaaccgtgtcaccaccattcgtaagggttaaaatcatttcaatatttaggaaaagatccgattatgcgttcatctgtgcagcaacttctgcagcaaaatcttcttccttcttctcgattccttcgcctgtctcgaaacgaacaaatcctttgatcttgatgttagcgttgttagccttagcaacttcttctacatacttagaaacgatctgcttgccatcttcagccttaacatatacctgatcaagaagtacaacttcttttaattccttgttgatacgtcccttgatcatgccttcgataaccttctcaggcttctgagactccttaggatcgttagcgatctgtgcacgaaggatctcttcttcgtgagcaagatattcatcacttacttcagatctgtctgtgtacttaggatttaatgctgcaacctgcatagcaagatttctagccatttcctttacagcatcgttgatcacgtctgtctcaacgtcaacaagaacaccaatcttaccacccatgtgaacatagtcagcaacaaaaccgttgttctcttctacctgagcgaaacgacgaatctttaagttctcgccgataacagcaatctggcttgcaagttcttcgtttacagtctttgttgtatcaagagaccatgtctcagccagaaatccttcgatatctgtagcctttgtatccattgcctgcgcagcaacctgtgctacatagttctggaacttctcgttcttagcaacgaagtctgtctcagagtttacttctacggcgactgccttctttgcatcatcagatacctttaatgcaacgataccttctgctgcgatacgaccagccttcttctcagcctttgcaagacctttctttgcaaggtactctactgcagcgtccatgtcgccatcagtctcgccaagtgccttcttacaatccatcatacctgcgcctgtaagttcgcgcagttccttaaccatagctgctgtaatagccattgtcatgtcctccaaataataaaattatgcttcttcgttctcttctacttcttctgcgttatctacatcaacagttccctgctttgcttcgataacagcatcagccatcttaccaacgataagttttacggcacggatagcatcgtcgttacccgggatcacataatcaagttcatccggatcacagtttgtatctgcaataccgataagtggaataccaagtgcatgtgcttcctgtacgcagattctttccttcttagggtctacgataaagatagcatctgggattcttcccatatccttgataccaccaaggttcttctgtaacttctctaattccttcttgaggtttgtaacttccttcttaggaagaacatcaaatgttccatcttcagccattgcttcgatctcttttaatctagcaattctgctctcgattgtcttgaagtttgtaagcatacctccaagccatctctcgtttacatagtacataccgcaacgctcagcctcctgcttgatcgcatcctgtgcctgcttctttgtaccaacaaaaagaattgttccaccctgctctgcaatatcaaatactgcatcgtaagcttcatctactttacctacagacttctgcaagtcaatgatatagataccatttctctctgtgtagatgtaaggagccattttagggttccatcttcttgtctgatgtccgaaatgaacacctgcctctaataactgcttcattgaaataacactcattttcttacctcctggttatttacttccacataattcatcttggtaaaagacccgtattttgggcaccgatctaccaatccttatgtgtgattaattttgagccgttgacaattatatcacagcccccatggcattgcaaggactttttctactgtgcctgcttggtcgtcagcaattctccgatctcaagaaaagtggctccctccgggatctgataggtccccggcaaaagttgattgtccagatcctggtctgaaagatagagatcaaacgacttggcattatcgacaagtcctacctcctgcaaatgctgtgcgatcgtagccgatgtatcgccggatgcgatcgtaaattctatgacattcttttgaccgccatcttctgatgtcgttgcatcatccgtattgctgtcacttgcatcggcatcatccttttgatcctttgctgtctttgtatcttttttatctgcactgtcgctatcatccgccggcatttccatgcccagtgcctctgccttttgcatgatctcatcatccgaaagcgtcggcttataaacggcaaatgcgatcgtaaagatcagggtcgtcaggatcacgccaattccggctccccgtaaataatatttaaacctcatgtgcctgctcctcaccaaacaatcccaagaccagtttgacctcgcccagacctctgcccaactgcttggcgatctccacctcactcatgccttctttatacatagaaaggatctgtgcattcttcttgggttccgtcgtctgttctttttcatcctctgtgactacctgtgaacggaaagcatcttctaaagaagtctgcttttcttcctgcgacgccatttcttcctctaaggtctctgcctccgcgtccatagaaacaccggtcacctgcaacttgtcatccagtgtctcctccatctgtgcgaccgcagactgcatcagggtcagttccttcatgagttctgtcacccgctcctgcttgtcatttagcatatcgtacaaaaagacgatctcatcatgcgacttgttcatggatgtaagcaccgtatccgaatactcgctgatggctaagatcttttcattggtctccttttctccgccacgctcgatctgtgccacggcatcctcgaccttatcctggatcttttcatcgatctgtgccgaagcgtcctgcattctggcatccaagatcactttgatctcctgctcgctcattttcttcatttcttccagatctgctttcgataacttttccgaaacaaaaaaactaccgatcaggcagaccatgccaatcacgatcatggcaatctgtaaccctgtcatttcctgtgctccttatatcttgatatcaaacgaaggctgtcccgtcttgatgcgcacgacaccatcgctatccatgtgttttttctttctggctctctttcgccccttggcatcatagcctctgccattgccctcgccgtcttcataattatactcatgctgctgggatttttccatctgttgcaccatagaactggcattctgctcctcgtgcatgaccgcgacctgcacattctgctgttgcagattggctttgttgtcttcattcgcctttgcctgagaaacctcatgcgtattctgaatcattccgttgaaatccaccggtcgaattgacataagacatcactccttattacatgttgttgatgacgatctcgccgtttttgcgttccagacaacagaaagatcgtttttcctgcatcacgcaggaggcatctgaaatgctgatctgcgttcccggataaatatcctttttgaccaccacttttgcatgcgttcccgtcatcatctcacgctgcaaggcttcgtattctgtctgatttgcctccagttgccgcttggcttcattgaccgtcgcaaggatctgtgtaaagtagattttatgttttgcatctaaaggctgacctgtcttgacataggcaacgtacttttccatgaccgggcgatatttttccaaggtctttttgtcttctgcaatatccttttgcaactggttgaatcgttcctttttctccggcggcataccgacctcgatcacggtatgtgctcccatggaagaaccgatgctgtttgcctcgacctttccaccggcgcggatcacaccgccattgataaatccttttttttctgccacaatgacatcttcaccggcagaaacttcactatagataatggaaccggtctccacataaccaccggcaaagaccttggcgttttcaatgtatttggtgatgacattgccttttgcctctagcagtccgcgctgcatcccctggataccgcactggacgatgatgtcaccacctgcctgtaacatggcatcttccacactgccgtcaaccacgatatcgccccgcgaggtcacgacaaatccaccacgtacgcttccatggatatgcacacttccggcataattgatatcacctgtagaggtatctacatccgcctgcacttcatacacatccgatacaaagaccttgccgcccgtcaaagatacatgtccggtcacatcggaaaacagatgcagtccgtcctcggagatagaaatatttcttccgtattccaagactttatttttgaccgatctcggcggcagcgccttgccaaagacatccatgcccggctcgccctcgtccaccggatgaagtgtcgccagtttgtctcccttttcgaccgcacagatcgtatttaaggcatgataatcgaccgagccatcctcattgtgctttggttttaaggatggattgatgttaaaaaagtattctatctttgcgtcatgtccgtggcgcggctgcttgccctctgcgaccacgatctgtgtgcaatagatgggatttgccagaaaatctgcaatattttcctgacagatgccaaagcgtatccccatccccttaagataagcaagaatatcctgctcatttaaggaagcgccgccctgtgacggcggataaaaggttgccgtgatcttcatcttatccaaagagcaatgcatatgcatggtctccgcaaactccagtccgtctccactacctaccggcaccacgcaatcgcttcccatagcgattgcctccgccagttcgcgctccctgtagccgctgatcccatgatcgtccaaaaaagaagccagttccttataagaaactggcacaccttctgcttttggcgcaaagagatggcatacggctaattgctctttccaagtaattctaaaatacccattccgttgctccataaaagccccctattcaatatttgtcaggatccccagataattgcccatgcgcttgcgcagctttgcgatcgcttttgtatgtaattgggacactctggactctgatacctcaagtaccatactgatttcctttaaggtaagatcctcataataatacatcaacacaactttgcgttctttttctgtcaaggtctccaatgcctcagaaagcatctgctttaattcctgcttggagatcatttcctccggctggatgaaatgcgaattgcgatgcgtatccatcgccggttctgtgccttgctcgacaaattcgttcaaagacaccacattggtcacttttaactgtgactgccagtctacaagttcatcctcggataagccaagttctgcggcgatctcctcatctgtagcggtctttccggtacgcatctccaccaccttgacggcttcgtcgatctttttttgcttttgtcttaccgttctcggtatccaatccatctttcgaatctgatctaagatagatccccggatacgcaggctggcataggtctcaaactttacatccttgccaagatcgaacttgtcgatcgcatcgatcaagccaaaaacaccataactgaccagatcgtcaaactccacgttattgcccagatacatgctaagacgtccggcaacgacttttacaagcggcgcatattcgattataatctgctctcttatctccggtgtgggctttttttgaaaagcttcccacaacttctctttgtcaaccgtcttcatctatgtgtctgcccccgacgtttattcttcttcctggtctgtcttatcctccgagtctgcgctatcatcctctgccgcttccccggactcgctatcctctgtatcttcttccatgacacggaaggaacgatccagaagtaccttgatccctgtaccgatcaatgcaaaacatatcacagcaatgaacagtcttttggtataaacagaaaaggatacatcctggatggcagaaaccaaacatgtgattccagccgctaatagagttataatgatcggaatctgttttgttttcataggtcctccatcagatgtatttttcctgtctaccgacggacttgatcaagaactgtcctgtctcactgtataattctacggtccgtccaaaattcaatccggtatcttccgcgatcagcggaatccccagtgcctttaacttggctctggatgcaatggcatttttctctccgatattggttcccggcgaactggcattgctgagttcaaacatcttggcaccaccggcgatcttggctactaatttgctgcggtttgctcccgcctttatcatatcatcgtataacttttgtattcccgtatcggcaaatttggcaatattggaattatttctgatctgtgtactatccggtaacatgatatgtgctagtccactgatctttgtcgtcgggtcatacagggcaatcccgatacatgacccaagtccaatggtggtaagcacatccggcgacttacagatattcagatctgccataccgacttttataacttgtcccatagactccccctataatggcaatccaagtgaagataagatcttctcgtaggattcttcttccggcatcaaaatgaaatagccgttgatctgcagttcatcgctgaactccgtcttaatcataagggcgttgtctccaaacataccaaactgaatggctggcacactcaagatggctgctgccatatccaccgctacgaaaggtacggtcggtgtgatcgtaagcccggtcagaccggacaaagcagaaagataagatcctgctatgatgttaccgacttctttgactgcggacagatccatttcgtcaaaatcttccatgtaatcatccggacgcatcatcaggcggttgacaatatgatgtgcagactccatgtccatcaaaaacatcatgctgccatcgatatcactgccaacaccaagcatgatgccgacgatgacctcgtcctctgctccaatcgatgttccgatctcttccaccggcaaaaactgtacctgtggaacactcatatcaatacgaagtccaagcatatcagcaacagcggtcgttgcattgcctgcaccgatgttaccgatctctgctaaaacatcacggtatttttcatttacttcctgtaaactaatcatgtattcctcccgctttatgaagcatctacttcatctaagatagatgagatttcaaggatagagatcagttcatctccattctttccaatgccgttgatgtactgtgtcttgtctgactgcgagttctgtgtattgcggtcgatctcatcctctgcaagagcaatgacttccttgacctcatccacaacgataccgaccagtccctgctcctctgtctttaagatgatgatacgggtaatgtctgtaaagacatcatcctccaggttcatcttgcgacgcaggctcatcagtggaacgatctcaccacgcaggttgataacgccgatataatgtgccggagcctttggcacacgtgtgatcttgcacatgcgcacgatattatctacataggaaatatccagaccatactgctcatttccgatggatacaactatatattgtacggtttctttttctacaacatctaatccgttttcgtctttcatgtccttctaccccctattaaaagattgcgttcacatcaatgatcagtgcgacttcgccatcgccaaggatggtagcaccattgatgatcttattgttgtcaatacatttgccaagtgacttgataacgatttcctgctgtccgatgagatcatctacgacaagacctgcgtaattgtcgcccttgcggacaataacaacggtcaagttgtccggctcttcctcggatggtgcagagtctaacatctgatccagacggatcaatggaatgaccatgcctctcaagtggatcacttcttctgcctgcacatacttgatatcgctgacaggaatattctcgatattctggatagatcccaaagcgatcgcatacttctcgtctctgacctcaaccatgagtgcctggatgatggcaagtgtaagtggcaggcggacaataaaggttgtaccggttcccttgacgctcttgaccgtaacatcaccgcccaaagcctcgatattggatttaacgacatccagtccaacacctctgcctgagatgtctgtgatcttctttgccatagaaaaacttggcataaagaggaaatcgatgatctctttctgggttagattttctgcctgttccggtgtgacaagacctctttcgatcgccttttccttaaccttttctgtatcaataccggcaccgtcatccttaacctcaatgatgacattgttgccttcctggaatgcgtttaagatgatgcttcctgtctcaggcttgcctgccttctttctttcttccggtgactcgataccatgatctgcagaattacggagcaaatgctgcaaaggatcgccgatctgatcgactacggttcgatccaactctgtctcttcaccggacatgtaaagttccattggcttgttgagtttacggctcaaatcacggatcatacgagggaacttgttgacaacgctctcgattggaaccattcgcactttcatgactgactcatgcagattggtcgtaatacgttccagatactcgatctgatcatggaaggactggttgttgccctcgccgttttgctcggaatcactcagagataccagactgttctttgcgatgataagttcgctgacctgattcatcagagcgtctaacttttcaatatccacacgcacggttcttgctgtcaccggcttgttgttgtttgccttagcagacttggcagatttctttgttgccttggctgccttcggtgcctcagcaggcttgcactctgtctttgtctcttcctgcttggtctccggtgctgcttccggttcttcttcctgcataaattcttcatggctggactccttggcatccacaccctcgatctcggaaactgccttgatcgcatctacgatcggctgtaattcctgactggatgcaacaaccagactgaaatccagatcaaacttttcatcctcaatatcctgtgaacttgggttgtaagcaagaatctcgccgaaatcctctactgccttaaataccaagaaagctcttgccgcctttaagaggcagtctttttggatatgtacggtaaattcatagatatggagtccggattcctgtgcttccttgatcttgctataggtcacatcatccacttccatatgagaaagtccatctgatgcagcctcttctttggcaggtgcagccttggtctctactgcttcctctgccggtgctgctgtggcaccgccgtttaagtaatcatttaactgctggatcagggcttcgttgccgttgtctccctcatccgaagtagccttgaccgtctcaaggtattcctcgatcgcatccagacagctgaataagatatcgatcaggttgctgttgaccttgatattgtcattgcggatctcctgaaatacattttccatatcatgggtgagtcgctgcatcttcttgaagcccatggttccagccataccctttaaagagtgtgctgcacggaaaatctcattgatgacgtctttattctccggctctttttccaggatcataatattgtcattgagtgcttgaatatgaccatttgtttcgtcgataaaaatgtcgagatattgacttacatccatcttttaatcccccagtttcttaataattgcatctgctatttggtttataggaactactttatcactcagaccctgttgttcgatggatctgggcatgccatagacaacacatgtgtcctgactttctgaaatcacataaatcttcttgtgctttttgagcatctggatccccttggtaccgtctgcacccatgcctgtaaggacaacgcagaggatctccttgtaatccgaatggcaaagggactcgtacataagatctgcacaaggcttgaggctgccgatcggcggtttgtcattgaggcttaccatagggcgaccgcttctgtccttgccgatctccatatgcttgccgccgggtgcaatgtagacccagccagccctcagtacctcctgatcctctgcctgcttgacatggatggcacttgtctgatccagtcgtctggcaagagaatccgtaaatcctgccggcatatgctgtaccaaaaccagcggaaccggaagatctgccggaagcataggaatcaatacctgcaatgcctgcggacctcctgtagaacaagccagagcgatcagggtatccttccgcataccggaagatgttgcggtcgcatccttgtccacatcccagtgcactgtcgtatctacggagcgatccagtttctgagatacgcgctgggccatctcccgtacacgcttggtagcctcataaggatccaccggctgtgcatgctttggtgccggcagaccacgggatgcattgtgcagtgaacgaaggagttcacttgctaccttatctgtcataccatgcaggcggttctcccgatatacataatcataagcccccaggctcatcgcctgacggatggtctgcatatcttccgcaatggaagacgtcaaaaagatgacgcgtgggcggttctccaaagtctgtaactgtcgcataaaggtaagtacatccatgcgcgccgacagaccgatgacaacgatcgcataggcattctctactattttgttgtaagcatcttgtgtgttcatgctcatctcagacacttgaaaatctttgtctgtattgattatatcacagattttccttctcatgagtgcagagtcatcaacaatcaataccttttgcattatatttcctgttccttctttctgatcctacgttcttcttgaaaaacatagccgatcaactgctctttcatgcgtggatccttaaaatagaatttcacacgatgcgtatatttatccttggcatctgtctgcttggaatcgatcacttttgcaaccacatcgatgtccaaagatgtttttttgttctcctgcggcaactggaattctaaaaggagatattttacattggctaaagagttgctggttgtaaaccttgcgccaccgccgctgatatctaagatggttccgatgccgcgtaccgtcatctcattgcctgcggccattttttctctcacggcatcgatcgtgccctccatagccgcctcttccgtcacgcccataaagatcatcggcaccatacaggtgatccgatagtattcccggcgctgaaatttttccaaaggactggtcagtacgatctttaacagataaaaatgctgttttttgatatgatctgtcaccgtcccctgcgccttgtaaagtcccatcggtgcggagaagataaactcatagcggatgttctttggtaaaagctgcagcctgccgccgaccataggcatttgcagttctatgctgtcttttgtcacatcaaatatacttgtataatagatgccctgtgctgcgtctacatcctctttttccatcaactgggtaatgcggatatcaaccttgcagcccggcattaagtcttccattctcatatgatactcccgaacgccccctgtcttttaagaacgccccataaaattattaaataattgcgtgataccccagcggtagcggttcttgtcatcgccggtcaaaagattctgagcgatgatctcaaatgccttggtagactttgcgtttggcgcgaccgtcgatacagtcttttggttgcgcaccgccttttccagggacggatcgaccggtatcatgcccagataatgcaatttcccatccagaaatttttccacgacagaatttaatttctgataaacggcattgccttccgcctccgaggttaccttattggcaaccagatgcacattggtgccattgcggataaactttggatttttgtaaagtgccttcatcagggagtaggaatctgtgatggaacttggctccggtgtcgtcacaaggatcacttccggactggcaagcacaaactccaagacactgtccgccacacctgctccggtatctatgatcaaaacatcacataggtcatttaaaagcgacaggctgtgcaccagataggagatctgttcttttgtcagattgttgagtccgacaatgcctgatccacccgagataaaaccgatatccataggtcctgtcgtgatgatctcacggatgcttttcccgccaaagatcagatcactcagattgtattttggtaccgttccaaacataacctcgacattggcgagtccaaaatccgcgtccaggataatgacacgctgccccatcttacggaacataatcgccaggtttaccgccatgttggatttgccaacgccccccttgccactggtgatcgtgatcacgcgggcattgccaatattattttgatttttttgtttgataacatttcttaattgttcggcctgatccatatttatctgcctcccaacaagagttttaccagtttttgtgtatcgacgacctcaatgtcatccggcacattctggcctgttgtcacataggaaagctgcgctcccgtgtgcaacttgatatttaatatattaccatatgcactggtttcgtccaacttggtaaagatcagatggaaagcgcagaattcatcatagatatctgtgatctcgatgaggtctttgtactttgtggtcgcacttaagaccagatagatctgtctttcgtattgtgccggaagatttttcagcagacgtttcatatcttctctttgcccatcattcttgtgtgaaaatcctgcggtatccaccagtaccagatcataatctgcaaatttttcgatctcttttccaatatcttccggtgtatagataatggataaaggagtatccaggatattggcataggtgcgcaactgctccgccgccgcgatacgataggtatcggcggtaagaagtgccacctttttttcctgctctactttaaaacgcgatgcgatcttagcaatggtcgttgtcttgcctacacctgtcggtccgataaaaaatacgaccttgggcttgttcttggtcagcgagatcacttccggctgtcccaactttaagatcatcttctggtagacactggagatcagatagtccagcccgttggtgctgtgggacacacgatccagatcatccatgaactgattgatgtagatctcatccacttcattatccaataaaaccttatataagactttaaagaactggtggctctgctcgtctctctctgatcctaaatcttctacaaattccacggaagaaagcggacggaattcctctgcctttggctcggctaccatttgcgccgcctgtgattcacgaagcggagcgatcggtttgtgtccgttcttttccatgacctcgttgacagcggcaaatgcctcttttaatgccatggtatcaccggacaagtctttttgaaccggttctgcctttgctgcacgcagacttgcctttggtgtctccatacgattgtcagccgtttcctgactttccagatcgcgtagggagatctcctcatctgcaacggcatcaaagccatgggatgccggtctggctgacggtgccggcggtatgctaaaggaaggctgtggcatgacatcatcttccagtgcggctgtcacctcgtacatgctgcccttgaaaatgccaagaaagcccttttgccgcacttcctttacattcatgatcacaaccgatgcgcccatttcctcttttgccagagcgatcgcttcttcttttgtttttccctgaaactttttaatggtcatcttatcctgtcaccatccccactgattgtaattcaacatcggagtcgatctcattatatgaaaccacgatcagatcctttacataatcttctgtcattttcttaaaatacatacgcacgattggtgatgtcacaacgatcggtgtcttgccggtctcctcgaactttgcgatctctgcctgcaaagaatccataatggcacggatgcgttccggatctaaggtcagatatgctccctgctccgtctgcttgatggatgccatgatatcctgctctacctttggatccagcgtaatgcaggaggtcacttcattcggcacaaagtaacggctggagattgcacgttttaagccctgacggacatattctgtcaggacatcggtatctctggttgtcgctgcatggtcagcaagcacttcaaaaatagaaagcaggtcgcggatggaaatcccctcttttaagagattctgcaagaccttctggatctcgccaagacccagcagttttggtgtaagttcatccaccagtgccggattgctctctttgagattgttgaccagattctgtacatcctgacggctcaaaagttctgcgatgtggctgcggatcacctctgtcagatgtgttgcaatgatagacggcggatcgactacggtatagcccagactttccgcacgttctctctggctgtctgtgatccagatcgccggcagatggaaggacggctcaaaagtcggaattccgttgatctcctcctccacaaaacccggattcatcgccatatagtggtcaaaaaggatttcgccctctgccacctgaatacctttaatcttgatgatatattgattcggattgagttggatgttatcgcgcagacggatgatcggcacaaccgtaccaagttccagcgcgatctgtcttcggatcataacgacacgatccagaagatccccgccctgattgacatccgcaagcggtatgattccatagccaaattccagttcaatcggatccacctgcaaaagggaaacgacgttctccggtctgcggatctcctctgcctcggactcctctgccgcgacttcttcctcgatgctctcctcaccgatactcttggagatcgaatagccggagatcaaaaatgctgcaccaaaggcaccgaacaagaccgggttcagcggtgttaccagacccaaaaagatcatagatgcaccaacaatataaagtacctttggaataccaaataactgtttgatcaaaacgccgctgaaatcggcttctttggatcccttggtaactaagataccggttgccaatgagatcaaaagcgatggaatctgggagcaaagtccgtcaccgatcgtcaacagaccatattgctggatggcactcgtaaaatccataccacttcgcataactcccattaaggttcctccgatcagattgataaaagtgatcaaaagacctgctgtcgcatctcccttgacatactttgtcgcaccatccatagagccaaagaaggaggattcatcctgtaacttctgtcttctctcgcgtgcttccttttcggtaatagctccggtatttaagtctgcatcgatcgccatctgtttacccggcatagcatccagcgtaaatctggcagaaacctcagcaacacgttcagaacccttattgataaccatgaactgcacaatgataaggacaataaagatgatggcaccgatcaccagatcgcctccaccaacgaactgtccgaacgtctcaacgacatttcccggcgaacccgtacttaggatcagacgggtagatgaaacgtttagggaaatacgaaagatcgtcgtaaacaaaagcagggtcgggaaaaaggacatatccaaaacttcccgcacaaacaagacattcatcagaacgatcaatgcgacggaaatattgagcgccagcataacatccaataatatagaaggaatcggaacaatgaagaaaataattgccgccaatagatatgctgcaacgccgatatcggtttttttaacaccggatagatccattccgtttcctcctttccatcgtatatctcctctcatcttatcttaaactatttatcttttactgtaaaccagcgcaaggatctctgccactgcctgatacaactccggtggaatctgctctcccacctcgaccgtcgcataaagcgctctggcaagcggtttgttttccatgatctccacaccgttttccttggcggtttctttgatctttgccgccagataatcctcaccttttgcgaccaccgtcggtgcattttcaatctctgcatcatagcggatggctaccgcaatatgggtcgggttggtgatgacgacatccgccttgggaacatcctgcatcatacgacgctgggatgcttcacgcatcctttgcctctgctgccccttgatttgcggatcaccttcggtatttttatattcatccttgacttcctgtttggtcatcttcatgtcttcgttaaaacgatggcgctggtaaatataatcagccagccctaccaccagatagcaaagactgatacggagtcctgtatctatgatgatatcgccgatcaaagagatcgcctggttgagcggtatctcgtataagatgaataaattatttgcctgtcccttgatgcaggtatatgccacataaaagaccagtacgatctttaggatggacatcaaaaggttaaaaagcgaatctgtggaaaaaatacgcttgaagccattgaccggattaaacttatccagtttgggctctaaaggcttggtcgatacctgccagccgacctgtacgatactgatcacaatggcaaccacaaggcctgccgccaaaaaaggggctgccagacggagcagctgcagatagccctggttcaaaagtccgctcgccgcctgtacagtcatgccatcccgctgggtatcgacgacatccggtatcatcccataaaagaggtgaaagacactgataaagccctcacccagataggacacaaagatacgcagagacaggaataaagcgatcagcattgccgccgagtttaattcctggcttcgggcaaccttaccctcttcacgggcatcttttaatttttttgaagtcgccggctctgtcttttctccgcccggtccgtcctgcgcgaaccattgcaggtcataagacagaagtaacactttgtcttccttcaagttaatacattccttctataaatgacactgtcatgactttgatctctttaaaaataaaattggcaatgtccggtaataaaaacgtcgtgatgaacaaaactgccagaccaagcaggagtttcaactggacaccaacggcgaacatattcatctgtggtgccacctttgccatgatacccaagatactgttgagaatcatcatgcaggcaaagacaggcaaaacaatacgaaatccaatggcaaaaagatccgtacaatactgcaccatggaggcaagcaaggagtccatctgaaactgcgctcctcccagcggaaacaactgaaacgaatcgatcagcgcacgcaggatatactgatgcatattggaaacgatcaaaagcaagaggataaagtaagaatataaatttcccgtgatactgacctggctgcctgtcgtcgggtcaaataccatagccatggaaagcccgatatccatatcaatgatcgtacctgcaaataaaataatggaattacaaatatatgccgcgaaaccgatcagcaatcctgtaattccctctttgagcaccaatatggcataaccgacttccgaggtgtatgctgtatgttctaccggaacggcataaaaaacaagaattgccacaaatgcagataatccgatctttaccctccccggtacttccttcgcgccaaaaaaaggtgctacaaacacaaagcaggaaatccgtaccaatatcagtaaaaaatattcaaatgtacttatatcaaatgtatattgtaacataccaaaactagcctaaaaacgtgctgaagtttgtccacaattccgtcatgtaatctgtcaatgttgtcaatataaaagcaccaaagatcagcattcccaggaatacggcaacgatctttggtacaaaggtcagcgtctgttcctgaatggaggtaacggtctgaaaaatactgacgatcagaccgacgatcaaagagatcaaaagcagcggtgccgcacatatgatgatattgtagatcgcatctctgacaatatccaatacctgtccttctgtcacaaaaatcacgctctctttctatttatcagtaaaatgtcttgaccagtccgccaatgacaagattccatccatctgccagcacaaataaaagtatcttaaacggcagggagatggtcgtcggcggcagcatcatcatacccatggacatcaacacggacgaaacgaccatgtcgatcacgataaacgggatatagatcacaacaccgataataaaggctgtacgcagttcgcttaagataaaactcggaaccaatacaacaaatgggatatcatcataatcttcataggtcgtatctgagatctcacaaaagagtttgagatccttttcctgcgtctgtccgtacatgaaattacggatcggctccacggcacgatccagtgcctcttcctgtgtgatctctccattgtccagcggtgtaatggcattttcattgatctgcgtaaaggtcggccacatgataaagaatgtcaaaaacaatgccagcccgatcaaaatctggttgggtggcgatgtctgcgtaccgatcgcagatcgaacaaaatgcaggacaatgatgatcctggtaaaagaggtcaacatgatcagtatggacggtgctaaagccagaatcgttatgaccagtaaaatacgcacatttgcggataaagatccggaatctgaatccagggtcaatgataccccgcccttgcctgtgacccagtcactggaatttggtgcattgtccgttgctccgtaggaagacgcatagactgtactgccactggcataccagacgctgacacagatggcaaaggttgccaggattagactaaagatacaatatcctttttttaatttgtttttcatattcatgtctacttcttcggtaaatgttctttgaacttttgtaaggcatcggcaaaatcgcccttagccgtcgggatcgtcatattctgggaaggcatttcttttaactgctctccgctgagttgtcccaagactgtgatctcgtccttgccgatggcaatgacataataggtgtccttgcctgcctgtatcaactgtatgtacttattggtcgtcagtttcaaggtctcaacaaccgaaaggttcttgctgatgctctggcttttctggtaaccagcaatccatcgagtcacatagtaagtcaatgccagaacgattaaaaaacaaaaaagtacaatgatcagttgaaagatattctcacctgtcgatgatagtaaaatcattcttaaccaataaccttctttacggcttcaagaacacgctctgcctggaacggctttacgataaagtccttggcacctgactgaattgcctcgataaccattgcctgctgacccattgcagaacacatgataacgcaggcatttggatcctttgcacggattgcctttaaggattcgataccatccatctccggcatggtaatatccataagcaccagatccggcttcaactccgtgtacttgtcaactgctaccttaccgttttcagcttcgcctacaacgttgtaaccattctttgtcaagatatccttgatcatcattctcataaacgcagcatcatcactaattaaaatattttttgccatctcttactctcctttttatctcttatttcattatctcggtaatacgaataccgaaagattcttcaatgactactacttcaccttttgcaacatatttaccattgaccaatacgtcgatcggttcgccggcgatcttgtttaattctatgatcgttcccggtgcaaaatccaaaatatcctgaatggatttgtgtgtcctgcctaactcgacagtcacttccaatggaacgtccatgatcagatctatattttccggctggtatggtgcctgataattgccggcaaaaggttggaattgtgcaggctgcacattgacctgctgttgtgggggatacggttgctgcatatatgactgttgcatatacggctgtccctgcatgcccatatccggcatcggctgttgcggtggtatctgccctagcatggcttgttcctgcatctgcccctgcgcttgcggtggggtctgtggtgccgcctgtggctgtgatgccggttccggctgcggtgtcggcatgtcatcatccacggtcgatgccgtatcgctctccatattcgacatgatgttactgcacatctccttggcaagtgataccggatacaactgcataatctcactatccaccaaatcaccaatcagcattttaaaggtaatcttaacgaatcttccctccagaaaatcttcgatttctcctccatcggttgtatcctgcagatccatcaaggttgaggatggtgggctgatatcaatcatggtatttagcatggatgacatcgatgttgcagaagatcccatcatctggttcatagcttcactgattgcactcaaatgcagctctgtaatctcaccatctgtgtttgagccatcgcctcccatcatcagatccgtaatgatttttacgtcattttcccgtaagactaagatattgcttccatctaatcctttggtataagcgattcgtaccaaaacacatggtttttcatatttatctacaatctcatcccacgttcccatggaaacaacgggcgttgagatctcgacttttttattgactaaggaaaacagtgttgtcgctgccgttcccatgctgatattggcaatctcaccaatggtatcaacttcatccggtgtgagttcttcacctgctgccgcgtcagacgtgtcagcatccggtatcccaccactcaggagggcgttgatctcttcctgggataatacgccgtcactcatctattcctgctcctctcttatgactgatgttattctaactgcataatcttctccggttgcgccgggaagtgcagtaaatttcttgatatctccgacatagacatccaattcctggttgaccttggtattcaggcggatgatgtctcccacctgcaaacccgaaaaatcgttaacggagatcacgcttttgccaaggatcgccttgaccggaacgatcgcttttgcgatcaaagactcgatggtgtctgcatactccatctccacccgctcctgcatattggaataccagaacttggtgtttaacttgtccatgacaggctctagggtaatatacggaagacagatgttcataaaaccttccacatccccgatcttgatgctgatcgtcacgatcgcgatcatttccgatggagaaatgatctgcgcaaactgggagttggtctcaatacgctccaagcgcggatgtacatccaaaacattgatccaaggttcgcgcaataactgtacgcaggcagtcatgatacgttcaatgatcagaagttcgatctcggaaaactctcgtactttatcaagcggttctccctcgcctcctaacatacgatccacgatcgcatatcccaacttggatgccatttctacaatgatatttccctctaagggttcaaagttgacaataccaagcaagaccggattggaaagggaattggaaaattccatataggtaactgcctccgaattcatcacctctacctgtatgttcttgcgcaagtagaccggaaggttggtagacagtaatctgccataatgttcaaaaataatctcaagggttcgtaaatgttctttggaaaacttggatggtctggagaagtcatagttcttgacctgcttctcgctgcttgccttgatctcttcagcatctacttcaccactgctcagtgcctgtaataagttgtctatttcattttgggaaagtatatcgctcaagtattctcaccacccactgcaaatttctcctttttactgatattgtgccgttgggaatcctaccgctacaataaaatcagacccaaacatcttttgaagatctttcaagatctcatcctgaactgctgactgattattcttgatctcgtctatcgtatattgtgaaacaatgttgttgatgtcgcccttgatcagattgaccttttcttcgacctgtggcttaagatccttataatcactgttcttggtatccatggagatagatacggtgagcatagcgaaatgatccttgccgtccccatcctgcttaaggttgatggtctgttcatcatcaatattataaacctcgatctggtcgatcgggatattggcgttgctggtcgcactgccggactccagatccagatcaatggcgctgcataccttagtgatcagttcatttgctttttgtgtctccggcaaaatcgtgatcgtcaggatcacggtgagtaccaaattgacaaccacgagtgctaatgtaataacagtaataagatttttcttcatgattgacctctctaattatttaaagattctgaattaagcgaattgtagatcttgatctctacccttcggttctttgctcgtccttctgctgtcgaattgtctgcgatcggcacgtaagatcctctgccggatgacttgatatgtgccggatccagtgtcgtattgtcccggatataatttgccacattcaaggcacggtacatggaaaggatatcattgtcactatactgctctcctgccgccggtggcacattatccgtgtggccttcgatctcgatcagattattggtgtagttattaaggatcacggcgatcttttccatgaccggaagaacttcctcccggatagtcgcctcaccggaattaaagagcagggctccgtttaaattgatcagcgtgtagtattcattaaactctacatccacctgattctcaagaccataggattgcaaaagacggctgacctgttctgccatctgctcactttccgtaagcccggcattgtccagtgtctcctgcgcttcttctgtcgtcaccgtcgtatccggattcgtaaccgaatcatccggttcctcgtctcccttaggaagggctgaggatgaattgaaataaatatcaaacttttccagcatgctcacaccggaagatatcaattcgccatctccgatcgtcgaaccgcccgacggtaaaatactaaaggtactctgcaaagactgcacgaccatttcaaacttttctgtatcgactgttgacatagaaaacagcaacacaaagaagcataacagcaagttcatcagatcactaaaggtcgacatccacgccggggaaccttttggcggatcctcctgttttggttttgccattatgcctcacctccgtcttcactaccggcattatctcggtcagatggtgctaggaatgacttgagcttttcttcgataacacgagggttctctcctgcctgaatagataaaagaccttctacggtaatctctcgcatcatgatttccatatcattgttcacttttaactttgctgctgtcggacctgccagccagtttgcaatcaaggaaccatacaatgttgtcaaaagtgctaccgccatattcggtccgattgaagatgaatctgttaagttcttcaacatatttaccagaccaatcaacgtaccaatcataccccaggctggaccaagttctgcccatttctcccagaaaccaataacctttttatgtcttgcttccagattaatcaaatctgtttccaaaataccacgcacaagatccggatccgtaccatcaacaaccagattgatacctttttttaagaattcatcatccatatcgtgtgtcgcttcttccaatgccagaaggccttcttttcgagatatattggataaattgataatattggatatgacttccgatgcatcacctacggatggttctttcatcgccagtccaataccctttaggccgctgataaagtctgccagtttatgggatgccaaggtacccgctaaggaaccaccaattgtaataataactgatggaagatccataaagtcctcgacaatattaccgccggacgacaaaataccaaaaacaaccatgaccatgcctaagatcagaccgactaacgatgctatatccaaactattcaccgccttacatataaaatactatatcttgtgtttttcacacaaaaacccatagttacacgtttatttaatcttactaaattttatctatcttgtctacttgtaattccatttatttatcatatttctacacaaattgcgaaaatttaaataaaaaaaagcccactttatagcaggctattttttatacattatcgtttcagattaaccagttcttccagcaatgtatccgaagttgtaataattcgtgaatttgcctggaaacctctctgtgtcgtaatcatatctgtaaactgctcagaaagatcaacattagacatttccagctgtcctgttgtcatgctgccgccatctgctgtaacctcaacaccaataccatcgaaatcaccggagtttaatgttgttccataacagttattaccaaggctttccagaccggatgcatttgcaaactgcgctaccggaatctgtcccaaaagaacagtattcccgttatcgtaagaaccataaatctttccggttccatcaattgatacaccagtcaattgtccgagtttctttccggttccgtcggttgccttttctgcagcgcctttttcaaactctgctgtagaacttccaccatggttctggtttaaaagatggctgaagtcaatggaaatatcctcaaagttatcacccagaagtgacatatttaatgaaacagatgtcgttcctgcagaatcgataaaacggaaagttccgtcgctggtattaaactgcaaagtataatttgtcgtatcataggtcaggttcaacataccggttgtcgtatctactgccagtgttccggatgctgccgtatctgcatcgataccatagatatctgcaatggaacggaaggtctggttgccggcgccatccgtaaagttgtagcccagttcaccgcctacggtgaccggtgcgccgtctgcacctgtgaccatggtataggtcgtaccattttccgtataggtaatgcttgccggattggtagagttgtccaaggtataattcttgcttacggagaaggattttaccgctgtggtgtcgttaccgaagatctggtcaagggcatcactgccggctgcgtccaccccctgcttatccagccactcagcaaggatatcattgttatcactgtcataaatattggtcagttccacggaatatgtaccggcatccgtatcaactgccttgtatgcaaattttgcagtataagaatatcccagattatcaaagaaggataaagtacggacataacctgcatcgctggtcacgttggtatcgttcttatcgatcaatccggaaacgtttgcctttgttgttgcctcaggtgcgcttgtcatattatctgcctgcatgatacgaagggcagatacggtatccttgcggatatcccctgtcagaggatctacctgccagcccataacggtataaccggttgatgtcatggcaaggtttcccgcaccatctaagtagaaagatcctgctcttgtaaagagattttctgttccattatttacgataaagaaattggtagaacttccgttggtcaggcggatatccatagcatcgcctgtggactgtgctgcaccggaagaagtgatgctaacctttgttgctgcggtagaaacaccaagacctatctgcatggcatttttaccaccggtcgttgccgtggctgccgtagcccctgatgttgtctgatacataatatcagcaaacgtcgtagaagacgccttaaagccaactgtgttgacatttgagatgttattaccaataacatccatcttggtctgatgtgttttcagtcctgacacaccagaatacaatgctctcatcataataaatgacctcctaatcgctgtcttgccgtatctgtcagtcaacggcattagcctccataaggtccggctaaataattacagctccgtctatatttgtaaatacattttcgtcagactctgtctgatccattgcggttactactgtctgattcgggacatttacaataaatgccaaagaatcaacgataaccaaggattcttttattcctttttcactggcttttgccactcctgcttccaagcgctggctttggtctgcggataaagcgatatctctttgttccaggcgcatattggcatgcttggaaaacttgagttctgatgtcgactctgccgtgccacccatctgctgtcgtaagacatcttcaaaggaaagtcctgtggtcttttcttttgtcttattatcctgcgtcttgagatactgaccggtgacctgctcgatcgaggtaaaggaattgttgatcggattcatttgcatcacgctccttactctgttgcagtagttgtatcatcggatgtggtcgtatcatctgtactgtccttaccggcttctgcttctgcatctttgagtgcctgtaaacgttcttccagtttctccagtgacttgaccgtgtcagcagaaacaaatgatttctgtgaatctgtcattgcatcatagaactgtcttgcttccttgatcttgtcctcatccgctgtcgtaagtgtgtagaccgtcggcagtttcttgatcatatcggcaaaagtctgtgcactgagcacgccttcataataatcgtcatcgcaaacactatccagtttatcaatactgtataatttgttgttcacagataagaacatcttattgtcttccgtcatcacataatctacttttccggaaatgtactgatcgtcatccagtaagataacatactttccgaccaatgagtttgcctcgatcgtagacatctgactctgtacggactgtacggcttcgatctgtgaaaaagatgcaagttcggatacatactctgtattgcttgtcggttccagtggatcctgatactgcatttccgcaaccagtaactttaaaaacatctccttgtcataggtgttggacttgctgtccgtgtctgtcttttttgactgacttgcgctgctatcgaccactttaccatctttaatctcctgtacaagtgccataaatctcctcctttctcatattcctatgcggtgtaattgacggtgttaccctgatcccgcatcatctttgttactaattcttcctcttgtgtcatgagtccctgtagatcatccagatcattcatattcaggtttctcatccttttcggacgttgattctgtccttcctgtccctgttcctgattctgctgaccggcttccagatttctctcaaattcatgggttcccacggaaatctctacagactgtaccttggtctgtgactggttcatctgctcttttaactggaacatctgattttccaaggcttccttgacctgctcattctgtgtgtagatatgagccttgacctgaccattttcctcggtcacttccatcaagacctttcccagcccctccgggtgcaaaagcatctcaaccgtcgtcttatcgccatccatcgttgtgcggcttgcctcaacgatctggtcgatgatggactgaacggaaacgctttctcctgtaggcagttctacggtcggttccatgtgcgaggcaaattccgtaatcggactttctgcctgcatcggtgtcagatcctgagtcggatggatctcagtttttgtctgctgttttaaaaaagcatctgtgtcctgatctgtggcatcttcctgcccctgatcggtctgcttttcggtcgtcacatccttggaacctgctgttacaagttcgtctgtctcgtccgtcttagtcggttcgatcgtttcctctgtcgggatctctaccttctcggtcgcctcttcggctaccaccgtatctttgacgtcctctgtcttttgcatggtttcttctgtcccctctgttgccttggcaggttcatgcagattgtctgtcgttcctgcttcctccacatcggtcgttaccagttctgccatctgctgtaagtcttccatagatattccaagatcttcctgcagtccaccagccagatcattcacttttaaaacgatctgtgggaaagcatcgcttacaagaagacttgcggaatcctcactgccggacaactttgttaccaatgctgccagattcgactgatctgtcagatcaagaaattgtaatcccagatcttccatggctttttcaatctgctcatctgtcacatccaattcgtccttgatagcatctttgacatcctttgcaaaagcatcggtcttgtctttgacgtcctttgtctgggccatgcctttatcatcctgctttgcaagtgatacatcagaccgcttgttctccatctgcggagcacgttcaatcttaccggcattgcctgcactttgtactacctgtggtgctattgcagaacttttttgcatctgcatcatctgccggaaatctccaccggatgcgtcttttgcactcgtctgcttggcatttgccaccgtagccgtcggcatcaggatatttgctattcctgtgcttgtcatggcatcttcctccttccatatgcagttatcaatgtacctgtctcataagatgagactatatattcttaaggctccatcaacttggtcacagccgcagccgtatccgcattcatggctcccagaatatcacctct

SEQ ID NO: 12645 - DNA, 3002 bp, Unknown
  gut microbiota DNA sequence
ctgcaaatctcgctctgattagcagtcgtcataacacaaaaacggtaacacccacactgtgtaaatgctaccgtcttttttctgtcttatttccttatatgctacttgcgctttaagatcatcttgacaccacggatctcggatacgaccgccacctcatctacagcatatatttgctcgtcatcctcagcacgtgctgtccactccataccgttataaaggacttttccgctttccttgcgattgtcgacttcctcaatgacacgcacttccttgccgatgcactcctcgtagttggtcgcaacctttcgactctccagatatttttttgcccatggtcttgtaaaatacaagaggataaaagtcacaacaaaaaataccgcgatctgcaagcccggatgtccgccacacaaacacacgataagcgctgccagcgctcccccggagatccagatagaagtcaatcctacggttatgatttctattacagccgtgataacaatgaccgccagccataaatacatccaatcacttaatactaaattcatccaaaattccatctgtatcctccattccagaaaatattcccccatatactcgataaactacagtatacgcaaacgtcttacgatatcctccacctgacgaatggcatcttccacctgatttttggtttcattgatgcgatcctgtaccagccagtctgcaatcagtccatcgaaaaagaaatctgcgaatgtgaggaaatctcccacattcaaattaaggttgtgcgtcatatttatatcctgcaactccctgctaaaactttgcagatctaacttagcctgctccatataacgctgggcattccccatctttgagtgtttcacaagcccactgatcatccctccaccaaaaagatcaaccagaccccagtttccggcagagcgaagttcctcccttgccgcgcgaagtgatgttaatgcgcgttcgcccgcagcaatagcctcattgcgttccttttcaaaatcgtatgccatggttttctccttatataatatcttatgccataaacatctttgtttgcgtcttattatacatgatggaacgacttttgtcatcgaaagtcgctcgaattcgacaaataaacgctataacagaaacaggtgccagcctcagccgacacctgtcatgcgcagttttacttatctataaatattagtcaccaaatacagcacggtaatctgcctggaacttctcaattccggcatctgtcaatggatgctttgtcatctgctcgatcaccttgtaaggtacagttgcaatatctgctcctgcaagtgcacaatccgtaacatgaatcgggttgcggatagatgctgcaatgatctctgtgtcatatccataattatcaaagatggtcacgatgtcttcaatcaggcctatacccggctggctgatgtcatccagtcttcccaagaacggagatacataggtagcccctgcttctgctgccagaagtgcctgatttgcagtgaagattaaagtaacatttgtcttgatgccttctgcggaaagaacttttactgccttcagtccttctacagtcataggaatcttaacaaccatgtttggatggatggctgcgatctctctaccttctttgatcattccctctgcatctacggttgtagcctttacctcaccactgatcggtccatcaacgatagatgtgatctctttgatgacttcattaaaatccctgccctcttttgcgatcagggatggattggtcgtcactccacaaatcacacccatatcgttggcttttctgatgtcatctacattcgctgtatcaataaaaaacttcatcctgcattcctcctaaattgtagttttctctcaacgtcctcattgtacgagttcaaaagaaaaagtacaatccagtttcctgatgatgataaaaaaatgaactaacttcctcaaaaaatccactcgataaataatgtcctagacaataatgtctgttgttgtaaatgctatgaccttgcgcaagccctctaaggacacctccacctgatagccgattttgcctccgctaaagatgatcgtatcaaaatcctctgcactttgatgaatgactgtctgaaagaatttcttcataccgatcggtgagcagccaccatggatatagccggtaagtcctaataattctttggactttaccatggcaatcgacttttctcctaccgcatttgctgcttttttcagatccagttcttctgccaccggcacaacaaaaacatagtgctcgccgcttttccccacagtcaccagcgttttaaagactttatccacattctgccccaaaacctctgccacttctacaccactgatggcatctgtatttgcataagaataatgtttatattctacctttgcctgttctaaaagacgcataacatttgtcttttcttcttttgctttctttgccatttttacacctgatttcttattttgatattacaagggctatgataccgccaatgatcaagatcggcaaggctatatagatcagccctcccaggaaaagtccaatgactacgatcggcaaaaatataatatagaaaccaatctttaaaaatccccatgtcatcttgaccgccagcgcgatcactttccacataaaccagataaatgcaataataaataatgctgtcagcataaaatcacctctttcatattttccatatcatatagcatttactatagaaagtaaacgcttgtcatgacttcttaataattctttaatatttctatcttttaccacaataaaaaatcacctgccgatgcagatgataaaacggatataaaaagtgcccagttccggaatcgaaccagagacacgaggattttcagtcctctgctctaccaactgagctaactgggcacaaaattgcgggaataggatttgaacctatgacctccgggttatgagcccggcgagcttccagactgct

SEQ ID NO: 12646 - DNA, 255 bp, Unknown
  gut microbiota DNA sequence
attaagttataataacttaacaagccgatgatcggactcgaaccgataacctgctgattacaaatcagctgctctgccaattgagccacatcggcgtatgaaaaatgggacctatagggctcgaacctatgaccctctgcttgtaaggcagatgctctcccagctgagctaagatcccaaatcaataaacgacccaagcgggactcgaacccgcgacctccgccgtgacagggcggcgctctaaccaactgagcc

SEQ ID NO: 12647 - DNA, 385 bp, Unknown
  gut microbiota DNA sequence
gattgtatcaatgcatcatggtatggcagtgatacgactatctgcaataactggaattatggctatatcggggtagaccatctgggcggtggcaccgggtttaatatcgtatcggaaaatggctcgggcttcccggcagtcggcgtctttaacaactgtcgggcatataactgtgatggtgcagcattttttgcaaggaatacggatggcaggggagcaacgctgatctgcaataactgcgtggcttatgactcatcctggggatttatggtcacggatggcggaatgtatctgacagactgttcggcgcaagcaccacgctatgacggcagtaaatggctctatggcggtgcgggcattgcctatatggggcaggcgagcggca

SEQ ID NO: 12648 - DNA, 14899 bp, Unknown
  gut microbiota DNA sequence
gaaatgtctcctatgccaaaaacttgaaattcatgggaaaacccagtataatagaaaagattttgcaaagaggtaggcatatggaattagaattcaagttacaggtgtttgaaggacctctggatcttcttttacacctgctagataagaataaagtcagcatttatgatattcccatcgtggagattacaaatcaatatatggaatatatccgacagatgcaaaaacatgatctgaatgttgtcagtgaatttatggtcatggctgcgacacttctggatatcaagtccaagatgctgctcccggcagatccttccgaggaagaggatgaggaagatccgcgggcagaattggtgcaacagttgctggaatacaaattatataaatgcatggcgtttgaattaaaggatcgccaggtggatgcctcccatattttttacaaagagccgaccgttccggaggaggttttggcatacacaccgcccattgataccaaggaactggtatcagacctgaccttgaaccagttgaacgatatttttaaatccgtattgaaacgacagaaggacaagatcgatcccatccgttccaaattcggagagatccgcaaggaagaagtatcactggaggacaagatgggatatttgtcagagtacgccggccagcataaaaactttagttttcgtcagttattggaaaaacagagcagtaagatggaagtgatcgtgactttcttggcgatattggaattgatgaaatcgggaaagattctgatctcgcaggagcatacctttgatgatattctgattgagtcgaagatcgcggcatagaataggagtgacgttatggatcaaaaacagatggagtccatcatagaagggattctttttacctttggcgaggcggtggaaccgtcacgtatcgcaaaggcactggaagtagagacaaaagatgtcgtaaaggcattggaacatatgaaagaaacatgggcagaagaaggacgcggggtgcaactgacggaactggacggttcttaccagatgtgcacgaagccggaactctatgaatacctgatccgcatggcaaagcagccacgcaagcaggtgttgacggatgtccttttggaaaccttatccatcattgcctacaagcagccgatcaccaaatcggagatcgaaaagatccgaggcgtatccagcgatcatgccgtcagcaaactggtggaatattccctggtgaccgaacttggacgtctggatgcaccaggaagaccgatgctttttggaaccacggaagaattcctacgttcctttggcgtatcttctattgatgaactgccgacgccgacgaccgaccagatggagacctttaagcaggaggctgagcaggaaatcaaactggatgtaggcggagaatagttttttctaccgaaaatgtcataaaagaaagaagatctcatagttttttataaagtctgtttgggaggattttgtcttgccttttataaaaaagatgcggtctttttttattgtcctttttgtcatcctgttatggcagccgcaaaccatctgcgcagcagaaaagcaaacgatcgatgcaaattctatccatgccttgtctgcggtacttttagatggagacagcggcagggtgatttatgaaaaagagggtgagtgcaagcgtgccaatgccagcacgaccaagatcatgacctgtattctggcactggaaaacggaaaggaagatgatatcgtcacggtatctgcctatgcggcatccatgcccaatgtgcagttaaatatcgaggaaggcgagcagtattacctcaaagaccttttgtattctcttatgttggaatcccataatgattctgccgttgcgatcgcagaacacattggcgggagtgtggagggcttttctgccctgatgaatgaaaaggcaaaagaactgggctgcagcaatacctgttttttgacaccaaacggtctggatgcttcggttggagaagatacccatggtacgacggcacatgatctggcgcttatcatgcgttactgtagctggcagtcaccccgggcggagcgctttttagagatcacgcagacaaatgcttattcttttacgtcgctgacggagcaggcagacggcagtatgatcccggggacacggaacttttcctgtaccaaccacaacgcctatttgagccagaaccctgactgcctgtcgggaaagacaggatttaccgcggatgccggatactgctatgtgacttcactttcttccggcgggcggaaatttgtcattgccttgctggcgagtggctggccaaacaataagacctacaaatggcaggactgcaataagatctaccaatatgccacgacctattatcagatgcgcaaggtcatggatccggcagagggcttacaaagcgtaaggctccaaagagcccagaacccggactatgatctcaaaacccaaaagtctgccatgccacaactgacggatatgcgaaaggaagtccttctggcagactgggagaccatggcgatccgcttacattatccgcgcagtatcgaggcgacgggcaagggacttcaggcgatcggaaacgcagaacttctggtggatgatgtggtcatagatacctgtgacatccttttggaggatagtcttgcagtaaaaaatatgccatggttcttccaggcgatcctgaaaaaatgggctatgtttttctaacaaaagatagcaaaaaactttgtaaaaatatagtgaaataattaacaaaagtggttgaaaaaggaaggacaaaacgttattattacggtagagaaattttgaatttatatatatggaggaaaagtagcatgagtaatgtaacaaacaatcctgctattcagaggatgaatgaattacttgatgagcacagttttgtcgaattaggcgcgctggtaacatcaagaaacacagattttgatctgaaccagcagcagacaccttctgatggtgtagtgatcggacatggtctgatcgatggcaatctggtattcgtattcagccaggatgcttctgtattaaacggaagcattggtgagatgcatgcaaagaagatcatgtctgtgtatgatatggctatgaagatgggagcaccggtcattggacttttggattccacaggtgtcagattacaggaatctgtagacgcacttgagagcatcggagccatttatgcaaaggcagttgccgcatccggcgtgatcccacagatcatgggtgttttcggctcttgtggtggtggactcagcgtacttacttctgtcagcgatttcgcacttatgacaaaggatgccaagttatttgtcaattccgcagatgccatttccggcaatcgtgcagacaaacttgacacagcaagcgcagacttccagtatgcagaggctggcaatgttgattttgttggtgatgaggcagaggtcatggaagagatccgtcgtttcgttaccatccttccgggatgcaatgtcgaagagggctgtgttgaggaatgtatggatgatctcaaccgtgccgcagaaggcttagatggcaaggttaaaaatcttgcactttttgcagaggagatctcagacaatcatctctttgttgagaccaaggctggatttgcaaaagaaatgcttaccggttttatcaagttaaacggtattaccgttggcgtggtaggcaaccgtgaggagactatggcaggtgatgaagtcgtagatcttggaaccaaacttacgactgacggatgcgaaaaggcagcagatttcgtttctttctgtgatgcttttgatatcccggtactttcacttaccaatacaacaggttacgaggcttccgtatgtgctgaaaagcatctggcaaaggcacttggcaagatggtatatgcattcgcaaatgccacagtaccaaagatctctttcctctgtggacaggcacttggtagcgcttatgtgaccatgaacgcaaaatcactcggcgcagatcttgtatttgcttttgctgatgcagatgttgcaccgatggatgctgaacttgcagccaagatcatgtacgcagatgcttccgcagatgtgatcgctgcaaaggctgaggaatatgcaaacacgaattgcggtgtgacaaatgcggcaagacgtggttatgtagatcgcattgtagagccggcagatgccagaaagtatctgatcgccggatttgagatgctctttacaaagagggtagatggcccatacaagaaacacggaacaaaatagaaaggtgagcatatgaaaaagaaaatcatattaatggtcagtactttagtatgtatgctcgcgttatgctcctgcggtaagagtcaggtagatctgaacggcttatctgagactcagttacaaagcgcatgtgagcagacagcaggagttttggaaggactcgatgcaaacgagagcgaacagtactattcttactatgcatcacaggatgatggtaagatctatgccgatctgatggaacagtggattgacgtacagccacagatcggagatttcgttggatataaggactttagcgtgacgaaggcaggaaagacaatttctgcggtagagacgatctcttataccaagcgagacatcaaacttacttatgttatcaatgccaacagtctggagacgacagcgatcaatgttgagatcgtttattctctgggagagacgatggcaaaggcaggacttaatacggtcatgtcaatctccatcgtatttgtgatcctgatcctgatctcactggtcatcagtgcgtttaaggtgatcccggtcattcaggcgaagttctccaaggaagaaagtgctccggcagtcaaggttgccccggctgcaccagttgccgcagaggagacggatgatacagaattgatcgcagttattgctgcagcaatcgctgcaagcacaggaagttctacagatgactttgtagtacgttccatcaagagaagatattaatttaggaggaattataaatgaagaattatacaattactgtaaatggaaatgtttatgatgttactgtagaagaaaagggaagcacaggagcagcaccggtcgctgcaagcgcacctgcaccaaaggcagcacctaaggctgctacaggcgccggaagcatcaagatcgaagcaggcgcagccggaaaggtattcaagttggaggcaactcctggtacacaggttaaggctggcgataccgtattagttcttgaagttatgaagatggagactcctgttgttgcacctaaggatggtgtggttgcaacaattgatgtagcagaaggacaggctgtagaatcaggcgatctgcttgcaacaatgaacgagtaacaggcaacaggtattattaggaggaacaattcatgagttacgttacagaaacgttaagtaaccttctatcccagacggcgtttgcaaatttggactacaagaactttatcatgatcgcagttgcatgcgtgttcttgtatctggctatccgcaagggatttgagccattacttctggttccgatcgctttcggtatgcttcttgttaatatctacccggatattattgcaagcccggaggaaacgtctaacggtgtaggcggtttgctttattacttttatacattggacgagtggtccatcctgccatcccttattttccttggtgtgggtgcgatgaccgacttcggtcctttgatcgccaatccgatcagtttcctgctcggtgcggcagcacagttcggtatctttaccgcatatcttctggctatcctgctcggattcagtgatcaggcagcagcagcggtttccatcattggtggtgccgatggtccgacatctatcttccttgccggtaagttagggcagagtagtctgatgggaccgatcgcggtggcggcatattcttacatggcacttgtgccgatcatccagccaccgatcatgaagttatttacaacgaaaaaggaacgtgcgatccatatggagaacctgcgtccggtttccaagttggaaaagatcttatttccgatcgtagtaaccattatcgtatgtttactgcttcctaccacagcaccactggttggtatgctgatgttaggtaaccttttccgcgagtcaggcgtggttcgtcagttgaccgagactgcatccaatgctcttatgtatatcgttgttatcttgctgggaacctctgtaggtgcttctacaagtgcagaagccttcctgaacatgacaacgatcaagatcgttattttgggtctggttgcctttgcggttggtaccgctgcaggtgtactctttggtaagttgctttgcttccttacaaagggcaagatcaatccgctcatcggttccgcaggtgtatcggcagtacctatggcagcacgtgtatcacagaaggtcggtgcagaagaagatcctaccaacttcctgttgatgcatgcaatgggaccaaacgttgccggagttatcggtacagcagttgccgctggtgtattcatggctattttcggtgtataatataaggaggatgacatggcagaagtagttaaaaaacctgtaaagattacagaaacaatattaagagatgcacatcagtctctgatcgctaccagaatgacgacagagcagatgttaccaatcattgataaaatggataaggttggataccacgcagtagagtgctggggtggtgctaccttcgacgcttccctgcgtttcttgaaagaggatccatgggagcgtttgagaaaacttcgtgatggcttcaagaatacgaagttacagatgcttttcagaggacagaacatcttaggatacagccattatccggatgatgttgtagaatatttcgttcagaagtctatcgctaatggtattgatatcattcgtatctttgactgtctgaatgatgtccgcaacttacagacagcagtagatgcctgcaagaaggaaaaaggacatgcacaggttgccctttcttataccttaggtgatgcttacacactggattactggaaagaaatggcaaagcgtgttgaggatatgggcgctgattctttgtgtatcaaagatatggcaggacttttagttccacagaaggctgacgaacttgtccgtaccttaaaggaagcaacttcacttccgatcgacctgcatacacactatacttccggtgttgcttctatgacttacttaaaggctgtagaggcaggctgcgatatcattgataccgcaatctctccatttgcactgggaaccagtcagccggcaacagaagttatggttgagaccttcaagggtacagagtttgataccggattagatcagaaccaactggctgagatcgctgattacttccgcccgatgagagaggaagcattggcatccggtcttatgaatccaaaggtacttggcgtaaacatcaacaccttacgttatcaggtacctggtggtatgctttctaacctgatctcccagttgaaggagcagggcaaggaagacaaatacgaagaagtactggcagaagtaccacgtgttcgtaaagaccttggtgagccgccactggtaacaccttcttcccagatcgttggtacacaggctgtattcaatgtcctcatgggcgagagatacaaggttgctaccaaagagaccaaggatatgcttctcggaaagtatggacagaccgttcgtccgttcaatccggaagtggtagaaaaggttcttggcgatgagaaggatcaggcaatcacttgtcgtccggctgatcttttagagccgggactggctaagtttgaggaagaaatgaagcagtggaagcagcaggatgaggatgtcctttcctatgcactcttcccaaaggttgctaccgagttcttcaagtatcgtgaagcacagcagacaggtgttgatccggctgttgctgatacaaaaaatggtgcttatccagtttaatttttaaaagaaaagtagtataataaaatccattggtgtgttttgcgacatgccagtggattttttatgtttagaaggaatcgttattatgtcaaataaaagtgatctgaatacaaagatgaacgaactctacaagtccatgagcaagggtcagaaacttctgacaaattacatcacggacaattatgataaagcggcatttcttacggcagcaaaattgggtgagaccgtcggcgtcagtgaatctaccgtggtgcgatttgccatgttcttaggctacaagggttatccggagtttcaaaaggcattggaggagactgtccgcaataaattaaattccgtgcagcgtatggaagttacctatggcaggatcgaaaaaaatgctgtactcagttctgttttgtcctctgatgcggacaagatccgggagaccatggagtctatggatgaggatgtctttgaacaggcggttgataccattttaaatgcaagaaagatctatgtgatcggtattcgcagttgcgcaccgctggcatcttttctggctttttacctcaatctgatgtttgataatgtcatccttttgcagaccaacaattccagtgagatctttgaacagatgatacatatgaatgagtctgatgtcatcattggcatcagttttccgcgctattccatgcgtaccttaaaggcgatggaatttgccaacaaccgcagtgccaaggtcattaccttgacagacagcgtacattccccgatgaacctctattcctcctgtaatctgatcgccagcagtgatatggcatctattgtggattccctggtggcaccgctgagcgtgatcaatgccctgatcgttgccctttgcatgaaaaaacaggattcggtcgcagagaccttagaagccttagaggatatctgggacgagtatcaggtctatgaaaatgacgagatcgaccaggtggacgactcgctgaagatgcgctatgcaaagataggagatggggatgagtaaggttcttgtgatcggtggcggcgctgccggaatgatggcggcttatgcggcaggtatgtgcggtcatgaggtgaccctcttagagcagaatgaaaagttaggcaaaaagatctacattacgggaaagggcagatgcaattttaccaatgcctcgccattagaagagatcatgcaggcagtggtttccaatcccaagtttttgtacagtgccttttataccttttccaatgatgcggtcatggatttctttgaaaatcagggcatgccctataaaatagaaaggggcaaccgtgcctttccggtatcggatcatgcatctgatgtcatccgtgcgctggagcgtgccatgaaagaacaggacgtgcgcatccgtttgcatacccaggtgcgtgaacttcttatagaggatgataaggcgaccggtgttcttttgacagatggggataagatcacggcagacagcctgatcctcgcgaccggcggactgtcttatccgacgacaggatcgaccggcgatggtcatactatggcaaaaaatagtgggcacaaaatcgtcacaccgagaccggcactggtgccgctgacgacgaaagaggaatacatcctgcggatgcagggactttccttaaaaaatgttgccctaaagatcaaggatgaaaaaagagttatttatgatgcttttggtgagatgctttttacgcattttggtgtgagcggacctctggtcttatctgccagttctgtattgagccggcatttcccgagagaataccaggcttatatcgacctgaaaccggcgctttccgaggaagttttgaatgaacgcttgctgcgtgaattttcggaacgtccaaaccagcatatcaaggcagttttccagcaattactacctgcaaaaatgataccggttatgatagaattgagtcagatatccatggacaaaccggtcaatgcgatcacaaaagaggagcgcaggcgtctggtcggactttttaaggcatttccttttaccatcaccggtacgcggggctttaaggaagccatcattacccagggcggtgtttcggtcaaggatatcgatccggcgaccatggaatccaagcggatcaaggatctatatctggtcggagaactgctggatcttgatgcactgaccggaggttacaatttacaaattgcctggtcaacgggatatttggctgggatcagtataaaataaaggtggaaagattatgagtatgaatattgcaattgacggaccggcaggtgccggaaaaagcacgatcgcaaagagagtggcaaaagaattgggatttatctatgtcgataccggggcaatgtaccgtgctatggcactctacattttgcgccacggtgtcaatgaaaaagaagaaagtgcggttgctgcagtctgcgaccggatcgacgtggcactgcgctatgtggatggcaaccagatggtccttttgtgcggagaagatgtatctacagagatccgtaaggaagaagtcggcaatatggcatccgtaacaagcgtttatccttgtgtgcgtcaaaaacttttgtctttgcaacaggatttggcggcgcgtgaggatgtcatcatggatggcagggatatcggcacctgtgtcctgccggatgcaccgcttaagatatatctgaccgcaagtgttgagacaagggcaaagagacgttatcaggaattgcaggaaaagggacagacctgtgatctgaccgagatcatgaaggatatcgaagaccgcgattaccgggatatgcatcgcgagatttccccgcttgcacaggcagaggatgccattctggtagattcatcggatatgacgatcgaggaagtggtagcaaagatcacagaccttgcaaaggagcgtatggcatgaaggtgacattggcaaagagtgcaggtttttgctttggtgtaaaaagggctgtggatatggtctatgagcagatcgaggatgcaaaagaaagacctatctatacctatggtcctatcatccacaatgaagaagtggtaaaggaacttgccgaaaaaggtgttcgggtcattgcggaggatgaagatctgcatgggctggaaccggggacagtcatcatccggtctcacggcgtgggacgcaaggtcaaggaagacttggaaaatgcaggctttaccattgtagatgccacctgtccctttgtgcaaaagatccacagatatgtggcaaaatatgccgaagaaggctatttcgtcctgatcgtcggaagcgagagccacccggaagtacaggggatcgttggctggatgccaaacgattcttatgccgttatttctacgccgcaggatcttgaggatctggctttggctggagaaaaaatctgtattgtctcacaaacgacatttaactacaataaatttcaagaattagttgaaattatccgaaaaaaagggtatgatatacttgttttgaatactatctgtaatgctactgaggagcgccagagcgaggcggctatgatcgcaagagatgtagatgccatgatcgtgatcggcggcaagcacagttccaacacacagaagttatttgaaatatgcaaaaaagaatgccaagatacttactatatacagacaaaagaagatctcgatttgtcggtacttcaatccattagcaacgtaggtattaccgcaggggcttctaccccaaacaaaattattgaggaggttcaaaagatatgtcagaaatgagttttgaacaaatgttagaagaatcatttaaaacaataagaaatggagaggtagttgaaggtaccgttatcaatgttaagcctgatgagatcgctgtagacattggatacaaatcagacggaatcatccatcgtagcgaatacacaaacgaatcaaacgttgacctgacacaacttgtatctgttggtgacaagatcgacgctatggtcatcaaggtaaacgatggcgaaggacaggttgcactttcttacaagagacttgctgctgaaaagggcaacaagcgtctggaagaagcatttgagaatcatgaagtacttaccgctaaggtggcacaggtattaaacggtggtcttagcgttgttatcgacgaagcaaagatctttatcccagccagccttgtatcagacacctacgagaaggatctgaacaagtacaatggtcaggaaatctcattcgttattacagagtttaatcctagaagaagacgtattatcggtgatagaaaacagttattggttgctgaaaaggaaaaacttgcagaagaattattcgcaagaatccatgttggtgatgttgtagaaggtactgtcaagaacgtgacagatttcggcgcattcatcgatctcggtggagcagacggacttttacatatctctgagatgtcttggggcagagttgagaaccctaagaaggtattccatgtaggagatcaggtcaaggtattcatcaaggatatcaacgacaagaagatcgcactttctatgaagtttgatgatgagaacccatggaaggatgcttctgagcgttttgcagtaggaacaattgtaactggtaaggttgcaagaatgacagacttcggtgcattcgttgaacttgctcctggtgtagatgcacttcttcatgtatcacagatcgcaaaggaacacatcgacaagccttcagatgttctttctgtaggacaggaagtagaagcaaagatcgtagagttccgtgaggaagacaagaagatcagcctgagcatgaaagcacttcttgcaacaccggaagaagacaaggctgctgatgatgcggagttcgctgacgttgacatcgatgcagtagcaaatgaaatggaagagacagaagaataattcttttccacttggggacatataagtatggatgattatgaatctttcaagaaagcggtatattcgctgacaaagatcgacctcagttcctataaagaaaagcagatgcgcagacgtatcgattctctggtgcgaaagcgcaaatgcgcatcttatgatgcttatgtcaagttattgaagtcagatccggtcgtctttgaggagtttgtcaacttcctgacgatcaatgtgtcagagttttatcgtaatccggaacaatgggatttactggtacgggaatttgtaccggaactcattaagaagttcgggaccaatttacatatctggtcagcagcctgttctacaggcgatgagccgtattcgctggtcatggctttatccaagcatttagatctgagcaagatcaagatcacggcaacggatattgacaagcaggtgatcgcgacagccaaggttggtctgtattccgaaaagagtattgccaatgtgccggatgagttcaaacgtaaatattttaccaaggtaggaaattcataccagatctcggaacagatcaagaagtgcgtggatttcagagaacacaacttattatctgatccgtatccgagagactgccacatgatcgtgtgccgcaatgtattgatctactttacagaagaagccaagaatgaggtttacgagaaattcgcaaaatctctcaaagatggcggtatcctctttatcggcagtacagagcaggtgacagattacaagggcatgggctataagcgtagatattctttctactacgaaaaaagtcaggaataaaataaggaccctaacttcctttgggaggttaggatctttttgtattaagaatactcaatttaggagacaggaaatgtagcgggcgatgaaagtctcatccacataggatttcttgtaagggatgaaagatttcttatccttgtatgctctggcaaagaaatagatgtcatcactgcattctaaagcatccggcaccatgagataggtgtcgactttggcaatgtaacatgtcgccggggtggctttctgctttttttctttggcaatatgggatgccagttctttggggatgaccatgtcttcttccggcaggtagacataggattttacatccggcaggaaatgatacattttctcgtgataaagtgaaatcgtgcccttgatgctatcgtcctctaagatgatgtaataatcatccgtgtgcagacgcaggggtgcgggcagacgaaaagaagtggaagcggtaaaagtgagttcctgattttgtatgccctgataatcggtataggaggacagggagagatctgtaatccttatctgcatgtcctttaagtgggcataggataggatgggcaggatctcgaccatgccagccacatcttcgtagttatgtagtttcaaaagtgtcaaagcctcgtcatccggctcattgcagtaggactggtagacagcgatcaactcgccgccggagtatttgtcctcccggtggataccaaggaaggattcgatggctttttgacggtaggatggcagatttaagatggatttcatgccgcggcatgccttatagatgtcaaaatgctgatcgggcagagcgtcggtaggaatttgcagtttctggcagcggtcaaggataaatctttcatcaaaacggatgccgttaaaggaaagaagaccttgaaaatctttacacagttccaaaaaggtttctaagacctcagattcctcggcgggtgtctcagcaaggtattgcagtaaggtaatctcactgcccttgtgataggcacagccgatcagatatatggtgttatattttgcagaaagaccggtggtctcgatgtcaaacaggagttgatcttcctgccaaaagtccagttcttgatagcggggcgtataagtataggtgtccgtaaatgtaagcatgagagcctccttttggttaaaaatttaacagacaaagcctgtatattccat

SEQ ID NO: 12649 - DNA, 22072 bp, Unknown
  gut microbiota DNA sequence
catatggaaaaggtactcaaaaagatacaaaaagatgcgtctgtatgtcttgatttgtttacaaaagtgatataatgtattcaaagtgtgtaatcacataagtatcgaaagaaagaggggtacagttcatgggcctaaagacatttaagggcggcgttcatcctaaggatggcaaagacttatccaagtccaagccgattaaagaattgctgccggaaggagacttagtctttcctttatctcagcatattggtgctccagcaacacctatcgttgctgttggcgatgctgtattaaaaggacagaagatcgcagaggcaggtggctttgtgtcatctccaatctactcatctgtttcaggaacggtcaaggcgatcgagcctagacgtgtaactgttggtgatatggtcaattccattattatcgagagtgacggtgagttcaatgaggttacctacgaagagacagaagatgtgaccaaactttctaatgaagagatcattggaaagatcaaggaagccggcgttgtcggtatgggtggtgcaggtttcccaacccatgtcaagttgtctccgaaggagccggacaaaatcgagtatattattgcaaactgcgcagagtgtgaaccatatttgacatccgattatcgtagaatgatcgaggaaccggaaaagttggtcgaaggtatgaagattatcttgcagttgttcccacgtgccaagggtatctttggtgtcgaggacaacaagccggattgtatcgaaaaattacaggcactggttgcaggagaggcccgtatggaagtttgtccgttgcagacaaagtatccacagggtggtgagcgtcagttgatctttgctaccacaggcagaagcatcaactccaagatgttgccggcagacgcaggctgtatcgttgataacgtagagaccatggtcgctatttataatgcagtacgttttggtcgtccgctgaccaaccgtattttcacagttaccggtgatgcggtatgtgagccgagaaacttctatatcagcattggtacaagttacagccagttgttagaggcagcaggcggactggtagcaccagcgaaaaagatgatcgccggtggtcctatgatgggatttgctttatttggcgtagatgttcctacaacaaagacaacgtcagccctgctttgtatgacagaggatgaggcttctaagtatgagacaaccgcctgcatcaactgtggacgttgtgtggaggcttgtcctgaggcattggttccatccagacttgctgattactctgagcacaagcagatggataaatttgaagaatggtatggtcttgagtgtgtagaatgtggcagttgcagttatgtatgcccggcacgcagacctttggcacagtcagtcaagacaatgaaaaagtttgttcttgctgaaaagagaaagaaaaattaggaaggggtgaatcttgtgagtgatttattaaacgttacatcttcgccacacgttagagataaaatggatacccagaagatcatggcattggtagtgatctctttgcttccggcatctatcttcggtatctgcaattttggattgcatgcactggtattgatccttgtgactatcgcatcctgtgtggcttctgaatggatctacgagaagatcgtacataaaaagagcacaatcaatgatctgagtgcagttgttacaggacttctgttagcactcaacttaccaccaacattaccatggtggcaggcagtccttggcggtgtatttgctattgttatcgtcaagatgttatttggaggactgggacagaacttcatgaacccggcactgggagcaagatgtttccttttgatctcctttaccggatctatgacaagttttacttatgacggcgtgacaggtgcaacaccacttgctgctttaaaggctggtgagagcgtagataccatgtcaatgcttcttggtacgacagccggaaccatcggtgagacatctgttatcgcacttttgatcggtgcgatcatcctgatcttattcggggttatcgatcttcgtattccgggatcttatatcattacttttgccatctttgtattgatctttggtggacatggatttgatatgaactatctggttgcacagttatgtggtggtggacttatgcttggtgccttctttatggcaaccgactacgtgacttcaccgatcacaccaaacggcaagatcctttacggtatcgttcttggtattttgaccggtatcttccgtatctatggtgcatccgcagaaggtgtttcctatgcgatcatcttcagtaaccttttggttcctttgatcgagcgcatcacaattccaagagcctttggcgttgtcaaggagaagggaggcaacaaataatgaataaattagtaaaagacgcattagtccttactgcaattactcttattgccggtgtctgccttggtggtgtatatgagatcacaaaggatccgatcgcaaaggcacaggagtctgcaacccaggagtcttacaaggctgtatttgcagatgctgcttcctttgaagatttggaaggatttgatgctgacgcagcaacaaagatcgctgctgatgcaggttatacagatgatgatattacaaattgcgtggtcgcaaaagatgatgcagggcaggcgatcggttatgtcatcacgatcacatctcatgccggatacggcggagacatcacattctctatgggtgtgacaaacgatggtactttaaatggttattccattacagatattagtgagacagcaggtcttggtatgaaggcaaaagaagatggctttatgagccagttcgccgggatccctgcgcagatcttggaagttaccaagtctggcaagacagccgatacagagatcgaagccatcagtggtgcaacgatcacatctaaggcagttacctatggtgtcgatgctggtcttacttattacaacagccttgtaggaggtgcgtcaaatgaataagatcgtagaacgtttacagaacggtattatcaaagaaaatcctaccttcgtcctgatgcttggtatgtgtccgacacttgctgttaccacatctgcgatcaacggacttggtatgggactttccacaaccgttgtacttgttatgtccaacttaatgatttccttgttgagacatattattccggaccgtgtacgtgtgccggcatttatcgttatcgttgcatctttcgtaacgatcgtacagttcctggtacagggatttattccaagtctttactcagcacttggtatctatattccgcttatcgtagtaaactgtatcatcttaggaagagcagagtcatatgcttctaagaatcctgtcattccgtctatctttgatggacttggtatgggacttggatttaccgtaggtcttacctctatcggtatcgtacgtgagatcctgggagcaggtcagatctttggtttccagatccttccgcttgcagatgctgcaacaggaaaagcaggttatacaccgatcactatttttgttcttgctcctggagcattcttcgtactggcattcttgatcgcactgatgaatgtgatccgtgcaaatgcagagaagaagggcaaacatatcgcaccggctaccggatgtcttgcaggagactgcgagtcttgtggtatgggatcttgctcaggcaagtctaatgtcagcgtagcaaaggcagaaacaaagacagaagcaaaggataaggaataggaggaagagcaatgaaagaattacttttgatattggttgcatctgcaatcgtaaataacgttgtgcttagccagttccttggactgtgtcctttccttggcgtttccaagaagattgagacagctgccggtatgggcggtgccattattttcgttattaccatttcaagttttgtaacaggacttatttacaagtttattttggagccgactggattttcttatttgcagacgatcgtattcatccttgtgatcgctgcattggttcagtttgttgagatgttcttaaagaagcagatccctgcactgtatcggtcacttggtgtatatctgccgctgatcacaacaaactgtgctgtacttggtatcgcacttaagaacgtaaccaagggatacaatatcttagagggcgtgatcaacggatttggtacagcagtaggcttcaccatcgctatcgtgatcatggctggtatccgcgagaagatcgaattcaatgatattccaaagccatttaagggatctgccatcgttgttgttacagcaggacttatggcgatcgcattctttggattctcaggaattattaagtaggagggctgacagatgagcgtaacaggagttattgtagccgctgtcattgtcggctgcacaggatgtttgatgggatttttcttatgctttgcatcagaaaagttcaaggttgaagtagacgaaagagaagaagcaattattggtgttctgccgggaaataactgtggtggatgtggttatgccggatgttccggtctggctgctgccatcgtcaagggagaagcaccggtcaatggttgtccggtcggtggcgctgcggttggagccaaggttggcgagatcatgggcgttgctgctgaagacagcgttaggcaggttgcttttgtaaagtgtgccggtacttgtgaaaaggctggcaaggactatgagtatgccggtgtagaagactgccaggcaatggcattcgtaccaggcggcggtccaaagtcttgtaactatggatgtatgggatttggttcctgcgtaaaggcttgtccttttgacgctatccatatcgtagacggtattgcaaaggttgatccggaagcatgtaaggcttgtggtaagtgcgtgagcacctgtccgaagcatttgatcgaactggttccttacgaggctaccacattagtacagtgtagttctaaggacaagggtaaagatgtcatgaaggcatgttcggttggatgtatcggatgtcatctttgtgagaagaactgtgagcatgatgccgtacatgtcattgacaatgtggcatacatcgatcaggagaagtgcgtaggctgtggtgtctgtgcacagaagtgtccgaagaagatcattctttccaagtaagatcatctttttaaaagagttttggaaaataataaaacggataggagagatcgtaaatgtctttcctatccgttttttactttactactatattataatccttatctaataattcaaaagggatggtttttccgatgccggaagtgtattggatggatccgtcgcttgtcacaaagatggcttctacatcggaaaggctttctacataggcaagaccatcgtcaagccccatgagaaagaccgtcgtgcttaaggcatcacaggtaagagagtcatggctgatgatcgttacggaatccagatcattgtcacatggataaccggtggaaagatccaggatgtgatggtaacgcttgccatctacttcaaagtatctttggtaggtgccggaggtgacgaccgagtcgtcagccacctttactgtggcaagtgccgtaccgtcctcggaaaatggtttttgaatggctatcttataagatttttcatcgccgtccttcggaccgacacataagacattaccccccagattgatcagcccactttgaacgccctggtcattaaggtaggctttcatctgatcggcgatgtagcctttggcgataccgccaagatctatggcagcattcggatctgtcaggctgaccatattgccgtcaatgacaatattttggtagttgatagtggcaagggcttcctggatggcttctacggatgggatttccttggaagacgattcggagaaatcccaaagggaagataattttccgaccgtgatatcaaacttgccattgctggacttgctgtaagcaataccggcatttaggatgtcgattgtctcatcactgacttccacggcttgtccttggctgtgattgatcttccagatatctgtaccttccttttgggcactgaaaagattctcatatttttttgccatagaaaagcagtgatccagttccttttcataggatgcgtcatataaggtaatggttatgaccgtatcaaaataaaagcctgtctttgagatcggctctgtcgtctttccacacccgcccagtgagagcaaggtcaaaaagaggcaaaaagataagccgagtgcatgtatttttttcatggtaaacacctcatttttatcgtcctattatgatagcataaatgaattgcataaaaaagagatattcgctataattacattggtttattagggatttggaaggataagatcttatgaagaaaaatagatttaaaaataagaagcggatcgttgtcaagatcgggtcttcttctttacaacataaaaaaacaggccagctggattttatcaaactggaaaaactggtcagggaactttgtgacttgaaaaatcaggatatcgatgtctgcctggtatcttccggtgctatcgccgtcggacgaaagatgctcggtatcaccaagcgtcccaagaacctttcgaccaaacaggcatgtgctgcggtaggacaggccagtctcatgatgacctatcagaaacttttcgcagaataccaccagcagtgcggtcaggtcctgatgaccaaaaagaccatgatcgataacgtatcccgcaaaaatgcacagaatacgtttgaagaactctttcgtctgggcgtgatcccggtcgtcaatgaaaacgatacggtaaacacctatgagatccagtttggtgacaatgactcactggcagcgatcgttgcctctttgatcggggcggatcttctgatcctgctttccgatattgacggtctgtttacggcagatcccaagacagatccggaggcaaaactggttgacgtggtagaacagttggatgaaaggtatctgcatatggcaagttctaaggcaggcagtgatgtgggcaccggcggcatgacgactaaactcaatgctgcgcggatcgctacttattccggcgcggatatgatcatcgccaatggtaaggaggtgggtgtcctgcatcagattttagaggatgattttgtgggaaccgtctttaaagcagacaaaaaggatgactttttcatcgcagattttatagaggagaatatgaactaatgacagaggaaaagattgcaaggatcaatgaattatataaaaagtccaaggcagaggggctgacagaggaagaagcaaaggaacaacatgcactccgtcaggaatatctggatagtgtaagaaagaatctgagaagtcagttaaacaatattgatgtcaaagaagcagacggaacgatcgtcaacctgggagaaaaatacggcaagaagcatgaataagcaggaactgcgaaaagaactcaaaaaaaggcgggatgccctgctacaagatgtgcgggagacttacagcagacagatctgtcaaaatctgttggatctgcctatggtaaaagagacagatattatctatgcatatagtgccaccagatccgaggtgtctttgcagatactgattgaagatgctttggagagacatagcaggataggcatgcccaaggtctttggtgataccatggatttttatgttatccggcaactgttagatctaaaaaaaggagcctttggtatcttagaaccgcaggcggacgaaaaagatcttttgacagacaatcggggcatatgcttggtcccgggactgggatttgatgccgcaggcggcaggatcggctatggcaagggctattatgacagatatctacaggcatttccggggctgatacgtatcggatgctgctttgaggaacagttagtagaaaagatcccaaaagaggcgcaggatatatccatggattatctgatgatgccatccggtcttttggtgtgcaagggaaatgaggagagagcatgagtgatttaaaacaattaggaagtctggcaaaagaggcatccagagtcttagcgaccatgggaacaaatgagaagaaccatgcactgacaatggttgcagatggtctggaagcggatgcagctgagatcttagcagaaaatgaaaaagatatggaaaaaggcagagagggaggcatgccggagggacttttggaccgtctgctcctgaccccgtcccgtatcaggcagatggcagagggcttacgtcaggtcgtcgctttggatgacccgatcggagaagtactttccatgaaaaatcgtccgaatggtctgaccatcggaaaaaaacgtgtaccgatcggtgtggtcggcatgatctatgaggcaaggccaaatgtcacggcagatgctttcggactctgctttaagaccggaaatgccgtgatcttaaaaggcggcagtgatgctctttactctaatatggcaatggttgccagcatcaaacgaagcctgaaaaaggcgggcgtgacagaacatgcattagaactcattaccgatacggatcgcgaggttaccaaccggtttatgaagatgaacgaatatctggatgttctcattccgcgtgggggagcaggactcatccgtgccgtggtgaacaatgcgaccgtccctgtcattgagaccggaaccggaaattgtcatatctatgtcgatgagaccgctgacctttccatggcggtagacatcatcgaaaatgccaagacacagcgtattggggtctgcaatgcctgcgaatcccttgtgatccataaggatgtggcagaaaaagtccttcctatgataaagacgagattatttgcccacaatgtcgagatccgaggggatgccagagcaaagaatatctgcccggatatttctatggcaaatgatgaggattggggaacggaatatctggattacaagatctccgtcaagatcgtatcggatattgatcaggcgatcaatcatatcaacaagtataataccggacattcggaagccattatcacgcaggactataaccatgcccggaaattcttaaatgagattgatgcagcatgcgtctatgtcaatgcgtctacccgctttacggatggctttgaatttggatttggcgcagagatcggcatcagcacacaaaaactgcatgccagaggtccgatgggcttagaggcgcttaccagcacaaaatatattatttacggaaatggacagatccgtccatagccttttgaaggagaataactttatgatgagattagaagatgtgctttcggaagacaagattcctgctaccgaagtagaaagacagtattattttattgacgtagcaaagcagatcctggaggataaggaaaaggaagccggacgcaaactgaccttttgtgtcaatactttcgggtgccagatgaatgccagagattctgagaaactgatcggtatcttagagcaggtcggctatgtgcaggcggattccgaggatgcggattttgtgctctacaatacctgtaccgtgcgtgaaaatgccaacaacaaggtctatggacatttgggctatctgcacaataagaaaaagaaaaatcctcatatgatgatcgccctgtgcggttgtatgatgcaggaagagcatgtggttgagaccatccgcaaaaaatatcgttttgtcgatctggtctttggtacacataatatttacaaattcgcagaacttttggtgcggtcgcttttatccgagtctatgatcgtagacatctggaaagataccgaccagatcgtagaagacctgccgattgagaggaaatacagtttcaaatccggcgtcaatatcatgttcggttgcaataatttttgtagttattgtattgtaccttatgtccggggcagggagcgcagccgtaagccaatcgatattatccgtgagattgaaaaactggtcgcagacggcgtggtagaagtcatgctcttgggacagaatgtcaattcctacggaaagaatttggacgagccggtgacttttgcccagttgttggagcaggtggagcagatcgagggattggaacgtatccgttttatgacatcccatccaaaggatttatccgatgaactgatcgaggttctgggaaaatccaaaaaggtctgcaagcacttacacctgccactgcaatccggcagcagcaagatcttgcaaaagatgaaccgccattacaccaaggaagattatttgactctggtagataagatccgcgcggcagtgccggatatggcgatcacaaccgatatcattgttggtttcccgggcgagaccgaggaagatttcttggagactttagacgtcgtagaaaaagtgcgctatgacagtgcctttacatttatctattccaagagaaccggtacgcctgctgcatccatggacgatcagatcccggcagatgtggtaaaagaccgttttgaccgcttgcttagccgtgtgcaggcgatctccgcagaaaaggcaaaggtctacgaaggcaagactgtagatgttttggtagaagaaatcaaccagcatgatgccagcctgatgaccggacgcatgagcaataactctaccgtacatttcccgggagaagccgatctgatcgggcagatccttccgataaaactggtagagtgtaaaggattttactatattggagagcaggtttgatgagacagcactttggtaagagagattggattctgttgggagtcttagcaatcattgctatcgctatctggggctatacgagtttttggcaaaaggaaagtgcagaaaaagccattgtcacgctggatggtgaaacctatggtacttatgatctgaaaaaagaccagacgatcgaaatcaaaaaggatgattctgtatgcaatgtcctttgtattcaggatggagagatctttatgcaggatgccacttgtccggacaaactctgtgaaaagcaggggaaaaagagccacgataaggagaccatcgtctgccttcccaataagatagtggttaccgtggtctctgcggatacatccgggatcgactcggtggcaaactagaggtggatatgagaaaaaaagtcgcattgctgggtgtttttttagcactggcattgatctgtagttatattgaatccctgatccctttttatttcggggtgccgggcatgaaactgggactgaccaatattgtcgttgtgcttcttctttacttttatgggacaaaagaggcactggcggtatctttcatgcgtattttgcttgccggttttatgtttggaaatgcctttagtatcctctatagtctggcgggcggactgctcagtttgtttgtcatggcacttttaaaaaagacaggctggtttcatatgatcgccgtcagtatctgtggagggataacccataatctggggcagatcttggtggctatggtggtcgttaagaattactatatcttcggctattttcccttcctttttgtcggtggctggatcacgggacttttgatcggacttttagcccaggaaatctatacgagaacaaaacattttataagatgatggagagattatgtattcctatatttcaggtcagttggttgaagtaaatgaagaaacgatcgtggtggataatcatgggattggctatgaattttttataccaaaatctgtggtctaccagttgccaaatgtgggcggcaatgtcaagatctatacctatttgtatgtaagagaagatgctatgcagttttttggtttccgcaccaaggaagaactggctctgtttaaactcttgatcggtgtcaacgggatcgggcccaagggggctttggcagtccttggtgtcttaagtgcgcaggatctgcgctttgccatattagcagaggatgccaaggcgatcgcggcagcaccggggatcggttctaagacagcccagcgtgttatcattgacctcaaagacaagattgataagatcgcaccggcgggcagtgccagcggcattccggtaaatgatgctgcctctgcgatcaagacggatgtgatcgatgctatgacctcactcggttactcggcatcccaggcattgcgtgccatggaagatatggagatcacggaggacgataccgtggaagtggtcttgaaagaagtcttaaagaaaatgtcttttttataggagcaggatatggaaaagcgtgttatatcaacagaagttctgacagaagaacgctgtgtggaatcctcccttcgtccggtcaaattggcggaatatgtcgggcaggatcgcatcaaggataatttaaaagtatatatcgaagcggcaaagaaccgtggagaggcactggatcatgtgcttttctacggaccgccgggacttggtaagaccactcttgcctgcatcattgcaagtgagatgggctccaacatcaagatcacatccggccctgccattgcaaagacaggggacatggcatcgatcctatccaacctgcgcgagggggatgtcttatttattgacgagatccatcgtttgaacaagcaggtggaggaatttttatataccgccatggaagattatgccatggacgttttgatcggcaaagaaaattcagccaaatccgtgcgtatcgaactgcctcgctatacgctggtgggagcgacgacaagagcaggacttttgtcggcaccgctgcgtgaccgttttggcgtggtacatcatctggaatactacaacgcaaaggagttgcagaccattgtcttacagtcggcgggaaaattaaatgtcaagattgatgaggaaggtgcctacgaactggcaagacgatccagaggaacgccacgtatcgccaaccgctttttgcgccgtgtgcgtgattttgcggaggtacgttatgacggcgtggtgacaaaggaagtggctgcggcggcacttgaccttttggatgtggactctatgggcttagatcgcaatgacagaaggatcttagagaccatcattcataatttttccggtggcccggtaggtcttgaaaccttggcagcgacgatcggcgaggattcgggaacgatcgaggatgtgatcgagccatatctggtcatgaacggactgatcatgcggacgccaaagggacgtgtggcgaccgatctggcatatcagcagttgggattggaaaaataagggaatagtcttgtaattctaaaaataacccgatataatagatatattgtagacagtaggaggaagcgttttatggctgcgaaaaaaagcgcggaagtcattattgatggtaaggtatataccttaagtggatacgaagaagaagattatctgcaaaaagtaggtacctacatcaacaataaaataagcgagtttaatgagatggaggagttccgtagattatctgcggatacccggagtacgcttcttgccctcaatattgcagacgattattttaaggcaaaggaatctgtcgacaaatatcagatggatatggatcaaaaagaaaaagagatctatgatcttaagcatgacttgatcgcagatcagatcaaactcgaaaactacgaggaaaagatcaaggctttagaagcggataagcaggaattgctggtccagaagtccaagttggaggcatcgcttgaagatgcattgcttggagatatagcggaagataagtaaggacagtttacactgtcctttttgtataataggaaagaggatgtatgagagcaaaagaactggaactattgtctccggcggggaatattgagatctttaaaagtgcgatcgatgccggggcggatgcggtctattttgggggcgatctctttggtgccagagcctatgcaaagaatttcagtatagaggaaggaacagaggctatccgctatgcgcatttgtatggcagacaggcatatctgacggtcaatacccttttaaaaaatctagagatcgaacgggatttatacaagtatatacgtgcctattatgaggcgggactggatgcggtcatcgtacaggatatgggcgtttttgctatgctccgatcttattttccggatctggcactccacgccagcacccagatgacacttgcgggagcagacggagccgcccttttacaaaagcagggagccagccgtattgtcacttcgcgtgagttgtctattgcagagatcgcagagatctaccaaaagactggcatcgagatcgagacctttatccatggggcgctctgtgtctgttattccggtcaatgtctgatgagcagtatgctgggcgggcgcagtggtaatcgtggtcgctgtgcacagccatgccgtctgccttatgatctgctggatgaacatggaaaaaaatccagcatgccggggcagtatctgctcagtccaaaagacctctgtggcatagattatatcaaggcactggcagaggcgggcgtttactcctttaagatcgaaggacgcatgaaacaaaaggaatatgcaacaggtgtggttagtttatatcgaaggtatatggatgcttatctggagggcagagacctgcctgtcagcaaggcagaccgtcagcggatctttgatcttggcaatcgcaagggctttacccacgcctattttaccaggcaaaatgacccggatatgatcacctataccaagccgtcccatgagaaggcagaccttgcagccacggagcctgtggcagaaaaattaggcgtatccggcagatgttacttacagatcggctgtcctgccagactctgtgtgtcatatcaggatggaaaacgtgcggcaagtgtagaagtctttggagatgtggtagagactgccggtaaaacgccgatcacagaggaacaggtagaggtgaaattaaaaaaaacgggaaacacaccttttactttttcagatctggagatcacattggaatcgggcgcctttcttccgatggggcgtatcaatgaaatccgccggaatgctttagatgccttactggaacaaatagaaaaaggatcaggcaagagagaaccggcacttgactttgaaaagttggaaatggaggaaaatggacaaaaggcggacgctttgctgcatctgcttgtcacctgtcagaccaaagaccagtatgtgcttgccttagaggacaatctggtaaaaacaatcggtctgccgcttgccttctttatatgggagcaggataagagactttcaaaagatgcatgtcttgaaaaggtaacaaggatctgcgaaaacgctcacgcaaagaataaagagatctatctgctaatgccaccgatctgtcgcaaaaaggagacagatcttttgcgggcatgggattttctttttgcggattcctattttgacggcatgatcgcagcctcctatgatggactgggatttttggaaagcatagcatatcctaggaaccgcgtgatcttagatcacaggctctatacgttttctgaccggagccagcaggcttttgcgcagatgggctatccacgcaatacagcaccattggaactcaatgccaaagaactgcgccaccgctacaatgcagcatcttatatgttactctatggcaggataccgctcatgatcacggcaaactgtcagaacgcaaatgcaagaggctgcgatcataggccgcggacatattatctgcaagaccgctacaaagagagatttccagttaaaaactgctgtgctttttgttataatgagatatacaacagcaagatctatcagatcttttctgaaaacaagaccttagagagtctgggttttttcggatatcgcatggacttttcttttgagacaaaagaggagatgaagcaggtcttagcgcgatatgagaatgccttttatcataagggttttggcacagaggatgccaaagatgacggtaactataccaaaggccattttaaacgaggagtagaataatggttcatttgatcgtttcggtgagtcgcttttccatgctttttatgatagcgatctatacctattattgttttgcaacactgaaaaagaatatttcggagcgcagacagacgaggctttacaaaaaacagacgaccctgatgtatgggcttttgatcaatgccaatctggtattgtatctggtcatgcaggatatccgggtcttagggctttgcctgtgtgagatccttttgtttgccatcacgcttttgatctatcagaagatctatgcccatgcctccaaggcattggtaaataatatgtgcatgctgcttgcaatcagttttttgatcctgacaagactggatatcgataaggcgatcaagcagtttgcctttgcgggcgtagcggtcgtgatcacctgttttgtgccgattctggttgccaagttaaaggtctgggataaactgggctttttgtatggtctgatcggtatcggtggactggcttttgtatgccttgcagcatcgacgacttacggtgccaaactcagcatcagcatcggaccggtcgttttgcagccatcggagtttatcaagatcttatttatctttttctccgcatgcatgctttacaaatcgacggagtttcatcatgtggtaaaagtgacgatcctagcggcattgcatgttttgatcctggtggcatcgcgtgatctgggtggggcgctgatctatctgatcacctatctggtcatgctctatgtggcgagccgaaagcccatctatatggtcttgggacttggctccggggcattagcctctgttgtggcatatcacttgtttgcccatgtcagagaccgtgtgatcgcctggaaagatcctttaagcgtgatcgacgaccagggctatcagatctcacaatccctctttgccattggttctggcggctggtttggcgtcggtctgggtcaggggatgccggataagatcccggtcgtaaaaacggactttgtcttttcagcgatcgctgaggaattcggcgtggtatttgcaatctgtatcatctttatctgcatttcctgtttcctcatgtttttcaatatctcaatgcaggtaaaggacatcttttataaattgatcgctctggggatcggtaccttgtatggcacgcaggtctttttggcactgggcggcgtgacaaagttcataccgtctacgggagtcaccctgccactggtaagttatggtggtagttccctgctcagcacgatcatattatttgcgattattcagggcttgtatgtaatgcaggtggatgaaggagagtctgatgaaagaatggaacgcgcacgaaagaaacgaagataaagaagttgagatcctagatttcaacgataagcagaaaaagaagcgcagagataaaacaaagacaagtacaagaggggcaaagtacgagcagtctcgtcagatgcagacaccgagaaaggcaaagaatgagcggcggacgacgacacgcaataaggaatatgcgatcgtcacctatgtatttttggcactctttatctgtatgacgggctggatcatttattttatgcagtttaaaagcgaagattttatcaataattcctacaatgcgagactggcaaaactttccgattataccgtgcggggcgatatccttgcaaatgacggtacggtgcttgctacgacaaatgtggatgaagcgggcaacgagacccgaaaatatccttatggcagtgtttttgcccatgccgtcggttattcggtcaacggtatgtccggggtggaactggatgccaactacaatctgctccgttccaatgcctttatcttaacccgtatttttaacgagatccgtgacgagaagaatccgggggatgatgtcgttacaaccctggatgtgtccttacagcaggcatgttatgatgccatgggttcccaggatggtgcggcgattgtcattgatcctgcaacaggcaagatccttgccatggtctccaaaccggactatgatcccaataccatcgcacagaactgggattcttatgtggcggcagattccgattctactgtgcttttgaaccgtgcgacacagggcttgtatgcaccgggatcgacctttaagatctttaccttgctttcttatttaaagcagggcaatgatccgaatgcattttcctatgattgtaacggcacttttgaatacaacaattatgccatgcattgctataataataaggcacacggcagtgagaacctcatggatgcctttggcaattcctgcaattgtgctttttccaatatcgggctgtctctggatctggatgcttaccataagttgtgccagaagatgctctttaaccaggacttgccgacagccttaaaaaataccgccgtcagcaaaatgaccttggaggatggagcatcatcttctttgatcatgcagacagccatcggtcagggagataccatggtttcgccgctgcatatggcaatggtcgccagtgcgatcgcaaataacggtactttgatggaaccatatatcatcgatcatacacaaaacgagagtggaacgatcgtcaagcagtttgatgcgacttcttacggcgaacttttgtcatcttcggatgctgcgactttgcaggaatatatgcgttttgttgtcacgaacggaaccggcagtgtcttgaacagtgacctgtatgaagcatacggaaagacaggaacggctgaattttcatccaacaaaaatgaggatcactcctggtttgtaggctttgccaagaatgcggaaggcaagcagatcgccgtggctgttgtcatggagggtgtggaatccggcggacattatgccgtaccggcgaccaaaaagatctttgatgcttattttggcgcatattagaaataaaaccggtaaattctggataaatgggtaatactatatgagatggtacaaggatttatatgtcagtgaaaatatcacaggaagcctaaagtatatacagtttatggtcgatcatggcttgcaggtcagacccttatatctgatcgtcctgtctgagatcagtgacggacaattagagatcattccggttgcaaccttaaaaatcccgatttttcgccataagtcttatgatatcattggcgtggcaaagggctattatcatgcaagaagtctggtagaacgcatttatggggatgtgtacagtcagaccggagactgtcaggtgaaagcgtatttccggcagaaatttgagaaagaggagcgtgcgtaaatgggtgtattaacaattatcttatccattttaaaagtaatcggcatgattcttcttatcctgctgggcttggtcgttttcatccttttgtacctcttgtttttgcctttccactatgaactctccggcagtcatagcatagaggacggctgggaaggacaggtatatttcgccggctttttgcatttctggcagttgcgctttgccaagtttgcagaggaatacgaagtgcggatctatgctttctgggggatgttgcagatctatccttggaagaaaaaggcgaaggctgtttcagatgatgaggcggatgcagaggattttgccgaggatatgccggcggaggatactctggatgaggatgatatagcggagattttagaagataaaaccgtatcgaaagcagatgtaaaacgtatggcagggtcgagcaagacggcatctgcgacaaagacgacatctgctcaggcagataatgagtctgcggaggatgccggaaatcaggcaggggcgcaggaaaaacagacgaaaaagactgctgcaaaaaagaagaacaagtccaaaacaaaaaagccgagtggcggtctgaaagaaaaatggcagacatttcataaaaatgtgacggatgagcataataagaatgccgtattctttctgctgcaaaaggcactctggattttagggcgcgtcaagccgacgatcatggaagcggatgtcgatttttcgctgggagatccggcactgaccggcggggcgaccggagtcatcagcctttgcccggtatgttatggaaagaaatgtcgtatcattccggactttgaaagcactgaactatatcttctgggcagtatttccttaaagggaattgtatttttatggcatttcgtttatcttatagttagcgtatattttaataaagattgtaaaaaattatttcatttataaagatgtacagggatgcagagatcataaaggagaggtaatatggaaaagaataatgaagtatttaatgagacagtcaatacactctttcaggggatggatggttttatttccaccaagaccgttgtcggtgatgccatccatatcggcgatacgatcatcgtaccgcttgtcaatgtaacctttggcgtggctgcgggggcatttcgtgcagaaaagaaaaataactccggtggtggtatgggcggaaaactcacaccgagcgctgtgctggtgatccataatggcattacccgcatgatcagtgtggagcgcaattccggtatcgaaaagatcctggatatggtgcctgactttgtagacaagttcgtgagcaagaaggaaggagccgagcaggatcctgaggcaagaaaggctgcccatgaggagatggaagatattttaagtgatgctgtcaataatgctacggtagaggagtaggtttagacagaactgcgaaagctaactttatttggatccagagcaagtcagacaaacagatctgattgatgtaggccaggtggtggaattatatgcagcgtagagataggattggaaagtacaaaataattttataaatagaggagacaacaatggtagtagcaattacttatgacaaggaaacaggaaatgtagggcagcactttggtcatgctgatttcttcaaattgtatgaaatcgaaaatggcaggatcatggattcggcagtggtagccccttttggacagggacatgaagcagtggcaagtaccatggatgattattcggtatctttggtcatctgtcagaacatcggtgacggagccatgcaggcactttctgcctatggcattgccgtgtgtccgaatgtagaaggcttggcagatgatgcgatcgaggcttttatgcagggaagccttttgatcgaaaatgcaccgaattgtgactgtgatcatggcgcgggaagttgctgcggcggagaaagttcctgcggctccacttgcgggggctgttgtcactgatagacaatagcaaacagcccgagttcttccggcggcggaggttctgccggtggtggatccggcggtggcggcgtctggtaaaggtttttttcatgcaataatgtaaaagaaaaggcatataatatatgtaagatcacatattttatatgtcttttttattatgaaaaaagtaatcggcttcggcatgttttttacaggcatggggatttttatcggaaattgcatcggaaacggatgcatctgtattttactgacgataggacttttgtgtgtcggatttaaactcttttgttgtgactgagtagaaggggagagcgtgaggagtattttggtaacaaaaaaaggaactgtctaaaagacaattccctgattgacgaaatattaaactcgctcaactttaccagaacgtaagcaagaagcacatacgtacaacttcttaggtgttccgtttacgttacacttaacagacttgatgtttgatttccacattctgtttgatcttctatgagaatggctcacattatttccgaaatgagcgccttttccacaaactgcacacttagccatgactgcacctccttggattatggttttgtaatttctgtattcgatacaaaatcgcaacacgcatattatatcagagcattttctaaaaagcaacgtttttttgcttctttttttcaaaaaatatagggaaagccaaaaattagattgtattttatggaaaaacgtttataataaatacatattatgtcatttatattatggacgattattgtggaggtatatatatgcaaggtcaaatggaaaccaatttg

SEQ ID NO: 12650 - DNA, 21403 bp, Unknown
  gut microbiota DNA sequence
cacatagtatttttcctgatggcggctgtccgcgaacttctggaacttcggtacgatcagatcgtaagatcctgcccccttgcggaaaggtctcatgcggtcatggacttcttttctgccatcgatactcaagaccacgttgcccatctctttgttggcaaattccatgatgtcatcatttaaaagcacgccattggtcgtaagcgtaaagcggaactttttgtcatgtgtttcctccagacttctgccgtatgcgaccagatccttaacaacctgaaaattcatcagcggctctccaccaaagaaatccacctctaagttgcggcgattgccggaattggcaaccagaaaatccaatgcctttctgccgacttcgtaagacatgagttcacgtttgccgtgatactcgccctcctctgcaaagcaatactggcatgccagattgcaatcgtgggcaatatgtaaacacagtgccttgacaactgtaggtctcttggcaaaatctgtgatataaggctcatatgagtcctttgtaaataattcctctgcggcgatcagttctgcgatctcgtcccagacttctgcgatctcatccttgtgatccgggtagcgttttgccatctctgcaaaaatgctgtccttatcggatgactcatacatctcgatcatatcgtaggtcatgtcatccaccacatgaatggccccactgttgacatcgatcacgatattgtaaccgcccattttgtattgatgaaccaaaatagtcctccttctataaacgcacaaatgaccgaacgctatcaagcgtacggtcgcgtgtactttttcttgttttaactacagaatggagcctcccacgaaaagtaggacgctccgcattgtacaaatatgatgattagcgattgttctcgcaagactggttacctacagtacaagatgtcttgcatgcagactggcaagatgtctggcactcgccgcatccacccttctttactgtgttctgtaacttctttgtatttaatgtctgtacatgtttcattgtaaatatctctcctttactgcttgattacgctatattatagcatacaagtgcctaaaggaaaagcattttttctgcttcctcaactcagcataccgcccagcattgccgatccgatgcagatggcagatgcagttcccatataggggatgggcggcaggcttcctttctggatccagagggctgccccaagcagggttgccacatataagatcccaaccaaaagcccccacaaaaacttctgccttttcttccattttcccaggacaaagcccccgataccgcaggaaagcacatagatgacgatcacgccgacctgggcgactgcatcctctttttccacacgtgacacgataagggctaaaagtaccaacaataatccactgataatatacatgacaagcaggctgcgcacaacgcatccccttcgcacctttgtctctttcatttttccatcctttctccacactgggatcggatccgtcccatcatccactatgaatttatgtaaattccatctacaatatgacacatccattgcttttttaggggaataatgctacaatggactccgatatttttaggaggataacggaatgagtactggttggattgtattgattgttgtattggtcattctcgttgcgctgatcattggattgtatttccttggcaagcgtgccgaaaagaaacaggaagagcaaaacgcacaggtggaggcaaccgcccagaatgtgacaatgcttatcatcgacaagaaaaagttacggatcaaagattccggtctgccggagcaagtgatcgcacagacacctttctatgcaaagttgtccaagttgccgatcgttaaggccaaggttggtccaaaggtcatgtcactgatctgtgatgcgacgatctttgatgagattcctgtaaagaaggaagtcaaggcaagagtcagcggactttacatcacaagtgttcgcggattgcacggaaaaacagaatccgaagatggcaaaaagaagaaaaaggggcttcgtgcttgggcactgcgcaagcagaaagaactcaatgccagcaaataagacatatcaaaaaggcttgtccgatacggacaagcctttttctttgctctctttatgccggttgcacacggacttccagccggttctctgccagtgtatttccaccgacatagagatcatagaccagtaagatctgcatgtgtggttctttttccttgacaacatccaattcatagacatgcgtgacaatatccatatccatgcatcccataggggtccgcatctgcgtgcttgtgcgctgccccggaagaaattccatgacccgtcccatatctcctgtcgtcgtcatgcggcagccgccgtcccagacttccaatttattgcgggtacgccccatctcatccacctgcatatattgaaggattgcttttccatccgttgcctgatatctgccgtggtaagtaagccgattggtatccacctgcccatccacggtctgtatgcttgtcatttctataagaatacgattatccattggtatatcctttgtctttctgtcttagtctgtcagccccggtgcttcccggctggctcatataggattataccctattcctatcttctcttccatggcttttttatctgcacattttacggacatcagagataacggaaacggatctgcttgtcctcggactcgatgagttttttatactgatataaggtaaagacctggtacatctgctctttttcatcctctcccacgacctcatatgtattgtcccgaaaacacatattgggatacatgacgcaccaccagtttttgccctgcgcctgaccgatccgcacctgtagggaagtataattacctgcaggcaaatgataaatgccgtaaaacttctccgggaaatccacatcctcgatcgccgccgtgaccggataggtataaccttcttttgcgatctcctgccccgcgaccttctcaatctctttcagatgcgcacggatgatgctctctgtctcctttttatcgcttgctgtcgcaagcaatcccgaaacataagcccccacctgatcccgcacctgcaatttgagtgcctgatcttcctcagtatcactgttggcgatcacatgaaaacgaaagacttcactggcgtaatcctcctgcaaatgccggctctgccctatgaggacaagtagtcctacgatcaaaagtcctgccacgatccttatatttttcctttttgcatacatatctgcttcctgctctttctgtcttaagattagaaacaccggacatccatccgatgtttctaaccaaagtatgcaaccaaatttttcttttatacaatccttattccacgacacggaatttacagattgtttccagatgcagatctttccgataagcccctgcccgcccctggtatttttcataaagatccagatcatggcagcgcagatgtccataggagttggcaagatccagccccttttgctcgtatgcattttggatcatgcccgccagataggcagcggcagcctcctgcaatttctgggcagaaagatcgatgctgtccttttgtatgatgtctccgcgaaaggtcaactgacagccgacaccggagtttgtcgccgtatattcataagagactttgacattttccagatggatctgcccgccgtccacgtccatatccaccatgccaatagcaccactgcacagtcctgccacatagccttcttctgcggtcacttttcgcaagatctggtcgtctccactgacgtcggtctgcatgagatagtagccctccacgaccggcagatcgtcctgcacgccaagactcggcaggatagtactgctgcccccattgtaccagtcacagatcaggctcttaaaagtcgctccgctggtatcctcgtaattgggattgccctccagcatctctgccagataattgcccagatcttcgtccatttcttcttgcagattgctgatggcatccacatcctccgccacaaaaacgatcatgttgcccggcagatccacaccgctgtttccgatctccaccagttcctgcataaaatccttttcttccagaaattctgcctccaacaaaaggactttgacatggttgaggtctaggatctttccgtttttctcatccatacggcggattacacctctcacggaggatgaccgtacagtcagttcatcactgccctgcttggtcttttctttttcggacacccgggacagatccatatatttataggtaagcacgcagtcgccgtcctccgcgcgcagggtcatgaccatagggaaactcttattttccagttcctgcacactacagccacatccaaacaagaccattcccagacaaagggccgccagtgccatccctctttttcgctttttcctttccatcagaaaaaaaggaaaacacagggcaagggctgacagccaagccagaagcaccaccagtccgccgctttttctaccgtaataatactgtcccagactgatcagaagcatggcaagggctgacagccagacaactgccttttcccctttcttgtgtgcttttttttccagtcccagccctcgcttgatgcagaagatcccataatgcagaccactgccgcaaaaagcgatcagccccgcgaaacacacgcctgccaccagggcttcctgccgccgcaaaaaaccgccgggaatgacaatgttgctggtaaagatcatgatcggtgtctccgccgccgccaatgcctggctgccaaaagagccaagcagcatctcataagtcaggaagaggacaagggctgacagccagatcatctcacaggtccctttccactgggctttctgatccacgccgtcttccagaccatcccccataaaaaagacaaactggcaggaggaaaagaccaaaaaagcaggataccagcccagaaaggcaaagccctttttggaaagctgcagtgggaaaagattcatgccacgcaggctgcttgcccccagtgccaataggatgatcaaaagcaggagcataggccagaacaagacctcaaaggtccgtccccgcccttccagaccggcgcgcctgctatagagcaccagaagcaggatcaggactgtgagcaggagaaaggactcctccggcagcaggaaggtatgcaccaggtctgccagaaggtatagcccaaaggctcccacgaaaagcagatagatcccatagggaagatagagccaggaccgatcacgtaccccgccccgcatacaggcaagcaaaagcccgccatacaggctggcgagcagggctcccaggaagatagaacatccgcctgcacgctctgcgtgtcttgccagaagatccggcaggatgaccagccccagaccgaccatgtcaaaaaagagcagtcttttatactggcgcagggaaatttttccgttttgcatctgcatggctattcgtctcctttccgacggaattttcttttctgatcccattttgcatgtaccgaccggtagaagatttttcccagtggaaagcggatcagtgaatccttacgtctggtctcctcatcccctttggccccgataaaaggtaacagataaggctgaccgaaacttttcaaaagtgccagatgaatgagaatggcaaacatggaccataggaagccaaagaagcccagccacgcgctcataaggatgacaaaaaacttaagcatcctaaaggctcctgcgaattcctcattggggatggagaaggaacacagggcggtaaacgccaccacaatcacaacgataggactgacaatattggcatccactgccgcctgcccgatgatgagtccgcccacgataccgatggtattacccatggctcccggcaaacgcacgcccgcctcccgaagaagttcaaaggatagttccatcaaaaggacttctacgacagcaggaaaaggcacgccaagacgagccgccgcaaaggacatcagcagggtcgtcggcaggatgccggtctgaaaattagtaaccgccagatacagccccggcatagcgactgccagaaaggacgccacatagcggagcatcctgccaaaggaagccacgatcggacgctgatagtagtcatcggcggtctggataaaggagttgtagtctgacggcacgatcagcgccgctggagagttattgcagaggatgaggacttttccatccaagactgccatgactgcccgatccgggcgcagggtcgactggatctgcgggaatggggacagccaggtttcttccgtcaactgctctgccatcccgctgtctaggatcccatcaatgacaaaatcagatagtcttgccttgacatgctccagtagtccttttttcacgattccatccatatacaccaggttgaccagggtgttagtgcgcacgcccagactcatattttccactttcagatctgtggattgcaggcgtttgcgtagaagggctgtgttgatcttgacattttcattgaatccctcgttagagccacgcaggactttctctgagtctgtgtcccgcacagtcgcccccggatagcccttgtccgggatcttcatggcatgggcaaagccgtcgatcaccaagatagcatccccggtcaaaagaccggcggctgcctcctctgccgtgtcatataagaccatgtccgaaagtccctgcccattttctgccaactgccgccgaatctcattttccggcatgacagataaccgggtcaaaaactgcccgatggctgtggtttcaaacataacggacgacatggtgatctcaatgtaaagtaaaaagcagtcaatgccgtgctctgctcccagcgtcatatcccgctgcaggatgtcgtcgcaatttgcgaagatcttttgcattgcacctttgtcttctgcgatctttcctgtgaatttatatccttgctccatcctaactacctctcaaacattaaaagagacaggctctcgcctgtctcttagtatggtctgataatttgaaatttattcctgctcacggataaccacgcgcacagcctcgatctgattttccagatgcgtatgcatgatcgccttgacatactcgctgtcctttttctcaaagcccgcgatgatcttggcatgctcatcgatcaactgattgtaagtgctattgcccttgacatattcatagcgataacgataggtctgctcacgcatattattgacgatagtctccaactttggattgtccgccatgcgataaatgacattgtgaaatgcctcatctgcctccacgatctttcgcacatccccggatctcgttgcgatctcaaaatccttcatagactctttgagttccaataacaattccagtgtcatacgctggcatgccatgctgaccgccagttcatccaaagcatcccggatctctaagacatcctgcagatccttttccgtcatcttagcaacctgagctcccttgcgcggaatcgtcacggcaagtccttcctgctccagcatacgaatcgcctcacggatcggtgttctgctgactcccaatttatttgccaaatgcatttccatcaaacgctcgcccggcttgagatcccctcgcaggatcgcattacgcagggtattgaataccacgtctcgcaggggcaaataggaatccatgtccaactgtaattcttcactcattctctattatctcctattattatatatggtcgtgcattgtacgcgattggcaagtcccgatgcctctactgcacgctttgctctctgtaaagtctcctcatcatcaaaaaaaccaaagacggtcggaccactgccgctcatcatggaaaccacggctccattctgccgcatcaactccttgatctgtgcgatcaccggatatttctgaatagtcacatcctctaagatattgcccatatgggatcccaacgcatgcaggtctcccgctgtaatatctgcgatcatggcatctatgtccgggtgcaccggatcctcgatcgcatccagatgctcgtaaacatacttggtagaaacagagatgggcggttttgcgatcaaaaccggacaacgcatcatcttgggaagttctgtcaactcctcaccgatcccttctgccaaagccgtcccccgcatcaggcaataaggtacatctgcaccgatctttacgcctcgctccatcagttcttttttggtaagtcccagtccatggatccggttcataccatataaaacggctgccgcatctgaactgcctccagccatgcctgccgcaaccggaatcctcttgctgagtcggatctgtgtaccatccgtaatggaaaattcatctgccagcaacttggcagccttaatacaaagattatcctcattggtcggcagatacttggcattgctcgtcatggaaatgcctgtctctgcactcttagacaccgtcaccagatcatacatatgcaccgtctgcatgatcatgcgcaccagatgatatccatcctcccgcacgccagtcacatccagaccgatattgatcttggcgagtgccttcactgtcatctcgtccatataaactcctcatcgctttagcgatgtatttattttagtacaatccctattgtatcattctctttccaacagttcaacctatttttgtattcaaaaaacaacaatatgcaatgctacagacaagaaaaatcccagtcaaccttccttgttgactgggtaagcaattctacttttcttctgcttcttttttcccctgctcctcttttgcctttaagatcgcctcatttaacatgagcatcttttcgtcaagttcggatacaatcttggaacactcctgtaagtcatggctgatatacgccggtgcatgcccctcgaatttataatagatcttatgctccagactcgcccagaaatccatggcgatcgtgcggatctgaatttccaccttggtatctaccatgcgatcggacaagaagatcgggatcgtaacgatcatatgataactcttatagccgctcggctttggatttttgatataatccttgatggataaaacggtgatatcactctgtctgccgatcatatccgccagacgatagatatcggatgtaaaggaacagacaatacgcacacctgcgatatcgttacagtattcgatcatattctgaatggaatcctcgtatccatagcgcttcaatttcttgacaatactctccggcgatttcaatctggtcttgacgtattcaatcggattgtactgatgcacatgctggaattcatcatttaagatctcaatcttggttcccatttctttcagtgctgaattgtataaaagcattgccgtattccacgacaaaaccgaatcgtcctgcatcattatgctttccatttctaactaccccctgcttttcgacccatcctagtcttcctcaatgacatcgatctctaaataatcaaacggaacttcttccataaaacaatctttggtaaatctggcttttgcctggcgtttaaaatcacgcaccgtaacatccagccataaaggtctgcccagatccatatcataacacgcctgatccagtgcgccaaataccttgtgcgttctcgtctcatccgaattgtcctcaatgaccagatcccgcaccatacggctgtctttccactgtttgaaccatatacgcaacttcttacgtcctcctacttttgtcttctctgcctgttgacctcatacatgagtatgcctgccgccattgccgcattcagagattctaccgatccctccatcggaatacgcagataagcgtccgccatcgctgccgtcgcatccgtcagaccattaccctcgtttccgattaggaatccgcaatcagacctataatcaaacatatcatacatttgctttccttgcaaatgcgctgcatataaagatatgcctgcctccgagattctatgcaggtctttttcccagtcttctgccacataaaaaggcacccggtaaaggcttcccatggtcgagcgcacggtctttggatgaaaaagatctaccgtcgtcttgtgcatgatcacaccggtaacgcctgcgccttccccggtgcgaaacatggtccccagatttcccggatcctgaattccttccaccaaaagcagatgtgccgggcgcctggcaagaatatcctccagatcataggaaggtctttttaccacagcaagcactccctgtggggtctgtgtatccgacatagccttcatcaccgcgtcactgacgatctcatctaccggtccatcccaggtatcttcaaaagactctgccacatagatctcttccagcatttcttttggcgtctcaatgaccatgcgcgggccctctgcgataaagacattttcctcgcgacgaagccgcgcttttttctgtaattgtataatgtgttttacctgcttatttgcggtgcttgtgatcatactgcctgcctttctgtatggtagaaaaccaaaaaagggatgatgcacgcggcaccacccctcatatcattcctgttatgaattgcaaagcgtattgcagatctcgaactgatattcatcaattccctttgtcattgcaagtgcctcatcaatatcaaaatcaacgaactcgccatgacgataacctacaacgcggttagatgctcccttgcaaagcaggtcaactgccaatgcacccatggtagatgcataaacacgatccttacatgtcgggcttccgccacgctgcatgtgtcctaagatcgttgctcttgtctcaataccggtagcagcctcaatacgttttgccatagaagcagaatgtccgataccctcggcattgatgatgatatgatgctgcttgccctttttcttgccctcgatgatatggttgacaagtgcctgctcgtcataatcatatctctccggaagcaatacatcctcggcaccgttggcaataccgcaccagagtgctatgtaaccggcaccacgtcccataacctcgatgatagaacatctctcatgggaagtagaagtatcacgtaccttgtcaatggcttccattgctgtatttacggctgtatcaaatccgatcgtgtactctgtacatgcgatatccagatcgatcgtgcccggcagaccaatcgtattgatccccagtgctgccaacttctgcgctcccttgaaggaaccgtcaccaccgataacgaccaatccatctattccatgcttcttgcagatgtctgctgcttttttctgtacttctggttcaatgaactccaagcatctggctgtctgcaagatcgtaccgcctcgctggatgatctcagatacactatgcgcatccatatctatgatctcttcctgcaaaagtccggcatatccacgcttaattcccttgacctttttacctctggcaatcgcctgtcgcacgactgcacggatggctgcattcattcccggtgcgtctccaccacttgttaagacgccaattgtctgtacttcttttgccatcgtaacttcctcctataatttaatccattcactcgacttatattctaatatctttttctttgaaattcaacattcttttccacaacttttacattttgtctgccaaaaatctgtgatattttctccatcgcatcctcatttatggaaatattccaatttgccggcatccgcttcatcgccttgatagcagaaatatataccacaatgttatcttccccatccatatcggcaatggcatcgaagagagtctgctgttttgcttcaaactcctccttggtcgcaaactggatccagagttccttgcgcacttcgtcaaatccatgcatttccgtacagatcagttttgcattcttttcttcctctgcctgggcacgtcccttgatcaggaccttgttgtccacttccagaagatttcggtatttttcgtattctctggcaaagacgatcacttccacactgcccaagaggtcttctatggtgataaaagccatggtctggttgtttctggtatatttgatggtcttgtccgtgatcatgccgccgataatgaccattgccccgtctgccacagtcgccttatgtgtctcctcatccagcataaaatctcgacagcctgcagtcacgttcttttttaaaagttctgtatatttctctaaaggatgcccgctgatatagacacccagcacctctttttccaatgccagaaattcttccttatcgtattcttccagatccggcatcttgatctcaaattcttctttgatatcatccgatgcgatgtcaaagagagtcatctgccctgccatggaagattttttatcactgctaatccgatccatgatagatgggaataccgtgatcatctggtggcggttgccgtccagtccatccatggctcccgccttgatgaggttttccaccgcacgcttgttgacttccttgccactgacacgctttaagaaatcctcgatagtcttgtaatcgccgttctgctgacgctctgccacaatgaaatccacgaccggacgtccaatactcttgatcgcatacatgccatagcggatctttccgtccgatacggcaaacttgccctctcccacattgatatccggtggcaggacgtcaatgcccatctcccggcagaccatgatgtactcagcaaccttgcctgcattatccagcaccgaagtcatgagggctgccatgaattcaaccggataataatatttcaaaaaggctgtctgatatgccacaaccgcgtatgctgccgcatgggacttgttgaaagcatacttggcaaaatcgatcatatcgtcgtagatcttatttgccacagcctcactgatcccgttggcaatgcaacccttgacgccctcttcctcatttccgtaaacaaagttctggcgttccttttccatgacctgggtctttttcttggacatggcacggcgcaccagatcgctccgacccatggaatagcccgccagatcacgcacgatctgcataacctgttcctgatatacgatgcagccataggtcggggctaagataggttccagttgtggacagtcataggtgatggatgacttgtcgttcttgcccttgatataggcagggataaagtccattggtcccggacgatacaaagagattcccgcgatgacatcctctaaactctccgggcgcagttccttcatgaaattcttcatgccggcactttccaactggaaaatcccttccgtcttaccggatgagatcaggtctaagacctttttatcatcataatcaatatgatccatatccagcgatacgccataatttttcttgaccaactggacagcatcatcaatgacagtcaaggtacgaagtcccaggaaatccatcttcaaaagtcccagttcctcgatcgtcgtcatgacgaactgggttgtgatcgtaccgtctccgccacgcgataacggcacatattcatccattggtttttgggagataacgacacctgccgcatgcattcccgtatgcctcggcagaccttccagacgttttgccgtatcgatcagccgcttgacctccgggtcatcctcgtacatcttgcgcagatccgggctcattttcaaagccagatccaatgtcatgccaagatcatccggcactgcctttgcgatggaatccacataattgtatggcatatccatgacgcgtccaacgtcccggatgacgccctttgccttgagggttccaaaggtgacgatctgggtcacacagtccttgccatatttttcaatgacataatcaatgacctcacctcggcggttgaagcagaagtcgatatcaatatccggcatggatacacgttccgggttcagaaatcgctcaaacaaaagattgtaacggatcggatcgatattggtgataccggtcgtataggacaccagacttccggctgcactgcctcgtcccggtcctaccgggatatgatgtgttctggcataattgataaaatcccagacgatcaaaaaataatccacatatcccatcttttggatggtctctaattcataagtcagacgcggtttcaattcctctgcccggtctccgtagcgttcctgcaagccttcaaaacagagtttgttgaggtaggtccaggagtcgtagccctccggcacctgataatgcggcagttttgtcacgccaaattcaatctctacattacagcggtcagcgatcttttgcgtattggcaagcgcctgtggtgcataaggaaaaagtgccgccatctgttcttcggatttgacaaaatattgtcccccctcgtaacgcatacggtcggtgtcggtcagtttctttccggtctggatacacaaaaggacatcatgcggcgccgcatcatctgcataggtgtaatggatatcgttggtgcagaccagttcaatgccggtctccttgctcatgcgcaccaactgctggttgaccagttcctgcgtctcgatcccatggcactgcaattccagaaaataattgttttctccaaagatggcacggtgcttaagagcgatctcctttgcctcctcatacatgccacgctgcagataacggggtaccacgcctgctaagcaggcactcagggcgatgatgccttcatggtatttttccagtgtctccatatccacacgcggtttgtagtagtagccatccacaaaaccaatggaaacgatcttgatcaggttttgatagccgacattattttctgccaaaagcaccagatgataatagcggtcgtccccatgcgacaactcacggtcaaagcgagaacccggtgccacatagacctcacagcctaagatcggccgaatgccctgttttttacattctttatagaaatcaatgacaccatacatgacaccatgatccgtaatggcagccgcattcatgccaagttctttcacgcgcgccacatattcagttatcttgttggagccgtccaaaagactgtactccgtatgtgtgtgtaaatgtacaaatgccatgtctttccctttcgtagttatgataaattacgccatatttttggcattcttgttcaagagcaaaatgccaagataagtagccaccatagagccaaataagatacagaagaactgcatcggtccattgccgcctaaggccagaccaccgctcaaaacgcccacagcattaaaactcatatgcaggcagatgcccatggaaagattgcctgccttttccacaaaatatccaagcactaagccaaataaaaaggtatatactgcctgcagcggattcatatgcataccggcaaaaagcagtgcctgtaccacattggctgcccaaaacggcataacacgtctggcataagaaaaggtcagtccgcggaaggtcagttcttcacagatcggtccgatcacgaccgtgtagagtaccaacggcagggtcagtgactctgacaagcccatgccgtccatcaaggtctcatactgggtcagccagttgggaaaaagaacggaaactacattcatcagataagtacacagatactgcatcccaaaagaaagcaggatcacgcccacaatacaggtcgccggatttgccttcaaaagcgcaaaggctcccttttttgcactcttatcacacacttttttgtagtaccagaagaaaaacaatacggctgcaatagcggcatataccaacataacgcccacgttaaagtccgttgatgtcaccgcgttatagtaaccctgaaagaagtccgaaaaacttccactggtataagtgtgtgccttataacaaaagacaaaaaacatccccacaaaagaaatcgccatctgtaaaacaaagatacaaacgctcggcagaaagcacttccaaatatttgacaatttattttccatttaaaaattcctttatctgactcatctgtttttgggcatccgcgatcccgttatcatacaactgcatcattaccgccgggtcggtggtgtaggtgccgatcttgatgtctgcggacggacagaaagtcataacctttccttctttttctaatgtgtctaccatatccatctgccggttatagacttcgtggcgatggttgagatcctctacgatctttgggtatttatgcttgagcccaagcgtataggcgatcttgccgccctgcggcttcatgcgaaagccccgcggcttggaaaagatcacgatcaaacggtcgcagccatgctctagggcatgctcgatcggcatggaatccgataccccgccgtcataatagacatgtccctcataagaaatcggacggcatgccaccggaagggcacaggtcgccatgatcggctggtattcgttgcgccggatctcatttttattaaaatagtgaggcagccctgtctcggcatccgttgccggcagataagcctccgtcggattgttatgataagcatcataatccagcggatcgccgcctccctcatttgtcatcgttccataaatgtattgcaatccaaataaggatcctgttgtcagcagactgcgcagactgatatagcgcggatccttgacatgtttggtgtaatagcgcatgtttcgctcacgctgccctgccagaaaagacgcactgtttgccgcgcccgcagatacaccgatgcagtaatcaaactgaatcccctcgtctaaaaagatgtccaaaactcctgcgctgtatgcgcatttcatgcctcccccttcaacgatcaatcccgttttcatctctttgctccttgtgatagcgtacgccataagcacacgtttataagacgcaatataacagcgagccgcaggaaagcgaccgctgtcatatgtgcgtaaaaatatttattatttgtttactgtgatcttatccaaatgccagatatcatccacatagtcctgaatggtgcggtcagatgagaacttaccaacattggcaacatttaaaagtgccttctttgcccatccggtctcatccatataggcttccatgacacgctgctgtgcctctgcataagaacggaagtctgcaagtacaaaataggtgtccgcgtactgcgtacactgtgtattcaagagtgaattgtaaaggtcacggaagagttcagaatcgctgccactgtaaaatccgttgactaactgggtcaggactttacggatatcctgatcattgttgaatatatccattgggttgtaatcacggttcttctcatgtgcaatgacttcctctgcactcataccgaagataaaggcattttcctcgcccatttcctcaaccatttccacattggctccatccatggtaccgatggtcagcgcgccgtttaacatgaacttcatgttgccggtgccggatgcctccttactggcggtagagatctgttcagatacatccgccgctgcaaagatccactctgcgttggatacgcgatagtcctcgataaagacaactttgatcttgccttcgatactcttatcgttattgatgacctctgccacattgttgatcagtttgatcgtcagtttggcattcttatagcctgctgctgcctttgcgccaaagataaaggtgcgtggataaaattctttttccgggtgctccttgatctggttgtaaagatacatgatatgcaaaatattgagcaactgtctcttatactcatgcagacgctttacctgcacatcaaagatagatctcggatcgacctcgatgccattgtgctctttgatatattctgccagacgcagtttgttctggtatttgatgttcatgaactcatgctgtgcctttttatcatccgcatagagttctaatttcttcatctgggacagattggtaatccattccttgccaatgtgatctgtcacccagtctgccaaaaggcggtttccatgtaagaggaaacggcgctgtgtgataccattggtcttattgttgaatttctccgggtacatatcatagaaatcttttaaagactgggtctttaagatctctgtatggagttttgccacaccgttgacagaatagcctgccgcaatggcaagatgcgccatcttgacctgtccgtcacggataatacccatgcgggctaccttaccctcgtctcccgggaagcggttgcggatctcgatctcaaaacgacggttgatctcctcaacgatctggtaaactctcggcagtaagcgggagaagatctcgatcggccatttttccagagcctctgacatgatggtgtggttggtataggcacaggtcttggtcgtcacttcccaagcctgatcccaactcaagccctcctcatccaaaagcaggcgcatgagttctgcaactgccaaggtcggatgggtatcgttcatctggatcgtaactttttcgtataatttacgaatgtcgtcatgatgctttttgtagcggcagagaatacgctgcaaacttgcagatacaaagaagtactgctgctttaggcggagttccttgccatagatatgattgtcgttcggatagagaacctcgacaagattgcgtgccagattttcttcctcgactgccttatcatattcccctttgtcaaaggaatccagacgaaagacttcctttggctctgcatcccaaatcatcagggtgttgaccatattgttgtcgtagccgacgatcggcatatcataaggaactgcgatcacagaagaatatccctcgtggataaagtgcaggttgccgtcctcgccctgctcggttctgacatagccgccaaaacggacttcatgtgcatattccggtcgcttgatctcaaacggataaccgttctttaaccagttgtccggcacttctttctggtaaccgtcctcgatcttctgcttgaacataccatagcggtagcggatgccacagccatatgccggatatcccaaagtagagagggaatccataaagcaggctgccagtcttcccagaccgccatttccaagtgcaggatccggttcctgatcctcgatcgcattgatatcaaatcccaattcatccagacattctgaaatctcatcatagcagcagagattgagcatattgttgcccaatgccctgcccattaagaattccatagacatataatatacggtctttggatcctttttctccatggtcttctgggtcgccagccagttgtcaatgacttcgtctttgactgccagcgcaactgcctgatagacttcctgatcatttgcctcctcaaactccttgcgatataagagtttgacattttccttgatctgtttcttaaacgctttcttgtcaaaagtatgaaccatctgctcaggctcctttcttctcagcaatctcattattgttttgaaactcccagagtaactttctcgccattgatgttccattctttattgtattcgccctggtcgcctgctgtgatctctgttgctaaaacttctttcttgattgtatcacagttctcggcaaagatgtgaccgactttttcggctccctgatagaataccttgatctgatccataacttcaaagtctgcttccttacgcatagtctgaatcttgctgatcaactctcttacaaatccttcttccagtaattcttcggtcaggttggtatccaataccaccgtcatatctgcatcgttttctgtcacatagccctctttttgggtcatggtgatcaaaaggtcttcctcagaaagttcgattgatgcatctacctccggcagtctgagcacgccatcagcctttaagcctgccatggcagcgttgccgtccagatctgcaagtgcctgctggatgccctttaagaacttgccgtattttggtcctacggtacgaagctgcggcttgaaggtataggtagtaaagtctgccacgtcacctgtaaaggtcactttcttgacatttaactcatctgcaatgatatccatatagaatgccggcagatctttttctgccttgacatacatctgaccgatcggctgacggttcttgatgttggctgtatttctgcaggcacgtcccataacgacgatcttcaaaagttcgtccatgttgctttccagttccttgtcgatccatgcctcattaacaaccggatagtcgcacagatggatactttccggtgctgctgcatcaatgcttctgacaaggttctgatagatctcctctgtcatgaatgggatcattggtgctgctgccttacagatggtaaccagacaggtgtaaagtgtcatgtatgcattgatcttatcctgctccatgccctttgcccagaaacgttcacggctgcggcgtacataccagttgctcatgtcatcaacaaaagcatccaatccctttgctgcctccgggatacggtagtttgccagattgtcatccacatcctttacagccgaattgaggcgggaaagaatccacttatccataacggataatttgtcatattccagtgtatattttgttgcatcaaattcatcgatattagcatatagtacaaagaatgcgtaggtgttccacagggttcccatgaactttctctgaccttcctgtaccagtttgccggaaaatctcttcgggatccatggtgcacttgctgtatagaagtaccagcggatcgcatctgcgccgtaggtctccaatgcatcaaacggatctaccgcattgcccttggacttggacatcttctgtccgttttcgtcctgtacgtgtccaagtacgataacattttcataaggtgccttattgaaaagcagggtggactctgccatcagggaatggaaccatccacgggtctgatccactgcctcagagataaactgtgcagggaactgctgttcaaataagtctttattttcaaatggataatggtgctgtgcaaatggcattgctccggagtcgaaccagcagtcgataacttccggtacacggtgcatggtctttccacaatccgggcaggtgaaggtcacggcatcgatatatggacgatggagttctacttctgctgcctttggatcaccggcacgctctgccaattctgcacggcttccgatacattcctggtgtccgcactcacattcccagatgttgagtggtgttccccaataacggttacgggagatcgcccagtcctgaatgttttccagccagttgccgaaacgtccgctgccgatggattccgggatccagtttacggtgttattgttgcggatcagatcatcctttacggctgtttccttgatataccaggattctcttgcatagtagatcagtggtgtatcacagcgccagc

SEQ ID NO: 12651 - DNA, 4078 bp, Unknown
  gut microbiota DNA sequence
accctctttatccagatcgaccaatacatccttgtctgcatctttgacaaactttccggcataaggtgtctctgccgtcatctcgcccttgccgtcaacaaactgtacgaaaggcaggtcgtagttgcgtccgacattggcatcgtcctcaccaaaagcaggagcaatatgaacgataccggtaccatcgctcatggtaacgtaggtatcacaggtcacgaaatgtccctttttgttctgctttgcagcggcttctgctgcacatgcatagagggcttcgtattccttgtactccagatccttaccggtcatggtctccaaaacttcgtatgccttctcgtcatcctttgccaaagttccgagaaccttgtccaagagtgcttctgccatgtaataggtataaccgtctgctgccttgaccttgcagtaagtctcattcgggttgacacaaagtgcaacgttagaaggcagtgtccaaggggtcgttgtccatgccagaaaataagcatcttcgcctacgaccttgaaacggacgatggcagaacgctctttaaccaacttgtagccctgcgctacttcctgagaggaaagcggcgtgccgcaacgagggcagtaaggcacgatcttgaagcccttgtaaagtaactttttgttccagatctcttttaatgcccaccattcggactcgataaaattgtcatcataggtaacatatgggttgtccatgtctgcccagaaaccaaccgtgccggagaaatcttcccacatgcccttgtatttccaaacagattccttacactgctttatgaaaggctccataccgtattcttcgatctgctccttgccgtccagacccagtttcttttctacttcgatctcaaccggaagaccatgggtatcccatccagccttacgaggaacatacttgcccttcatggtctgataacgagggatcatatctttgatggtacgtgtctctacgtgaccgatatgcggcttgccgttggctgttggcggtccatcataaaaggtgtaagtctctccctcttttctattctccatggatttcttgaaaatgtcattgtcacgccagaatttctctgtggctttttctctctcaacaaagttgagttccgtgttgactttcttgtacatagtcgacttcctttctatcatttcttattctgaacaaatgcagtgcataaaagaaaaaacttccgtccgtataggacgaaagtttcgtataccacctataacgctgtacttaaaagtgccccgcacctttgcatacatgttctctgtaacgtagagactcacggctttcctaccagataaactccttcagtccgctgctaagaagtgatcttccacagatagatactaatatcggctcacaccatacccgactcgctcgacgttctcacctctgcgtactgtcttcctcaacgcatttgtcaaatcatatttcgttaaaaattatacttagtgtagatgcgtttgtcaaggattgccggcgaattacagcgtatcgtcttctccgttcatatcaatgccatactgctcaaagaactgctgcatgtcctcgtcatcttcaaaatcattctgcatttcttcctgcatcatatccataaatgctgcattactgaacaaaagcccccatgtgataactaaaagtaccactgatatgacagccgtcgcgataccaccgattgccatgccctttttctcacaggtaacaatctggatcacaccaaagacgatcgccaggatggctaagatcacattgacgccactgcaaaaacaaagcagggatatgataccaaggactaaggatgccacgccaaagcctacacccagtttcttgccatttggtcccacctgcggtccggtctgcccgttggtatatggattgctattgtaggaatactggttattctgtccactgcctccataagggtttccgttattctgaccggcatttccgtaaggatttccatatggattgccatatgggttgccattgacacttccctgattgcttccgtatggattgctttgattaccgtatggattgttgttcgttccattgtctccgtatgtattaccagaatgttctgatgtattttctgtagtctcgtcttcaaacatatgctcgttattatccatgatgctcctccaaatctatttgtgtaagtcgatgatgttataatatatgcccatggtcccgacaagtaaaataaaaaatgccagatacacgcctgcacatatataagccgtcacgaccataccatttttaccaaaatgtttttgcacataaatcccaagaacgatcgcagccactgcaaagaccatccccacataccaataacagaccagacatggtgccaatatgccacatatcatgctgatgaccgataaaattgtagataatttctgatctttcatatgcttcttatgccctctggaatttgcttttaatcttaccacttaatctttcaaaatgccatccctcattttttcttccttatttttataaattggattataatgtaagacaattataccatttgtaaaagaagaaaaggggatatttcatgagcacattgaatttgaccctgctgacagatctgtatgaaatgaccatgatgcagggatatttcaaaaacaacaacaatcacaccgttgtgtttgacgctttctaccgcaccaatccttcgggtggtggctatgccatctgcgccggagtggaacaggtcattgaatatattgagaacctgcattttgatgcggatgacatcaactacctgcgcggactgcacatctttgatgaggactttctcgcctatctggcagactttcatttttccggtgacatctatgccgtgccggagggttctgtcattttcccgcgcgagtctttgatcaaggtcatcgcgccgatcatggaagcgcaattagttgaaaccgccattttaaatatcatgaaccaccagtgcctgatcgcgaccaaggctgcccgcgtctgctatgcggctgagggggacggcgtcatggaatttggtctgcgccgtgcacagggaccggacagcggtacttatggtgccagagccgccatcatcggcggttgcaaggggacttccaacgtacttgccggacagatgtttgacgtgccggtgcttggcacccacgcccattcctggatcatgagttttccggatgaatatacggcattcaaggaatacgcaagactatatccaaatgcctgcacacttttggtagacacctacgacacccttggttccggcattccaaatgccatccgcgttttcacggaaatgcgcgaagcaggcatcaacctgaccaattacggcatccgtatggatagcggcgatctcgcctatctttcaaaaaaagtgcgcaagatgttagatgatgccggatttgccgatgccatcatttccgcttccaatgacctggacgagtatctgatccagagtttgaaaagtcagggggctaccattacttcctggggtgttgggacaaacctcatcacctccaaggattgccctgctttcggcggggtctacaagttagcggccattgctgatgatcagggaggctttatccctaagatcaaattatctgaaaacaccgaaaaagtgaccaatccgggaaataagaccttcttccgtatctatgataaggaaagtggcaagatcaaagccgatctgatctgtcttcacgatgaaacctttgacaccgatcaggatatgaaactctttgatccaaacgagccttggaaaaagacgaccctgcccggtgggtcttataccatgaaagaaatgctcgttcctgtgatctgccagggcaagcgtgtctatgataccccgcctgttatggagatccagaagatctgcaatcaggaaaaagagaccctatgggaagaaaacaagcgttttaccaacccgtccaagatccatgtggatctgtcacagaaattatatgatatgaagcagtcccttctctctgagatgagccgctaaaaggagcaaaaaagcagtagtgaaaaatccttcac

SEQ ID NO: 12652 - DNA, 1054 bp, Unknown
  gut microbiota DNA sequence
taattaaatcccataaaacgctgtgagatcttgtatgcttttacagataagtaacgaccaaatctgcccggcagattcatggcatgccccagtgcaccccagcgcagatgatgataagtgcgcggatccttatccttgatgtatttccaaagatctttgacctttttcaaattgaccggatcattggatacatagccgatacaggtagaaacaaccgtgattgtctccagataggaaagcatatactcacgcagatgttcttcctcgatctgccacaggtcataagcatccaccatacgcttgttgacatacaactgctggtcgatacgtttgatcatgttcttttcgttgactgactgtccgtcacgtcctatgtaataacgataaaaatctacattcagataatacagtgtctttacaaacggcaatggctcatacacaaagaggttatcaacataaaaggtatgttttggcagttccaagtgacaatcacgaagcaactgcgtgcgataggtcaccgaatgcatcaaaatagaaaatcccttgatgttatgcttcatatcatgccagcccatgatcctctcctgcgggaaaagcagggtgtaaaacatggtgcgctgatgatgataatcgccctcgatcttttcatagacataattggtcaaaagcatatccacaagcgtatcgtctgcaacgaacttcttcaaagtctccaagaccctcacgtaggcatccacatccacccagtcatcactgtcaacgaccttaaaataaataccgctggcattggcaagtccggtattgactgcgcagccgtgtccaccgttttcctgatgaattgctttgatgatggtcggatatttctcggcataagcatccgcaatctccgccgtgcgatcactggatccgtcatctacaataataatctcaacatcttctccacccggaagcaatgattctatacattttgacatatagccttccgaattataacacggaatggcaaaggaaactatcttcatgtttcttcctcctaacaaccgtctcttattat

SEQ ID NO: 12653 - DNA, 14275 bp, Unknown
  gut microbiota DNA sequence
ataaagtatttcttttagtccatccggtgcaaagcaataaattccgcatatttatcaaaggctgacgggatcgcatactcctttcgggtcttatcgatatcaaccagcaagtagtcctgtggccccttggaaagatcctcatcctgctggaaactgtcgacatctgccacctgtatcaagaagccctgcataagccattcaatatgagaaaaaatatgttttgcctccggcagtttcttgatctgcaagggagccagattttgtccgcgcacaaaggcaagcgcttcttcctccgtcaaatatccctcgatattaggcagttcgtacagtcctgccaaaagtcccttggaagggcgtttccgcagaacgatcttttgtccatcctgtatcagaaggacggttttctcctcgatccgtctgggttttgccttggtcttgaccggcagacggtcgtaagtatcgtttttatatgccagacaaaaaggctgccagggacaaagatcacattttggctgtccattgggtatgcagaccaaggctccgatctccatcaatgcctgattaaaggctcctgcctccttgggcataatctgggaaagctgcgccgtcatgcgcttttttgttgcagtttttaaaatgtcgctgtcatcctgactgacgcgcgataagatacggagtacgttgccatccaccgccggcacccgctcatcaaaggcgatggaagcgattgcccccgctgtatagggtccgatgccggaaagcgccacgattccatcataggtctgcggcatctgaccgccatattctgcacaaatggtctgcgccgccttttgcatattgcggacgcgattgtaatagcccaagccttcccacagtttcaaaagtgggtcctcctgacactttgccagtgcctcgatggtcggcagggctgtcataaagcgctcgtaataggggatcacggcttccacacgggtctgctgtaacatgatctccgaaacccagatatgatagggatctttatcttttcgccacggaaggtcgcgcttatttgcctcataccaggtcagggtcggctctaccaaaaccgacaaatctgtattttctatcatcttctatcctattataacaggactggtctgcctgttatactttctgtcataaattgcatattctgcgtcttgatctgatttcttgtacctagtatagcatatccccgcctaccttggtcggacttccataatttttcaaacaatcttaagaaattttaagagttggcggaataatagacacgtcaaacaaaatgtgtaatactatacttatagtttttagatagcacacggaggacaaacatatgaatacagagacccgcagacatttttcccgcatcggcatagcctactttatcggtgcacttctttttgccggtgtccgcaccttgacaccgctcgcccttacacatctggcgcccacgctcgccgcagaccagaccctgagttttctgatctctatgctgacaacctatatcatcgccgtgccgctcatgatgcttgtcatcaagcgcgttccaaaagaaggcagcatccagccttgtaccatgaccggcaaacagtggatcgtcacctttctcatctgctatgccggcatgtacctggcaaacatcgccggaaatatcatcaccaatatagtcggcaatctcaagggttccaccgtcacgaatgagatcgtggagacagcccttgcaaatgcagcctgggtcaatatccttgttatggtgctgcttgcgcctgtcttagaggagttgcttttccgcaagatgcttattgaccgcaccatcaaatacggcgagggcatttccgttttgatctccgccctcttcttcggacttttccacggcaatctcaaccagtttgcctatgcctttgtgatcggcggcgtttttgcctttgtctatgtcaagactggcaatgtcaaatacaccatctatatgcatatgctggtcaacttcctcggttctgccgtcagcatgggacttctaaaactgtctggtatggatcagttggcgcttgccgccacagatcccgaaaagatggctgatgtctcttacctgaccgatatctttatgtcgcatctgagcggtatgttactgctctgcctctatgcacttgtgctgatcattctggtgatcgtaggcatcgtattattctttaaaaatatcaaaaagatccacctgctgacctcgccgaacagcgttgctcccggcgcacgcttccggacctattttctcaatggcggcatgatcctttttatcgtatggtggctggtccagatcatcttgcaattactgatgtaaaagatatgtcagagatatgtcaaaaagaccatggtactttacaaagcaccatggtcttttttcatgtcattttatgtatcgtttgtcaatttgctttttagaagtctgtcagatctgctgcgcgtctttccaaaaatgcagtcatgccttctgtcttatcatgtgtagaacatgccacaccaaagaggtttgcctccatctctacagcattcttgatgtccatgtcatagccgttgttgatcgcagccttggcaacagatactgcataacttcccttgctgcagatcttcttagccattgcttttgcggtatccatgagttcttccttggcaacaaccttatttaccagaccgatgcggtatgcttcctgtgcatcaacagagtcacaggtaaagatcatttcctttgcacgtcccataccaaccagacgagccagacgctgggttccgccaaatccaggaatgataccaaggcctgtctccggctgaccgaaactagcgttttcagatgcgatacggatatcacatgccatggaaatctcgcatccaccgccaagagcaaaaccattgacagcagcgatcgtaacctgacgcatattcatcaacttgaagaatggaacagatgctctcataccaaaggctcttgcttctgctgcgctaaagttgaccatctctgcgatatcagcccctgctacaaaggacttgaactcattgcccttcttatcaggaccaccggtcaggatcagaaccttgacatcatctctagcctcgatctctgtcagtgctacatttaattcgtccaatgtctcactatttaaggcattgagggctgccggacggctgatggtcaggacagcgatttcatcttctacgtctaattttaaatttttgaattctcccatgtttctttcctcctcgattgacgacagatcaaattatctgtcaattatcacttatcctcactatactactttgataattttttgtcaatcttatttagaggttatttgggatatttctgatatgcccatgtcagcaccgataaagatggtttcgtgataccaagtttttcaaagaaagcgtgcatgccgccattgagcaagaccaaaggaattggcaagagggctatgaattgtgttgctaatactccatgactagttcatctgccaaatacgcatcactcatgcaaagcataaaagaagcgcgttctgctgacgaacgcgctcgttttgatgctcttttactcttacaaagtcacaaagattgactcttaatccccatcaattttgcattttgattgagtgatattcttggttccgtagcattgatcgttgcgatagcaacgccagcatactttagccctcgaaaactgctttccagtaaatcttatcttattccttactcatatcccttgacttctgcacgcatgcccgctgtgcctcgatcacagaggaacgcagtcccgttttttccaactctgctacggctgcaatcgtcgtgccacccggtgaacaaacagcatctttcaaaacgcccggatgctctcctgtttctaataccatcttggctgccccaaggacagactgggctgcaaatttataagcctgctttcttggcatgccgtcggcaactgcagcatccgccattgcctcgataaacatatagacataggcaggggaagatccgctcacgccaacaacggcatccatcatagtctccggcacgatctctgccttgccaaaactttcaaagattgccatgacttcctgcaattcttccgggctgatcttttcattcggtgtcacggcactcattgcctcgcccaccagtgccggtgtgtttggcatagaacgcaccagtttgatctgccgtccaaacagatctgtaatggacgccagtgtctgtccggctgcgatcgatacgaccacctgaccttctttacagacatcccggatctgtgggatcaccgtggcaaatacccccggctttacggcaaggaataaaatatctgcctttcttgccacctcagtattgtccgtcgttgcaacaatgccaagttccttttctattttttcaaccgtttccttggtctttgcagatgccaggatctgcgacggcgcataaagccctgccgcgatcatgccgcccatgatggctctgcccatatttccactaccgatcactccgactgtctttgccatgatctttcctcctagaatcccatcttaactactctattctacaagcactcacatctgataacaatgccgttttagttctccagtagtttctcaatcgttgccacttttacacatacacagaagatttcagcagcctgttttaagtcttccatcgtaggataagatggtgcaattctgatgacagaatcttttggatcctttccatatgggaatggtgcacctgccggtgtcagcacaacaccagcctcttttgccagcgcaacgacacgcttggcgcagccctcatttgtctcatatgtgatgaaataaccgcccatcggcttgatccatgatcctgctcccagaccggaaagttggctttccaaagtttccagtaccagttcaaatctaggtcttaaaaattctgcatgtttttccatatgttttgcaatgccatcggcatctttaaagaaacggacatgacgcaactggttgaccttgtcaaaaccgatcgtctgaatagtcagtgacttcttgatatccgcaaggtttgcctcagatgctgcaatggctgcaatgccacctccggcaaaggagatcttggaggtagagcagaactcaaataccatatccgggttgtctgccttctcacattcatccaaaatatttaagatctttcccttttctgcgccatacagatgatgtacggcataagcgttatcccaaaagatacggaaatcttttgctgccggctttaatgctgccatacgtctcaccgtctcatcagagtagatcacgccctgtggattggagtacttcggtacacaccagatacccttgatggcatcatcctctgctaccaatttttccaccatatccatatccggtccttcttctgtcattggcacattgatcatttccacgccgaaatgctcggtcactgcaaaatgacgatcatagccaggcaccggacataagaattttactttatctaatttacaccaaggggtctggcccaaataacccaaaagcattccacgagccaccatgtcatacatggtatttaaactggaattgccacaaacaatgacctgttccggtctgacttccataatacctgccataagacgctttgcctcagggatgccgtccagtccgccgtaattacgtgtatccagaccgttttctgcctgcatcaaagactctgcatccactgcattgagcagccccatgcccagatccaactgcccgctggatggtttaccacgggacatatcgagtttcagacccttgtcctgatactctttgtagatctgacgtacctttgtcagttcttcctgcaactgttcctttgtcatgtctgcatatgtttgcatgctatttgttcctcctgttgcttgttcctttattaaataaactttgccgaccgctgtcatcgcccgcaaaggtcatttcctcttacttcgcttctctgcggatcttttccagatgatcccggatctgtttttcgtagcccatatctgtcggctcataaaaacgtgcgcctgctaaagcatccggcagatattgctgtgcgacataatggtttttaaaatcatgtgcgtattgataaccaatgccatgtcccagtttaccggcggatttgtaatgtgaatcctgcaaatgtaccgggatcggtggtgtctgtccgcttgccaccatatgcatggctgcatcaatggacagataagaggcattactcttgggtgcacatgccacatagttggtagcctcagccaggatgatctggctctccggcatgccgatgcgttccactgcctgtgctgctgccacggcaacctgcaaagcctgcgggtctgcatttcccacatcctctgctgcacagatcatgatgcgtcgtgcgatgaatttgacatcctctccggcatagagcatccgcgccagataatagatagctgcgtccgggtcagatccccgcatactcttgataaaagccgagattgtgtcgtagtggttgtccccactcttatcatacttcacaacacgcctttggatacattcactcgccacggataaagtaatgtggatcttcccatccgcagaaggctctgtcgtaagaacgccaagttcaatggctgtcagtgcacttctggcatctccatttgccatatcgctcagaaaatcaagcgcatcatcatcaatgaccgctccataagagccaagtccttttgcactgtcggtcagtgcgcgccggatcaaagtcttgatgtcctcctgggataatggctttagttcaaagatgatggatctggataaaagcgcgccgttgacctcaaaatatgggttttccgtcgttgctccgatcagaatgaccgtcccatcttccacaaaaggcaagaggtaatcctgctgtcccttgttaaaacggtggatctcatcaatgaaaagaatggtctttttgccatacatgccccgcatgttcttggcattttccacgacctgctccatgtctttcttgcctgccgccgtcgcattaatggatgtaaattccgcgctggtcgtattggcaatgaccttggcaagggtcgtctttccggttcccggcggtccatagaaaataatggatgatatcttgtccgccatgatggcacgatacaagagtttgtcctttcctatgatatgctgctgcccgacgacttcatccagactcgtcggccgcatacgggatgccaaaggagattccttttttccattttcctgtcgcatgtaatcaaataaatccatgtttcctccgaaattgcattttaaaatataaaatcttgcatatttacttgcatatttcctatttcttcttgcattttcgttttaaaatgcaggatttcgtatctgattatgcatcacacctaataagatactaaataatgggaaaaagtacaagtcttttgtcatatatattttctatcacttgtatgtcataaacctatcacggttccacaaggcggtcgactgtcacaaaggtatagcccatttcctgcaaagccggaatgagttcccggactgcctccacagtggacggataagcgtcgtgcattaaaataatatcattttctcccacatttttcactaccttacaataaacctgctccgcgttctgtaggctccaatccagagtatccacatcccagaagatccagaacatgcctgtctgcttttccaaggtctcatttttgcaaccaaacggcgggcggaaaaattgcggacgttttccggtcagaccttctaaaatatcattcgtctttgttatctcctctgttgtctcatccgcggagatctggcagacattggcgtgcgtataagtgtgatttccgatcagatgcccggcatcgcttaccttttttacaacatccgggtagagttctgcttcttttcccatcataaaaaaactcgcctttatacctgcctgatccaagacatcaaggatctcctctgtatagaccggatggggaccgtcatcaaaagtcagggctacgagtttttccgccgggtctgcccagtctgcattgcttatgactgtcgcagtctttcgcaccgggtccgatccttcatagaccgcatactgccagaaaagtccgccacacgtcacaagcagtccaaaaagtcccgtcaggatatacttctttttcataaaagaagccagccctgactttttgccaagactggctctgctcttattcttcatactatagtatatgaaaaatgtgctcttttatgcctgatgctttacgacagcggtcaattctgtacccgctacatcaatataaatggtatcgcccatatccacttcatctgccaaaatgcatttggctgccatggtctctacatacttttgcagataccgcttgagtggtcttgcaccgtagaccggatcatagccatgatcgacaatataggtctctgcctccggtgacaattccacacggatctcacggtctgccagacgtccgttcaactcctccatgagaagcgtcacgatatgaccgatattatccttggtaagcggcttgaacaaaatggtctcatccagacggttcaaaaattccggtctgaaatgctgacgcagttcgttcatcacggcatcttcggcttccggtcggatattgccattttcatcaatgccctccaacagataggaagaccccaaattactggtcatgatgataatggtatttttaaagtcaaccgtcctgccctgtgaatccgtgatacgtccatcgtctaagacctgcaagaggacattaaagacatccgggtgcgccttttccacctcgtcaaagaggacaacggaataaggttttctgcggactgcctctgtcagttgtccgccctcatcatagccgacatatccaggaggcgctccgatcagacgggaaacggaatacttctccatgtactcgctcatatccagacgtaccatgttgttctcatcgtcaaacaggcttgccgccaatgtctttgccagttccgtcttacctacaccggtaggtcctaagaaaaggaaggatccgatcggtttgtccgggtctttgatacccgctttggaacggatgatggcttcactgaccttggtcacgccctcatcctgaccgatgacccgcttgtggagttcctctgctaagtgcagggtcttattgcgctcgctctcatttaattttgccaccggaataccggtccagcgggagatgatacgggcgatctcctcctcggtcacgctctcgtggacaagactcatatccttattcttgatcagttcttcttcctgctccaactgcttttccaactgtggcagtttgccgtattggagttctgccgccttttccagatcataattctgctgggcgatcttaatctcattgcgcaggctctccagttcctctcgtaactgggaaaccttttctactgcgtgcttttcgttatcccactgggctttctgtccggagaatttctcccgcagttcggaaagttctttttgcagattttccagacgctcctgactcaaatgatcgtcctcttttttcagcgcagtctcctcgatctgaagctgcatgatacgacggttgagttcgtccaactctgtcggcatggaatccaattccgtcttgatcagggcacacgcctcatcgaccagatcgatcgccttatccggcaggaaacggtctgagatataacggttggataaagttgccgcagaaaccaacgcaccatctgtgatcttaacgccatggaatacttcataacgttctttcagaccacgcaggatggaaatggtgtcttcgaccgatggttcatccaccataaccggctgaaaacgtcgctccagcgcaggatctttttcaatgtattccctgtattcatccagagtcgttgcaccgatacaatgcaattctccacgcgcaagcattggttttaacatattgcccgcatccatggcaccgtctgtctttccggcaccaacgatggtatgcagttcatcgataaagaggatgatctcgccatcggaattcttaatctcatccaaaacggctttcagacgttcctcaaactcaccacgatattttgcaccggcgaccagtgcacccatatccagggcaaacaacttcttgtccttcagtccttccggtacatccccgcggacaattcgctgtgccagaccctctacggctgccgttttgccgacacccggctcaccgatcagtaccgggttattcttggtcttacgggataggatacggatcacattgcggatctctgcgtctcgtccgatgaccggatcaagtttctggtctctggcacgctcgaccatatcataaccgtatttctccaaggtatcataggttgcttccggattgtccgtcatcaccctctggttgccccgcacggtagaaagtgcctgtaaaaagcggtctctcgtaatgccatactccttaaagatttccttgatggcacgattcgggtaacggatcatggcaaggaaaaggtgctcgacggagacatactcgtcccccatcgcctttgcctcatcctctgcatggatgagtacctgatttaagtccttaccgacatagacctgccccccggagacttttgtccttgcctccagatgccggatggcattatccttaaaatgttctaactgtatctccatcttttcgatcatctgcgggatcagtccattttcctgctgcaaaagagcgaccaaaagatgttcctgttcgatctcctgatttccatattcatatgccaatttctcacagtcctgcactgcttccattgacttttgtgtaaatttctggatgttcatatgcttcacctcctaaatcttatcttatcacgcagacgctctttctgcacctgcatattctcttaatttttgttttgccatcgcattcagatgtctcggcacatcgacctccacggtcacgtactgatcgccgtggaattgcgcattccgcatggagacgatacccttatttttcagacggatcttgctgccggactgggtgccctctttgatctgacactcgacatcgccgtacaaggtgtggactctggcagatccgcccagggctgccgttacaaatggcacacggatggtcgaatagacatccatgccttccctacggaaagccttactgtcaagcacatggactgccagcatcagatcaccattcttgccaccatttatgcccggctgaccttttcctgcaagtcgtacagtcttcccctcatcgattcctgccggaatatgcaccgacaaagtctgcggctgtctgccggatggatcagagatcgtgatctgcttgtcacagccaaaggctgcatcttcaaaggatatggtgatctctgcatgcagatcttttcctttcattgcacggttgccaaagccctgtgatctgccgccaaaaccggagccaccaccaccaaaagcacctccaaagatggaatcaaagatatctcccatatcatccatattgccgccttcaaaatgaaactccatgccatcaccattgcgatagaacttggttcccccgaagccggagccgccaaaaccacttgcctggttcggatcaaagccttctgtaaaggcagcgtgtccaaactggtcgtacaactttcttttttctttatcactcaagacatcataggcttctgtgatctctttaaacttttcttccgcctttgcatcccccgcgttggtatcgggatggtatttctttgccaatcgccgaaacgctttctttatcgtactctcatccgctttcttgtcgacacccaagacttcataataatctctcttggcagacatcccaactcacctactttcttatttaaaagaaaactggctacggattgtagccagcctcttttgttcctatcatcgatcactcaatggcgatcgtctttttctgctctaccttcggctgggcttccttctttggaatatccaacttcaaagtaccgttttcaaatttcgccttgatgtcctcatgggtgatatcttcacctacataaaaacttctctggcaggaaccactgtaacgctccttgcgaatgtacttgccatcttcggatttctcctcgtcattcgtgctcgttgtagcactgatgatcagatagccatccttcaattccgcgtttacattttccttactatatcccggaagatcaatcaccacttcgtaacctgtctctgtttctttgacatccgtctgcatcaggtttgccttagcagtcggtgtggtctttctctcctgtgggaatacaaagaaatcatccataaaatcatttccaaaaatactaggcattaacataagtcatcgctccttccatatcatcaaaactatttgttttcttatctcattgttttaatgtcttttcttttgacaattatgttatagcacctttattagcactcgtcaatagtgagtgctaataatttttgaaaattcacaaaatcgtcacaaaaatccccagacggatcttttccatctggggattgctgtttactctttctttattttatgcgactaccatatgttcttcgatgaaaccctccacctgattgcgggggatctccagcaccgcggaaatctccgagtacaactgcatctccgccatcttcatgtaacgctcatctaaggcagtcatcttcttgcccttttccatgcgtccgcgtccacgctcccgtacggtctttaatagacgaacccattccttgccgtccagactacggatgcactccttgtattcgttctcacgctgcttgtcattggtcacgtttaacatatcgatctgcggcatcgccttgatcagtgacatgacatcatccttggtcataacccggcgaatggaaagtttgggattgtccaccggtgcatacatgatgctggtgccatctgtcgtcggcgacaaataataatactgccggtcttttggcacattcggcatatccagggtgtcgatctttacaatctcgcatacaccatgatgaccatacactactcgttcgcccacttcaaacatcttgacacatcctttcaccaatttcgacaactccatcgagtccacgacaatttacacacattttacctatatacatatatattttatcaacttttggcaaaaaatgtaagggcgaattttcacaaagtatatctgaaacgcaaatggatatttttcacaaacaaaaggcacctatcaaaaggtgccttaaaagatccatatatctagatctgtgtcatcacaaagatatcgtaaatagccttaattgcattgtcaaaatcattgttgctgacaccgatgatgatgttcaactcggaagatccctgatcgatcatcttaacattgatgttggcatgtgccagtgcagagaagatccttcctgctgtaccacgggtagacttcatgccacggccaacgacagcgatcagtgccagatccgcttccagatcaatgatgtccggatttacgagacgacggatggaagaaataacctgctgctcttttccttcgaactcttcctgatgtacaaaaactgtcatggtatcaataccagatggcatatgttcaatggaaataccattctcttcaaatgcctccagtgctttacgacagaagcccacttctgagttcatcatatctttatcaatattgactgctacaaagcctctcttgccggcaataccggtaatcgtataatctgccttttgacaggtgctttccacaatcatggttcccggttcttccggcgcattggtattcttgatattgatcgggatgcccgctttgcgtaccgggaagattgcatcttcatgcagcacggaggcgcccatataagaaagttctcgtaattctctataagtgatcaccttgatcggctgtgcattctcaacgattctaggatctgcgaccagacaaccggaaacatctgtccagttctcatagacgctggcatgtactgccttggaaacgatcgatcctgtaatatcagatccacctctggagaatgtttttacattgccattgctatcacttccgtaaaaacctggaatcacagccttttctacatgcgagagacgttctgccatcgccttatctgttttatagtcatcaaagtttccattctcgtcaaagaagatcacttctgctgcatcgataaattcatagcctaagtagtttgccatgatgat

SEQ ID NO: 12654 - DNA, 3875 bp, Unknown
  gut microbiota DNA sequence
attcaccacggctggctgcataatcttctccggctttatctgcaaagtttttttcgattgttctgaattcgtcttccaaagaaagtgtcagattcagtccattgataatggaattgtaacgttccttaatttttttcagtgcacccttaaagtcttcctcggcttctgctaatgcataacaggaataaagcatatctgttactttcgtatcctttgcattacgttttcccggcgcactcggcacaacataacgacgtgactcatccgcgcggataatatctcctaccttggcaaactgtgctgcacttgccagggaacttccaccaaattttactactttaaccattgtcttactccttaacactcgtgtatatataaaaatcgtccgatcaaatcagatgctttctatatcttatactatatcttatactgtttcttcttgcgttgctacaatatatccgctctcgattatagcatatcctgtcaagtgcatgcaatggaaaaacttttcggttattccttctggttattcctgtacgatacgattgtatgtccgggcagtcatcagatacaccagcacatagatgataccaaataccacaaaacagccaaccatacaccctgccaaaagcgctgtattgcgcatattaaagagtgacaacatacgacggatcattggaaaagcaaaacaggtatggatacaggcagctacaagcggcataaaaaataccatcaacacctgggaacgaatggcagaggacacttcctcatgcgtcatgccgacctgctgcataatatgaaatctctttcgatcatcatatccttctgacatctgtttataataaatgatcaaaactgttgcaatcataaagagtacaccaagaaaagcacccgtaaagaacaaaccaccataaagcgcattcaacgatttctcattcacgtttcgattttccacagaaaagctgctcatgtttgtggatggatacttttgtattttcttatagagttccttttgctgatcagcatctccatcgatatcaataccataatatgatcgcaactcgttaaaacagtcatcatactgatatggtatgtgctctgctatttgctctaccgctgcttcatctgggaaaacaatgtaatatccacttgacatataagatgccagtattccattgcacggtgcctttttcacttcttttgcacgataatcctgtcccataatctcaatcatgtcttttccataacgttcatgagccgcatataccaaaacctctcccggttctaacgtctcctttgtatgcatgctcttattgtaatcctccagattcatgcaaaaaagaactcccgcagacgttcccatggcagacgcatctgcttcaaatgcatctccatgtcttcgggtataaataatacaaccgcgtacataaatctcatctttgacatcacagccggtttccttcgccatctgatgaatggcttctatcatcttctgatcgtcactgcgacttgtaccggaaacataacacatgttctgcatcggataacgcgtatataaaatatcgtgcatgctaaacatcatagaagatgtcgtggaaatcatcacgagcaccatggtagaaagaacacaaatgtgcgctaatcctatcgcattttgtttcatacgatacatcataccggaaacactcacaaaatgatttgtcttataatagaaacttttcttctttttcagcaattttagtaacgcaatacttcccgctgtaaacagcagatatgtgccaaaaatgacgcagagaacggctacaaaaaacatagcaagcgcagacaccggatcttctattttcagtgaaatagtatagccggtcgccaaaagtatgaagccaagaatggcaagcagccattttgcacgtggttccttttcgcccatatccgttccatgtaaaagttcgattggcgatgtcgcatgaatttgcgcgatatcataaaaataatttagtgccattatgacaacaaacaataccaccgtacgtccaatcgcaagcggcgatacaaaaaagcccagcggaacagagaaacctagcatgcgtatcagatctgcatacaaaagtttatccaaaagcatgccaaaaagaattcctgcgaaaagtcctatcacaagtacacttaagctctcccagaacaaggtgatcgccagatgttttttctctaagccaagcatatggtaaacaccaaactcttttcttctctgcttgatcagaaagctgttcgtatataacatgaaaatcactagaaaaaagcggacaacccaacaggcaaatatcaaaatagaattcattgtatcaaagccgagcatgttctcaaatcccggattcagtgccaatgattgtataatataaaacattgccacagcagcaatcacgctgagaatatagggtgcatatatttttccattctttttcatattcgtttttgccagctggcggtaaaatcctttactcattttcatcaccgcctgtcgtcaagagtgtcagtgtattggcaatcttttgatacatttcctcattcgtactgttgccacgatacaactgatgaaacacttcgccatccttaataaacaagacacgacttgcatgcgatgccgcttttgtcgaatgggttaccatcaagatcgtctgccctgccgcatgcagctctgagaatacctgtaataattcatctgttgccttcgaatccaaagctcctgttggctcatctgcgagaagcagttccggatccatcatgagtgcacgtgtcactgccgcacgctgtttctgtccaccagacacttcatatggaaatttatccaaaacatcctctatgcctagtctttttgccagaggctctgcttttgccttcatctcttctggttttttccctgcgagcaccattggtaaataaatgttatctctcaaagaaaaggtatccaacaaattaaaatcctgaaatacaaatcccaaatggtcacgacggaatttggaaatttctttttctggtaaatcggtaacatcacatccatttaagagaacgctgccacttgttggtcgatcgagcgctgccaaaatattcaaaagtgttgtcttaccacttccggattctcccataattgccacatattctccctgctccacagaaaaagaaacatcccataatgcttgcacctgatttccgcccagacgcgttttatatatcttttccagacaatttacttctaacatagccatattttcctcctgtcctacacgcataaacgttcatccactgcgtgtatgctgcctttctggttacaagcatactttaacaaaagccctataagtcaaccatcgaatcgtgtgacatataaggcttcttatgtgacatttttgtaagatagcaaaaattattctattacccgctcttctctgcgaagatccagcgtaacggttgtcccctcgcccacagttgatgtcaatgaaataccatgatgcagtcggtccattgtccgtttacataaatataatcccagaccggtggatttgtggtctgctctgccattataccccgtatatcctttttcaaaaacgcgtggcacatcttcaggtgcaatcccaattcctgtgtcacgaatagtaagaagtcccggcgtttccatggcaatggttacacttccatgatttgtatatttgagtgcattggaaagcacctgctctaacacaaaacaaaaccatttttcatcggtaagcacatgtgtcgagacagtatcataacagattgcaatctttttttgcacaaaaacagacgcatatttacggatggtctttcgtatcatctcatccaaatcatacgcatcaaaaacaaag

SEQ ID NO: 12655 - DNA, 296 bp, Unknown
  gut microbiota DNA sequence
atcaacattttcaaatgacggatgcggatgtggaaacagcatctggatcatcctcttacttctttgctgctgtaacgatggcggcggctgcggaagtttcttctaaaaaccttcatcgaaaaaggcgtccttatttagggcgcctttttattatgctatcttcctctctttttcctggcattccaacgatcgtcttttcctttttcgttctttttacagtgcatacattcttctccctgcattttctttttccgcaggcattcctcatccacttcaaaacattcatttccacgcag

SEQ ID NO: 12656 - DNA, 401 bp, Unknown
  gut microbiota DNA sequence
tatacgtttagagagtatttttcgagtcgatacatcgactaatacagtgtttgaagtaatagaaaggtttagatattgagagaaaaaaagatcaatccattcgtaaaggcatctgtggtttattttatagcgactgttattggtcaaggcatgacatttctggggattattgtttttactcgcttgatgagtcaggctgattacgggaattacagtacctattatgcatatgtttcaatttttacggtgctgataggagcaaaccttttctatgccttaaataatgcgtatatagataaaaagaatgaaattaaggaatttcgaaaatcggtattgattttatctaccattattatggttattatgttgctgatcgccttgatagttggctgtgcagtaac

SEQ ID NO: 12657 - DNA, 5446 bp, Unknown
  gut microbiota DNA sequence
tctcaagttttacggtcatcatgggggcgttgcattcttatggttttttcctgattaattatcggatgtattctgccaatatggaaaacgactataagactaaaaaatggcttttggcattaccgtatgcattgcaatttttagtagccttaatttttgttttagtgtttcctgatatgtcatatgaagcaaggattattggaagtgtgttgggcgttggagtaatagcagccatagcatatatcgaaatcatgaagtgtgaaggcaaacttatagtcctagattattggaagtatgctttaggaattgcattacccacaattatcatgtcaatatcatatatgttgatgcaacaatgtgataaggtaatgattaccaatctttgtggtgcagaggaaacggcggtttattcggttatttactatttggggtacgctttgatggctgttgaccaagcggtagcaccagtgcgtcaggcatggatatttagaaaattagacaagaaagatacatctgagacgtatattttgcaaaaatggtatttggtcataattgctattctggcaagtgtcttaattttggcaggaccagaaatagtaagaatcattgccccgagagactattggaaatatgaatatattgttccgtttgtattaagcgcctgtatgatggtgctgtatcgattttacacagaaatattgttattttataaaaaaaatctatggttgtcagcaagtgtgttgggtggggcgatcattaatattatattaaatgtactgttaatcccgcgatttggtgcagtggcggcatgttatacaaccgttgttgcatatggagtgatttttgctataacgaaaatgattgcaaatatgcaggcaaaaagattgtatgcgaacagattttttgctagttttatagcgtacttgattgttattgcaacgatttattcattgttggtaaatcatatactgggacgttatgttgttttaatcgtattatttgttatgttcgtaatatatatgttgcgctacaaaagagagtggaaaagttttttgggcaatagagaggcataaaatgagtaagggcttggcggtaatatatgacccgcataatttatatcaatttgtgtggtattattgtaatcatggaaaacagaaaaagtgggatgcattaagtttacccaatggaggaagaggggaatatatgcattcattctgtgaagacactggaatctttgaacatgtttatcggagcgataatgatttttcggtcatggaagcaaagaaaaaatgtgtaatcgttgctcagatgtttgtgaattgtatattgggaaaacaaaaggatttttgtaaaaaaatgctaaaccaatacgtggatttgtcggaatatgatgaaattgttgtcattgcagatgtgggcatcatatctggggcgtgtgttgtactgggcgaggagaaggaagtcgttatattggaagatggtataaatgactatagcatccgtcctagatggatacctaaaacaaaattattttcgacatatatgtggcagggcttcattttggctaggatgggatattgtagtccgggatggtttgcttttgatgcagataggttctgcattaaatattgcagccagcctgataaaatgaaatatagaaaatataaagaaatgcggcaattatatgcagaacagggaacagattggaaactgtttcaagaaatcttaagaaggatgtatccggcgcttgaaaattatgatttagatgcggctgatgctgtgttatttacccgaccattagaagattatgtgccggagacggataaatatcaaaaaaaattagaggattatattaacaagaaatatagcaatattatcttaaagaagcatccacgtgagtgcggcaaatatgaattctcagaaaagatcaatgtgcaggaaattgataatgcaatcccagcggaggcattattatcgtatttgaagggaaaagatattttaatagtaacgccaagtgcgattatcatgtatatgaaagcgtataatttgaaatgcaagattattacgtttgcagggctatatgaggacagtttgagtagcaattcaaattataaaccacttactgataacgaagtagtggaatttggagagacgtttgcacaaaatttctatgaggtcattaatttatagaggtaaggaggataaatatgaaagtattaggagtaatcccggctcgatatgcatcaggaagaatgccggggaaaccattggctgatatttgcggaaaaccaatgatttggtgggtatatcaggctgccatcaagagtaaggatctttacgacgttgttgttgctacagatgacaagaggatatataaagaatgcgaaaagtggcatatcaatgtagttatgacgagaaatgatcatgatacaccgacatcacgtttgtatgaagtatcaacgatgattgatgcggatctatatttgatgttgatgggggatgagccattgatcaattatgaaagtttctcattaattattcctgagaagttaaaggagtattatgtggcggtattgactaacataattgataaaccatctgaagtcattgattttagtaaccaaaaatgtgttacaaatgctaagcgagatgttttaatgatctctcgtagtccaatcccatatccaaagggaacattagattttgattatgaaaaagtgactggtatacaacttttttcaaagaaagcattacaattttatgacgaaactgccaaatcggttttggaaattgcagaagaaaatgatctgatgcggtttgtagaaaatggaatcacagtaaaggcaatacaatcaacatataaaactgtatcagtagacaccccgaaagatttggaattagttagaacaataattagtgagagagaagcatatgatgcataatgatttaaagttattagattgtacgctccgggatggagggtatattaatgattggcactggggatatcatcaggcaagggcaatcattcgttttttgacaaaggcgaagatggacttcgtggaggttggcttcttacgaaatgtggacaattatgatgaagatgttacagtgtgcaatactattgaagaattaaataggctgttgcctaaaaatccgggtaatactgtatatacagccatggcgatgcaaagtaattatgacatcaataaactgagtgaatattctggaacgggaattgaaatgattcgtgtaacggctcatgattatgatatcgtagaaggcatgggatttgcacaaacggtcaaagataaggggtataaactgtcaatcaatccaattaatattatgggatatacagatgaaaagatattatggattattgaacaggttaataaaatccagccttatcagttttcaatcgttgatacgtttggaagcatgaaaagaagagacttagatagaatagtaagtttggtcgataataatctggacaaaaatattcgtgtagcgcttcatttacatgaaaatatggcacttagttgtagtttggcgcaaaaatttgttgataagcatttggcaagaccggttgccattgatggaagtttgatggggatgggaagaataccgggaaatctgccgatagaactgattgcagattattgtaatgagtatatggataaggtatatgatattgactttttactagatgccatacaagagtatattgcaccgataaaaggtaagacagagtggggctatacaccggcctattttttgtcagcgagatttaatgttcatcgtaattatgcagaatactacttacaaaagggagacttgacgcatagagatatggatcacattcttgctggctatgatagaagtaaggcaaccgcatttgatgaagagtatgctgagttaaaatataatgaatataaaaatcaagtaattgatgataaagaggatttccaatatttacagcatattttgagggaaaaaaagattttggtattggcaccgggaagttctattcgttctgaaaagaattatataagcgattatattgcaaaggaacaagtggtaacgatagcagtcaactttgtgccggaagattttgaagcggattatattttctttagtaattcaaaacgtttttcacaggcagcagatactgcggcaaaccttatcataacatctaatattgaaacggataaaaaggcgattaaattaaattataatgtcctttcgagttcgtttgatcaaggatgtaatagtatggttatgttaatcaaattgttaaaggatataggagtatcagaaattgccgtagcgggagcagatggctatgtagaaggagaacgcaattactacaagacatctttgagaagtacagcagagagatcaggaaattataacgtggcagtacacaatgccattcaccgaattggaatgaaagttaattttataacgaggtcgctttatgagtaaaggaggaaaaatccaattattagtcatagatgttgatggaacgatgactgatgcggggatttattatgatcaaaacggaaatgaactgaaaaagttctgcaccaaggatgcagctggattttttgcagcaaaaaaatcgggaatagaaataatggttttgacagggagagagtgtgcggcaacccagcggcgaatggaggagttgaaggttgattatctgtatcagaatgttagaaacaaaaaggagtttctaacagaatttatagaaaaacatcatcttaacggagaaaatattggatatataggggatgatttaaatgatctggcgccaatgcaattgtgtggatttattgcttgtccatgtaatagttgccaggagattaaaaatatagcggattatgttagccctgttaaaggtggggaaggtgcagtacgagatattattgaacactttttaaatgaggctggtatatgggaaaaactgattacagagatatatgatgtgggacgataaaacttttatcaaagatatgcaggtgtattgacaaatcggtgcagtgcaatcaaaaggtcttaagtatatgggaaaatgtttaaatagaaagataatagcaagtggtttcaccataaataattctgtttgggagaaacaaggaagaaagaattgcccagaagaaaatagaaaaagtctcattgtgtcgttactatataatgtctgcttcctcagtattatcctcttgtgttttcagattcgatatgaaacaaatgatgatttgtcaatggcaaccattgctaatatgggagaggaacatttaatttatatcaatattgttataggttatttgttgaagtttttatggaacatatctgcggtaattccgtggtatccacttttagaagtcgtgagcattttttttgccaatgtttttatcgagtatgtattattacgaaacataaa

SEQ ID NO: 12658 - DNA, 878 bp, Unknown
  gut microbiota DNA sequence
gtcgtaagtccacttggtccgccaccgatgatggcgatgcgcttccctgtaggctctgcctttggcggtaccggaatggaatccagatctgcaaaatctacggcagaccgtttgagtccgcgaatattgacagaagaatccagcatgtttctacggcatctctgctcgcaaggatgctcacagatcaatgcacacgccaccggaaacggattatcttttcggatcagacgcacagcatcctcatatctgcccgctccggtaagagcgatatagcccggaatgtctacatgtgccgggcactggtcgatacatgggatcggctgttcaaaactaccgctgcatctgtgatgctttacatgcgaaatgtagtcctcctgcaagccgtccaagcccacaagcaccatacgtgccgcctcaaatccgattgcacagtctgctgacaactcgatattctttgctgtcttttcgatcagagccagtgtattctctgtcgcccgattgttcaggacatcctccaacagatcctccaattttcccaagccgtcccggcatggcacacactttccgcaactctgcgcatggcatacttttaacatggcaagctgcatctccaccagacaaactcccggtgggctggcgatgattcgctgcttaaattccttggcaagtgtcaaggtcgtagacgatgcacgatcatctgtcataaccgttaatctactcaatgtaaaatccccctttactttttcttcgccttttcagaactacccctttattctaaaaagacctttcatacttatgtaatttttattatacaggtggggaaaaacgatagcaagaattgataattttttcacgttgtttttgagaaaaagaatatg

SEQ ID NO: 12659 - DNA, 137 bp, Unknown
  gut microbiota DNA sequence
ggatgtccctgcgggactctgccataaggcatttcattatccacaaagggacaatcatacttcttagctatttccgcagcttttacttcaagcgcttcaaagtagctgcggttatgcttgttatagatctcatcgta

SEQ ID NO: 12660 - DNA, 224 bp, Unknown
  gut microbiota DNA sequence
ctgactaatgtatccatctgcctgattgccaaatttctaagcaatataagtctttctgattgagatttaccctgctcaattaaaatagcattataactttccatatttgccaacaccaacaactgatttaaatttgcatcatcacgcacattcccctttttacccagattattatttttccattgctttgcagtctgaccaaataaagcaacatttaaaagatc

SEQ ID NO: 12661 - DNA, 1221 bp, Unknown
  gut microbiota DNA sequence
tctgacggcgcgccaaaaaacagttctaataaggcaacaaccgaattcaactcctgctgaatccgcttattcttgtcaatatcgaataaatatgtatcatattcagtgtttttcagttggcgtctactcttaacagtatccaatataccgacataaacaaatctattctctttactgtacccaatattcgtcagtacacgattcaataaatattgggaactgccattccaaccacaatcaaaaataatgctgtcattctgcaacaggccaattttctcaaagtagttttttgcattatttcgctctttctcacaccttttcagaaataatgcctcgttcattaaatacagtttttttactttttccatatcatcaactgtattaatcttcgcatctaatcctgcgaatcccaaggattgaacttgctcctcggtcacaccctctaaagcaatataatgaacaacctctccaatcgtctgccccagtgtatacggcggcaatatgcgaagagtttcttcatttaattccgtaattcccgccagggtcaatgctcggcgcgatgtatacatatattggcatccgatccactcttgtttctcgctcagttgaaacaaattatatccatctctcgctaataaataacaaggtcgattcggattagcctttctcatttctttcagccatttaacaatgcctacatataatggaccacctacatacgctcctaaatcatgccaaaactctcccgtttgcacatatcggccaacccccagatcgaaaatgcccatattttctatttttgtttcatttgggatttcattacgtatgtacaaaaaagcattccatcccgcttctcgcgctaagcgaacatcagaattttcattgtcgccaatatgtaaaattgtattcggctttaccttttcttgttcagcaatataatgatatatatccccacggaattttgtatgattctccgttgcagaaacataatattgctcaatatcatgatagccacagccttcaactaagtcttttactgtcgacttatccaaatacatatcacttgtaacgatgatgcgctttcctaaagattttgcatattgatatatttcatagatttcatcattttttcttaaaacttgtttttctatcgcaatttcttcttgctttacttgctcccaatccactattgatccatgatttttggcaagatactcatag

SEQ ID NO: 12662 - DNA, 143 bp, Unknown
  gut microbiota DNA sequence
ggtgatgggaatcgaacccacgtattcagcttggaaggctgatgttctaccattgaactacacccgcagatgcccagttccggaatcgaaccagagacacgaggattttcagtcctctgctctaccaactgagctaactgggc

SEQ ID NO: 12663 - DNA, 168 bp, Unknown
  gut microbiota DNA sequence
ttcgttctcactaagggtcaagtatgtatcgcactaaactcgaacggcgctatgcttgttctcgttaagtgctcgtaacaagccgcagtggcggaactggcagacgcgcaggacttaaaatcctgtggtggtgacatcgtaccggttcgattccggtctgcggcagtt

SEQ ID NO: 12664 - DNA, 211 bp, Unknown
  gut microbiota DNA sequence
atttcccgaattgcataaaatataaaaacaaccgatcactttgcaaacgattatccacgtattcgcccatggtctctaactgatgtttcaaatcgcgaacatcctcttcccggcactttgcataataatccagaatctgctgataacgtgattttgtccgtctccctttttgctctggtactcctcctctcgccatctcaacaaagatttt

SEQ ID NO: 12665 - DNA, 6312 bp, Unknown
  gut microbiota DNA sequence
caggcaacgcaggcctaaaatggactccaaagacgggaaaaagttattgtctttgctacaactttcacctattccacccgatgaagttactttgagtccaaagctacttaagcgttaattaacattttaattgatcaaacaaagactcccatatcttttaaagaagcggggttgcagttactttttcatttaaagcaaaattttgattttttgcacaatatggaatttactcctgcatatgattttatttctaacaatttttacataaaaataccgtctgacaagtttacattaaccttgtcagacggtatatcttctatctattatttatttttccccattcaaaataccacgcattttctgcaaaaatatcgttagttacatcaaaaccaagtgttcttaagtaaaatgttcaattaccacttttaatccaattattataagaattattcctcctacaacctctgctttagacttgtacttaactccaaaggcatttccaataaaaactccaccaagggatattgcaaatgttgtaatcccaattagaataactgatgcccaaatcgatgtttccaacttgcttcccattgtgccaaaggttacaccaactgcaagtgcatcaatgcttgtagctatggcaagcataaataattccttaaaatccgtaactgattctacgacttctttctcttcttcactgtctcccaaagcttctcgtatcatatttacgccaataaccaataatagtacaaaagctatccaatgactatacttgttaatatattcaacaaaacttgcacttaaagcgtatcctattaaaggcatcataagctgaaatactccaaagaagaaagctataataaagctttgctttaagtctattactttcatttttaatcctttacaaatcgaaactgcaaaggcatccattgaaagccctactcctataaaaaaaacatctaataaattcatttctcacctttgtatattatctacttttgcaaaatttcctgtaatgccttgtaaagtttcttcatttcttcatcagttcctaccgtaattcgtagataattatctattccaggcttattgaagtatcttacaaaaatattttttttctttaatttttcaaatatttcctttgcaggcattctttcatgagtagcaaaaataaaattagtttttgaatccgtaaatgaaaaaccaagttttttaagctctttcttggcattctctcttgtctcaataattttagaaactatattcttaaaatatgtatcatcttttattgccgcaacaccagtttcgattgttgcctgattcattgtgtatgaattgtaagagaattttactgcctttattgcgtcaattaattccttactaccgaaagcatatccaattctcattccagccattgctcttgactttgaaaatgttcttacaacaagaagattgtcatatttgtcaattaatgacaatgctgtatgacccccgaaatcaacatatgcttcgtccacaataacaacaacatccggattattttttattacttcctctacctgttcaagaggcatttcaattgctgttggggcgtttggattagggaatattattccaccgttttctttgttaaaatccgatggattaatcttaaactgctcatccaatgccactgtcttgtaaggtattttaaatagttcagcccacacatcataaaaagagtatgttatgtcaggaaaaagaattggcttttctgaattaaagcatgtaagaaatgccattcccaaaacgtcatctgaacctactcccacaaaaacctgctctggttttacattgtaatattcagcaagctcgttaactaacagacttgcttccggatcagggtaaagtctgaatcgttcagtatccattttttcaatcatctctgttaccaaaggtgatggtggatatggacattcatttgtatttagtttaatcacatcacttatttttggctgttctcccggtgtgtatggtgtaacttttctaatgttatctttccaactgctcattttttctccttctatttcccgcacaaactataataagacataatataattgtggcaaaaaccgtacctgatgtatctattaaaacatctgccgacttgccacttcttccatccacaaaagtttgatgaaattcatctgtagatgcataaatcatacatatcaaatctgtaactactgcacccataataatgtgctttcttgtgtttcttacttcttcaaaagtaaataacagaattaaaatcaatcctgccaatattccatattcgctgaaatgacctgtttttcttacaaaaaagctcactttattaaataactcttccttagacgctaaatctaaggaagagtattcaggttcaattatctgcacagctcttattgtgattttgtcacttaatccctgtgactgtgttcctgtttctgcagagaatccgaaaatagtactcatccaaaataaaataataagcacaagaactattctcactccccacagagataattttttaatattacatacattcataagctgtcttatactgcatgacctttatcttcaataactttaataacctgattaacatacttttcagccaaatggtctgtttttgcttcaaccattactctgattacaggttctgttccactttctcttacaagaatccttccgtcgtcaccaagaagttctgctactttttcaacttctgcctgaacatcaacatctgctcttgcttccggcttgctttctactctgatattctttaagcactgtggataaataactacagggctgattaattctgacattttcttctttgttgaaagcataacttccattaacttgattgatgtaagaataccgtcacctgttgtagcatacttgctgaaaataatgtgtcctgactgttctccacctaaacggaagttgttatttctcatacattcataaacgtacttatcaccaacgtctgtcttggcatagtcaattcctactgcgtcaaatgccttgtataaaccaatatttgacataatagttgttacaacagtgttgttatctaattctccgttctgcttcatgtaaacaccgcaaacataaagaattaagtcaccatctactatgttgcccttatcatcaatacataaacatctgtcagcgtcaccgtcataagcaaaaccgatatcaagtttgttatcctttacatatttctgtaaaacttcaatatgtgttgaacctgcttccatattaatgtttgttccgttaggttcattgttaattacatatgtttctgctcccaatgcatcaaatacactctttgcaattgctgatgcactaccgtttgagcagtcaagtcctactcttacatttctaaatgaattttttgccaaagtcattaaatatcccatatatctgtttcttccggcaaagtaatcaattgttctaccgatcttgtccattgttgcatatggaacatcatcaaaatcgccatcaagatattcttcaaccttgtcgattacttcctgttccattttttcaccattaccgttaattaattttataccattatcataatatgggttgtgacttgcagaaatcataattccacaatcaaaatcttctgttcttactacataagaaacacttggtgttgttgtaacgtgaagaagataaacatctgcacctgttgatgttaaacctgctgaaagtgcatcttcaaacatataactacttcttcttgtatcttttccgattacaactgaacatttgtggaatcttccataataccatccaagaaatcttcctactttaaatgcatgcattgctgtaagatttacatttgcttcacctctaaagccatctgttccaaaatactttcccatctaattttccctatgctaaatattaattactaatagcattcttaaaatatactctttttaaaaatgccatttttccgataatatttagtcaacaaacacaactttcatattaatgtgcctgtttttcctttccatattttttaaacctgttaggttttaactaattaattatataatagcctttgcctatttacaagacttaaccttaccctatgtcacttaatgtcgaacatttttttacaaaaatttccttttcagtgatatacttgcattgaataggggggaatttattctatgaacaatatttcgaataatatttcaacagcttctttagttgatgaaaccaataggcttcttcttgaaatcagcaacttaaagaagcaacttaactacgaaagaaaccaacataagcactgggaagagcttgccatgatatttcatgatgcactttggtctgaacttaaaagtacccgggattccaacaggtaatacattaaagaggaggtcattaatttatggcctcttttcttaccgctgtcaattgcttgtcgtttattataaattctctattgcatacctccaaagctgctgccttgtgagttatgattatgcaagtttttttgtttagtttcttaatgttatcaagcactttttcttctgtgtttttgtcaagtgccgacgttgcttcatcaagaaggattattggagcattgcttattaacgctcttgcaattgcaagacgctgtgcctgaccttctgagattccaagacctttttcaccgattactgtatctaatccgtcaggtaaattttcaataaaatcctctatttcacttaacttaagtgcctggcttacttccttatctgacgcattaggattaatcataaggatgttctcccttatagttccactaaataaataatttccctgtggcacatatgaaaacatacatcttgtatcagggcttgcctgaattgtttttccgttttcaagacaaatatctattgttccctgctgtggcttaaaaaccccaagaagcatcttcattaatgtactctttccaattcctgaaattcctcttatggcaacaaaatcgcctttgttaagcatagcatcgccgtgctctattactgtttctctgccataattgaattttatgttattaaatctaatactttccagcttatcataagtctgttttacatctattttttcgtatgtactttcttcatttgttatgttttcaatttccataatacgctctgctgaagcaaggactgcataatactgtggaaacatttttgttatacttacaaatggtgtctgaatctgtgaaataagctgcaaaactgctgttaatgttccgtaagtcatagccttcatgctgacttttattgcacaccatcccaaggcaaaaagatatcctgcattaaaaataaatgaaaatcctgcatttgcaaaaatagttatttttcttcttctcatttttacttcgtaatttgttctctgaagaatatttccttttttgtcaaactgtttttccaatccaaatgtttttacaacaagtatgctttcaatggcttcctgaaaaaatgagcgcacttttccgtcagtttcctgaacctgtttgcttaagttttttaatttacctctaaaaaacactgcaataactgacattacaatacctgctgcaataaataacattgtaaacttccagtcgaaaataatcaaaacaacaaaagctccaacaaactgtgtcaggaaatacaatgcgtcaggaactatagagataattccttctgtaactatttttacatcacttgtgattcggttcattaattcaccgctatgatatttgttaatttttccataatctttcatcataatggaataaaaaagtcttccacgcattttcatttccatttttgcctgaaccctaattgtaagactttgtgtaaaaactcttaaaagcaatcttgaagtaataactacaagaattaatatacaattaaaaataatcaagtttctgtaatgcaaaaactccgcatttgatgatgccgttgccgccctttgtgccgaatcaattgcaagtttacttacaagtgccaaaacagttgccaccaatgccagtaatatatttgatatgcttaatataactattttagggatttcacctttgctattttttattatccattttaaactattttgatttttcattttccgtcctttaatattttatctaaaagttttatttgcctaattcccaaaaagctaccgcacttgctgctgcaacatttaaagaatctacaccgtggctcattggaattttgatagtgtaatcactactatttattgtattctggtgaagtccctcaccttccg
